United States Patent Application Publication US 2023/0087228 A1 - sequence listing, part 9

SEQ ID NO: 976 - DNA, 128189 bp, Artificial Sequence
  Synthetic Oligonucleotide
  misc_feature (1)..(95955): n is a, c, g, or t
nnnnnnnnnnnnnnnnnnnnnnnnnnnnnnnnnnnnnnnnnnnnnnnnnnnnnnnnnnnnnnnnnnnnnnnnnnnnnnnnnnnnnnnnnnnnnnnnnnnnnnnnnnnnnnnnnnnnnnnnnnnnnnnnnnnnnnnnnnnnnnnnnnnnnnnnnnnnnnnnnnnnnnnnnnnnnnnnnnnnnnnnnnnnnnnnnnnnnnnnnnnnnnnnnnnnnnnnnnnnnnnnnnnnnnnnnnnnnnnnnnnnnnnnnnnnnnnnnnnnnnnnnnnnnnnnnnnnnnnnnnnnnnnnnnnnnnnnnnnnnnnnnnnnnnnnnnnnnnnnnnnnnnnnnnnnnnnnnnnnnnnnnnnnnnnnnnnnnnnnnnnnnnnnnnnnnnnnnnnnnnnnnnnnnnnnnnnnnnnnnnnnnnnnnnnnnnnnnnnnnnnnnnnnnnnnnnnnnnnnnnnnnnnnnnnnnnnnnnnnnnnnnnnnnnnnnnnnnnnnnnnnnnnnnnnnnnnnnnnnnnnnnnnnnnnnnnnnnnnnnnnnnnnnnnnnnnnnnnnnnnnnnnnnnnnnnnnnnnnnnnnnnnnnnnnnnnnnnnnnnnnnnnnnnnnnnnnnnnnnnnnnnnnnnnnnnnnnnnnnnnnnnnnnnnnnnnnnnnnnnnnnnnnnnnnnnnnnnnnnnnnnnnnnnnnnnnnnnnnnnnnnnnnnnnnnnnnnnnnnnnnnnnnnnnnnnnnnnnnnnnnnnnnnnnnnnnnnnnnnnnnnnnnnnnnnnnnnnnnnnnnnnnnnnnnnnnnnnnnnnnnnnnnnnnnnnnnnnnnnnnnnnnnnnnnnnnnnnnnnnnnnnnnnnnnnnnnnnnnnnnnnnnnnnnnnnnnnnnnnnnnnnnnnnnnnnnnnnnnnnnnnnnnnnnnnnnnnnnnnnnnnnnnnnnnnnnnnnnnnnnnnnnnnnnnnnnnnnnnnnnnnnnnnnnnnnnnnnnnnnnnnnnnnnnnnnnnnnnnnnnnnnnnnnnnnnnnnnnnnnnnnnnnnnnnnnnnnnnnnnnnnnnnnnnnnnnnnnnnnnnnnnnnnnnnnnnnnnnnnnnnnnnnnnnnnnnnnnnnnnnnnnnnnnnnnnnnnnnnnnnnnnnnnnnnnnnnnnnnnnnnnnnnnnnnnnnnnnnnnnnnnnnnnnnnnnnnnnnnnnnnnnnnnnnnnnnnnnnnnnnnnnnnnnnnnnnnnnnnnnnnnnnnnnnnnnnnnnnnnnnnnnnnnnnnnnnnnnnnnnnnnnnnnnnnnnnnnnnnnnnnnnnnnnnnnnnnnnnnnnnnnnnnnnnnnnnnnnnnnnnnnnnnnnnnnnnnnnnnnnnnnnnnnnnnnnnnnnnnnnnnnnnnnnnnnnnnnnnnnnnnnnnnnnnnnnnnnnnnnnnnnnnnnnnnnnnnnnnnnnnnnnnnnnnnnnnnnnnnnnnnnnnnnnnnnnnnnnnnnnnnnnnnnnnnnnnnnnnnnnnnnnnnnnnnnnnnnnnnnnnnnnnnnnnnnnnnnnnnnnnnnnnnnnnnnnnnnnnnnnnnnnnnnnnnnnnnnnnnnnnnnnnnnnnnnnnnnnnnnnnnnnnnnnnnnnnnnnnnnnnnnnnnnnnnnnnnnnnnnnnnnnnnnnnnnnnnnnnnnnnnnnnnnnnnnnnnnnnnnnnnnnnnnnnnnnnnnnnnnnnnnnnnnnnnnnnnnnnnnnnnnnnnnnnnnnnnnnnnnnnnnnnnnnnnnnnnnnnnnnnnnnnnnnnnnnnnnnnnnnnnnnnnnnnnnnnnnnnnnnnnnnnnnnnnnnnnnnnnnnnnnnnnnnnnnnnnnnnnnnnnnnnnnnnnnnnnnnnnnnnnnnnnnnnnnnnnnnnnnnnnnnnnnnnnnnnnnnnnnnnnnnnnnnnnnnnnnnnnnnnnnnnnnnnnnnnnnnnnnnnnnnnnnnnnnnnnnnnnnnnnnnnnnnnnnnnnnnnnnnnnnnnnnnnnnnnnnnnnnnnnnnnnnnnnnnnnnnnnnnnnnnnnnnnnnnnnnnnnnnnnnnnnnnnnnnnnnnnnnnnnnnnnnnnnnnnnnnnnnnnnnnnnnnnnnnnnnnnnnnnnnnnnnnnnnnnnnnnnnnnnnnnnnnnnnnnnnnnnnnnnnnnnnnnnnnnnnnnnnnnnnnnnnnnnnnnnnnnnnnnnnnnnnnnnnnnnnnnnnnnnnnnnnnnnnnnnnnnnnnnnnnnnnnnnnnnnnnnnnnnnnnnnnnnnnnnnnnnnnnnnnnnnnnnnnnnnnnnnnnnnnnnnnnnnnnnnnnnnnnnnnnnnnnnnnnnnnnnnnnnnnnnnnnnnnnnnnnnnnnnnnnnnnnnnnnnnnnnnnnnnnnnnnnnnnnnnnnnnnnnnnnnnnnnnnnnnnnnnnnnnnnnnnnnnnnnnnnnnnnnnnnnnnnnnnnnnnnnnnnnnnnnnnnnnnnnnnnnnnnnnnnnnnnnnnnnnnnnnnnnnnnnnnnnnnnnnnnnnnnnnnnnnnnnnnnnnnnnnnnnnnnnnnnnnnnnnnnnnnnnnnnnnnnnnnnnnnnnnnnnnnnnnnnnnnnnnnnnnnnnnnnnnnnnnnnnnnnnnnnnnnnnnnnnnnnnnnnnnnnnnnnnnnnnnnnnnnnnnnnnnnnnnnnnnnnnnnnnnnnnnnnnnnnnnnnnnnnnnnnnnnnnnnnnnnnnnnnnnnnnnnnnnnnnnnnnnnnnnnnnnnnnnnnnnnnnnnnnnnnnnnnnnnnnnnnnnnnnnnnnnnnnnnnnnnnnnnnnnnnnnnnnnnnnnnnnnnnnnnnnnnnnnnnnnnnnnnnnnnnnnnnnnnnnnnnnnnnnnnnnnnnnnnnnnnnnnnnnnnnnnnnnnnnnnnnnnnnnnnnnnnnnnnnnnnnnnnnnnnnnnnnnnnnnnnnnnnnnnnnnnnnnnnnnnnnnnnnnnnnnnnnnnnnnnnnnnnnnnnnnnnnnnnnnnnnnnnnnnnnnnnnnnnnnnnnnnnnnnnnnnnnnnnnnnnnnnnnnnnnnnnnnnnnnnnnnnnnnnnnnnnnnnnnnnnnnnnnnnnnnnnnnnnnnnnnnnnnnnnnnnnnnnnnnnnnnnnnnnnnnnnnnnnnnnnnnnnnnnnnnnnnnnnnnnnnnnnnnnnnnnnnnnnnnnnnnnnnnnnnnnnnnnnnnnnnnnnnnnnnnnnnnnnnnnnnnnnnnnnnnnnnnnnnnnnnnnnnnnnnnnnnnnnnnnnnnnnnnnnnnnnnnnnnnnnnnnnnnnnnnnnnnnnnnnnnnnnnnnnnnnnnnnnnnnnnnnnnnnnnnnnnnnnnnnnnnnnnnnnnnnnnnnnnnnnnnnnnnnnnnnnnnnnnnnnnnnnnnnnnnnnnnnnnnnnnnnnnnnnnnnnnnnnnnnnnnnnnnnnnnnnnnnnnnnnnnnnnnnnnnnnnnnnnnnnnnnnnnnnnnnnnnnnnnnnnnnnnnnnnnnnnnnnnnnnnnnnnnnnnnnnnnnnnnnnnnnnnnnnnnnnnnnnnnnnnnnnnnnnnnnnnnnnnnnnnnnnnnnnnnnnnnnnnnnnnnnnnnnnnnnnnnnnnnnnnnnnnnnnnnnnnnnnnnnnnnnnnnnnnnnnnnnnnnnnnnnnnnnnnnnnnnnnnnnnnnnnnnnnnnnnnnnnnnnnnnnnnnnnnnnnnnnnnnnnnnnnnnnnnnnnnnnnnnnnnnnnnnnnnnnnnnnnnnnnnnnnnnnnnnnnnnnnnnnnnnnnnnnnnnnnnnnnnnnnnnnnnnnnnnnnnnnnnnnnnnnnnnnnnnnnnnnnnnnnnnnnnnnnnnnnnnnnnnnnnnnnnnnnnnnnnnnnnnnnnnnnnnnnnnnnnnnnnnnnnnnnnnnnnnnnnnnnnnnnnnnnnnnnnnnnnnnnnnnnnnnnnnnnnnnnnnnnnnnnnnnnnnnnnnnnnnnnnnnnnnnnnnnnnnnnnnnnnnnnnnnnnnnnnnnnnnnnnnnnnnnnnnnnnnnnnnnnnnnnnnnnnnnnnnnnnnnnnnnnnnnnnnnnnnnnnnnnnnnnnnnnnnnnnnnnnnnnnnnnnnnnnnnnnnnnnnnnnnnnnnnnnnnnnnnnnnnnnnnnnnnnnnnnnnnnnnnnnnnnnnnnnnnnnnnnnnnnnnnnnnnnnnnnnnnnnnnnnnnnnnnnnnnnnnnnnnnnnnnnnnnnnnnnnnnnnnnnnnnnnnnnnnnnnnnnnnnnnnnnnnnnnnnnnnnnnnnnnnnnnnnnnnnnnnnnnnnnnnnnnnnnnnnnnnnnnnnnnnnnnnnnnnnnnnnnnnnnnnnnnnnnnnnnnnnnnnnnnnnnnnnnnnnnnnnnnnnnnnnnnnnnnnnnnnnnnnnnnnnnnnnnnnnnnnnnnnnnnnnnnnnnnnnnnnnnnnnnnnnnnnnnnnnnnnnnnnnnnnnnnnnnnnnnnnnnnnnnnnnnnnnnnnnnnnnnnnnnnnnnnnnnnnnnnnnnnnnnnnnnnnnnnnnnnnnnnnnnnnnnnnnnnnnnnnnnnnnnnnnnnnnnnnnnnnnnnnnnnnnnnnnnnnnnnnnnnnnnnnnnnnnnnnnnnnnnnnnnnnnnnnnnnnnnnnnnnnnnnnnnnnnnnnnnnnnnnnnnnnnnnnnnnnnnnnnnnnnnnnnnnnnnnnnnnnnnnnnnnnnnnnnnnnnnnnnnnnnnnnnnnnnnnnnnnnnnnnnnnnnnnnnnnnnnnnnnnnnnnnnnnnnnnnnnnnnnnnnnnnnnnnnnnnnnnnnnnnnnnnnnnnnnnnnnnnnnnnnnnnnnnnnnnnnnnnnnnnnnnnnnnnnnnnnnnnnnnnnnnnnnnnnnnnnnnnnnnnnnnnnnnnnnnnnnnnnnnnnnnnnnnnnnnnnnnnnnnnnnnnnnnnnnnnnnnnnnnnnnnnnnnnnnnnnnnnnnnnnnnnnnnnnnnnnnnnnnnnnnnnnnnnnnnnnnnnnnnnnnnnnnnnnnnnnnnnnnnnnnnnnnnnnnnnnnnnnnnnnnnnnnnnnnnnnnnnnnnnnnnnnnnnnnnnnnnnnnnnnnnnnnnnnnnnnnnnnnnnnnnnnnnnnnnnnnnnnnnnnnnnnnnnnnnnnnnnnnnnnnnnnnnnnnnnnnnnnnnnnnnnnnnnnnnnnnnnnnnnnnnnnnnnnnnnnnnnnnnnnnnnnnnnnnnnnnnnnnnnnnnnnnnnnnnnnnnnnnnnnnnnnnnnnnnnnnnnnnnnnnnnnnnnnnnnnnnnnnnnnnnnnnnnnnnnnnnnnnnnnnnnnnnnnnnnnnnnnnnnnnnnnnnnnnnnnnnnnnnnnnnnnnnnnnnnnnnnnnnnnnnnnnnnnnnnnnnnnnnnnnnnnnnnnnnnnnnnnnnnnnnnnnnnnnnnnnnnnnnnnnnnnnnnnnnnnnnnnnnnnnnnnnnnnnnnnnnnnnnnnnnnnnnnnnnnnnnnnnnnnnnnnnnnnnnnnnnnnnnnnnnnnnnnnnnnnnnnnnnnnnnnnnnnnnnnnnnnnnnnnnnnnnnnnnnnnnnnnnnnnnnnnnnnnnnnnnnnnnnnnnnnnnnnnnnnnnnnnnnnnnnnnnnnnnnnnnnnnnnnnnnnnnnnnnnnnnnnnnnnnnnnnnnnnnnnnnnnnnnnnnnnnnnnnnnnnnnnnnnnnnnnnnnnnnnnnnnnnnnnnnnnnnnnnnnnnnnnnnnnnnnnnnnnnnnnnnnnnnnnnnnnnnnnnnnnnnnnnnnnnnnnnnnnnnnnnnnnnnnnnnnnnnnnnnnnnnnnnnnnnnnnnnnnnnnnnnnnnnnnnnnnnnnnnnnnnnnnnnnnnnnnnnnnnnnnnnnnnnnnnnnnnnnnnnnnnnnnnnnnnnnnnnnnnnnnnnnnnnnnnnnnnnnnnnnnnnnnnnnnnnnnnnnnnnnnnnnnnnnnnnnnnnnnnnnnnnnnnnnnnnnnnnnnnnnnnnnnnnnnnnnnnnnnnnnnnnnnnnnnnnnnnnnnnnnnnnnnnnnnnnnnnnnnnnnnnnnnnnnnnnnnnnnnnnnnnnnnnnnnnnnnnnnnnnnnnnnnnnnnnnnnnnnnnnnnnnnnnnnnnnnnnnnnnnnnnnnnnnnnnnnnnnnnnnnnnnnnnnnnnnnnnnnnnnnnnnnnnnnnnnnnnnnnnnnnnnnnnnnnnnnnnnnnnnnnnnnnnnnnnnnnnnnnnnnnnnnnnnnnnnnnnnnnnnnnnnnnnnnnnnnnnnnnnnnnnnnnnnnnnnnnnnnnnnnnnnnnnnnnnnnnnnnnnnnnnnnnnnnnnnnnnnnnnnnnnnnnnnnnnnnnnnnnnnnnnnnnnnnnnnnnnnnnnnnnnnnnnnnnnnnnnnnnnnnnnnnnnnnnnnnnnnnnnnnnnnnnnnnnnnnnnnnnnnnnnnnnnnnnnnnnnnnnnnnnnnnnnnnnnnnnnnnnnnnnnnnnnnnnnnnnnnnnnnnnnnnnnnnnnnnnnnnnnnnnnnnnnnnnnnnnnnnnnnnnnnnnnnnnnnnnnnnnnnnnnnnnnnnnnnnnnnnnnnnnnnnnnnnnnnnnnnnnnnnnnnnnnnnnnnnnnnnnnnnnnnnnnnnnnnnnnnnnnnnnnnnnnnnnnnnnnnnnnnnnnnnnnnnnnnnnnnnnnnnnnnnnnnnnnnnnnnnnnnnnnnnnnnnnnnnnnnnnnnnnnnnnnnnnnnnnnnnnnnnnnnnnnnnnnnnnnnnnnnnnnnnnnnnnnnnnnnnnnnnnnnnnnnnnnnnnnnnnnnnnnnnnnnnnnnnnnnnnnnnnnnnnnnnnnnnnnnnnnnnnnnnnnnnnnnnnnnnnnnnnnnnnnnnnnnnnnnnnnnnnnnnnnnnnnnnnnnnnnnnnnnnnnnnnnnnnnnnnnnnnnnnnnnnnnnnnnnnnnnnnnnnnnnnnnnnnnnnnnnnnnnnnnnnnnnnnnnnnnnnnnnnnnnnnnnnnnnnnnnnnnnnnnnnnnnnnnnnnnnnnnnnnnnnnnnnnnnnnnnnnnnnnnnnnnnnnnnnnnnnnnnnnnnnnnnnnnnnnnnnnnnnnnnnnnnnnnnnnnnnnnnnnnnnnnnnnnnnnnnnnnnnnnnnnnnnnnnnnnnnnnnnnnnnnnnnnnnnnnnnnnnnnnnnnnnnnnnnnnnnnnnnnnnnnnnnnnnnnnnnnnnnnnnnnnnnnnnnnnnnnnnnnnnnnnnnnnnnnnnnnnnnnnnnnnnnnnnnnnnnnnnnnnnnnnnnnnnnnnnnnnnnnnnnnnnnnnnnnnnnnnnnnnnnnnnnnnnnnnnnnnnnnnnnnnnnnnnnnnnnnnnnnnnnnnnnnnnnnnnnnnnnnnnnnnnnnnnnnnnnnnnnnnnnnnnnnnnnnnnnnnnnnnnnnnnnnnnnnnnnnnnnnnnnnnnnnnnnnnnnnnnnnnnnnnnnnnnnnnnnnnnnnnnnnnnnnnnnnnnnnnnnnnnnnnnnnnnnnnnnnnnnnnnnnnnnnnnnnnnnnnnnnnnnnnnnnnnnnnnnnnnnnnnnnnnnnnnnnnnnnnnnnnnnnnnnnnnnnnnnnnnnnnnnnnnnnnnnnnnnnnnnnnnnnnnnnnnnnnnnnnnnnnnnnnnnnnnnnnnnnnnnnnnnnnnnnnnnnnnnnnnnnnnnnnnnnnnnnnnnnnnnnnnnnnnnnnnnnnnnnnnnnnnnnnnnnnnnnnnnnnnnnnnnnnnnnnnnnnnnnnnnnnnnnnnnnnnnnnnnnnnnnnnnnnnnnnnnnnnnnnnnnnnnnnnnnnnnnnnnnnnnnnnnnnnnnnnnnnnnnnnnnnnnnnnnnnnnnnnnnnnnnnnnnnnnnnnnnnnnnnnnnnnnnnnnnnnnnnnnnnnnnnnnnnnnnnnnnnnnnnnnnnnnnnnnnnnnnnnnnnnnnnnnnnnnnnnnnnnnnnnnnnnnnnnnnnnnnnnnnnnnnnnnnnnnnnnnnnnnnnnnnnnnnnnnnnnnnnnnnnnnnnnnnnnnnnnnnnnnnnnnnnnnnnnnnnnnnnnnnnnnnnnnnnnnnnnnnnnnnnnnnnnnnnnnnnnnnnnnnnnnnnnnnnnnnnnnnnnnnnnnnnnnnnnnnnnnnnnnnnnnnnnnnnnnnnnnnnnnnnnnnnnnnnnnnnnnnnnnnnnnnnnnnnnnnnnnnnnnnnnnnnnnnnnnnnnnnnnnnnnnnnnnnnnnnnnnnnnnnnnnnnnnnnnnnnnnnnnnnnnnnnnnnnnnnnnnnnnnnnnnnnnnnnnnnnnnnnnnnnnnnnnnnnnnnnnnnnnnnnnnnnnnnnnnnnnnnnnnnnnnnnnnnnnnnnnnnnnnnnnnnnnnnnnnnnnnnnnnnnnnnnnnnnnnnnnnnnnnnnnnnnnnnnnnnnnnnnnnnnnnnnnnnnnnnnnnnnnnnnnnnnnnnnnnnnnnnnnnnnnnnnnnnnnnnnnnnnnnnnnnnnnnnnnnnnnnnnnnnnnnnnnnnnnnnnnnnnnnnnnnnnnnnnnnnnnnnnnnnnnnnnnnnnnnnnnnnnnnnnnnnnnnnnnnnnnnnnnnnnnnnnnnnnnnnnnnnnnnnnnnnnnnnnnnnnnnnnnnnnnnnnnnnnnnnnnnnnnnnnnnnnnnnnnnnnnnnnnnnnnnnnnnnnnnnnnnnnnnnnnnnnnnnnnnnnnnnnnnnnnnnnnnnnnnnnnnnnnnnnnnnnnnnnnnnnnnnnnnnnnnnnnnnnnnnnnnnnnnnnnnnnnnnnnnnnnnnnnnnnnnnnnnnnnnnnnnnnnnnnnnnnnnnnnnnnnnnnnnnnnnnnnnnnnnnnnnnnnnnnnnnnnnnnnnnnnnnnnnnnnnnnnnnnnnnnnnnnnnnnnnnnnnnnnnnnnnnnnnnnnnnnnnnnnnnnnnnnnnnnnnnnnnnnnnnnnnnnnnnnnnnnnnnnnnnnnnnnnnnnnnnnnnnnnnnnnnnnnnnnnnnnnnnnnnnnnnnnnnnnnnnnnnnnnnnnnnnnnnnnnnnnnnnnnnnnnnnnnnnnnnnnnnnnnnnnnnnnnnnnnnnnnnnnnnnnnnnnnnnnnnnnnnnnnnnnnnnnnnnnnnnnnnnnnnnnnnnnnnnnnnnnnnnnnnnnnnnnnnnnnnnnnnnnnnnnnnnnnnnnnnnnnnnnnnnnnnnnnnnnnnnnnnnnnnnnnnnnnnnnnnnnnnnnnnnnnnnnnnnnnnnnnnnnnnnnnnnnnnnnnnnnnnnnnnnnnnnnnnnnnnnnnnnnnnnnnnnnnnnnnnnnnnnnnnnnnnnnnnnnnnnnnnnnnnnnnnnnnnnnnnnnnnnnnnnnnnnnnnnnnnnnnnnnnnnnnnnnnnnnnnnnnnnnnnnnnnnnnnnnnnnnnnnnnnnnnnnnnnnnnnnnnnnnnnnnnnnnnnnnnnnnnnnnnnnnnnnnnnnnnnnnnnnnnnnnnnnnnnnnnnnnnnnnnnnnnnnnnnnnnnnnnnnnnnnnnnnnnnnnnnnnnnnnnnnnnnnnnnnnnnnnnnnnnnnnnnnnnnnnnnnnnnnnnnnnnnnnnnnnnnnnnnnnnnnnnnnnnnnnnnnnnnnnnnnnnnnnnnnnnnnnnnnnnnnnnnnnnnnnnnnnnnnnnnnnnnnnnnnnnnnnnnnnnnnnnnnnnnnnnnnnnnnnnnnnnnnnnnnnnnnnnnnnnnnnnnnnnnnnnnnnnnnnnnnnnnnnnnnnnnnnnnnnnnnnnnnnnnnnnnnnnnnnnnnnnnnnnnnnnnnnnnnnnnnnnnnnnnnnnnnnnnnnnnnnnnnnnnnnnnnnnnnnnnnnnnnnnnnnnnnnnnnnnnnnnnnnnnnnnnnnnnnnnnnnnnnnnnnnnnnnnnnnnnnnnnnnnnnnnnnnnnnnnnnnnnnnnnnnnnnnnnnnnnnnnnnnnnnnnnnnnnnnnnnnnnnnnnnnnnnnnnnnnnnnnnnnnnnnnnnnnnnnnnnnnnnnnnnnnnnnnnnnnnnnnnnnnnnnnnnnnnnnnnnnnnnnnnnnnnnnnnnnnnnnnnnnnnnnnnnnnnnnnnnnnnnnnnnnnnnnnnnnnnnnnnnnnnnnnnnnnnnnnnnnnnnnnnnnnnnnnnnnnnnnnnnnnnnnnnnnnnnnnnnnnnnnnnnnnnnnnnnnnnnnnnnnnnnnnnnnnnnnnnnnnnnnnnnnnnnnnnnnnnnnnnnnnnnnnnnnnnnnnnnnnnnnnnnnnnnnnnnnnnnnnnnnnnnnnnnnnnnnnnnnnnnnnnnnnnnnnnnnnnnnnnnnnnnnnnnnnnnnnnnnnnnnnnnnnnnnnnnnnnnnnnnnnnnnnnnnnnnnnnnnnnnnnnnnnnnnnnnnnnnnnnnnnnnnnnnnnnnnnnnnnnnnnnnnnnnnnnnnnnnnnnnnnnnnnnnnnnnnnnnnnnnnnnnnnnnnnnnnnnnnnnnnnnnnnnnnnnnnnnnnnnnnnnnnnnnnnnnnnnnnnnnnnnnnnnnnnnnnnnnnnnnnnnnnnnnnnnnnnnnnnnnnnnnnnnnnnnnnnnnnnnnnnnnnnnnnnnnnnnnnnnnnnnnnnnnnnnnnnnnnnnnnnnnnnnnnnnnnnnnnnnnnnnnnnnnnnnnnnnnnnnnnnnnnnnnnnnnnnnnnnnnnnnnnnnnnnnnnnnnnnnnnnnnnnnnnnnnnnnnnnnnnnnnnnnnnnnnnnnnnnnnnnnnnnnnnnnnnnnnnnnnnnnnnnnnnnnnnnnnnnnnnnnnnnnnnnnnnnnnnnnnnnnnnnnnnnnnnnnnnnnnnnnnnnnnnnnnnnnnnnnnnnnnnnnnnnnnnnnnnnnnnnnnnnnnnnnnnnnnnnnnnnnnnnnnnnnnnnnnnnnnnnnnnnnnnnnnnnnnnnnnnnnnnnnnnnnnnnnnnnnnnnnnnnnnnnnnnnnnnnnnnnnnnnnnnnnnnnnnnnnnnnnnnnnnnnnnnnnnnnnnnnnnnnnnnnnnnnnnnnnnnnnnnnnnnnnnnnnnnnnnnnnnnnnnnnnnnnnnnnnnnnnnnnnnnnnnnnnnnnnnnnnnnnnnnnnnnnnnnnnnnnnnnnnnnnnnnnnnnnnnnnnnnnnnnnnnnnnnnnnnnnnnnnnnnnnnnnnnnnnnnnnnnnnnnnnnnnnnnnnnnnnnnnnnnnnnnnnnnnnnnnnnnnnnnnnnnnnnnnnnnnnnnnnnnnnnnnnnnnnnnnnnnnnnnnnnnnnnnnnnnnnnnnnnnnnnnnnnnnnnnnnnnnnnnnnnnnnnnnnnnnnnnnnnnnnnnnnnnnnnnnnnnnnnnnnnnnnnnnnnnnnnnnnnnnnnnnnnnnnnnnnnnnnnnnnnnnnnnnnnnnnnnnnnnnnnnnnnnnnnnnnnnnnnnnnnnnnnnnnnnnnnnnnnnnnnnnnnnnnnnnnnnnnnnnnnnnnnnnnnnnnnnnnnnnnnnnnnnnnnnnnnnnnnnnnnnnnnnnnnnnnnnnnnnnnnnnnnnnnnnnnnnnnnnnnnnnnnnnnnnnnnnnnnnnnnnnnnnnnnnnnnnnnnnnnnnnnnnnnnnnnnnnnnnnnnnnnnnnnnnnnnnnnnnnnnnnnnnnnnnnnnnnnnnnnnnnnnnnnnnnnnnnnnnnnnnnnnnnnnnnnnnnnnnnnnnnnnnnnnnnnnnnnnnnnnnnnnnnnnnnnnnnnnnnnnnnnnnnnnnnnnnnnnnnnnnnnnnnnnnnnnnnnnnnnnnnnnnnnnnnnnnnnnnnnnnnnnnnnnnnnnnnnnnnnnnnnnnnnnnnnnnnnnnnnnnnnnnnnnnnnnnnnnnnnnnnnnnnnnnnnnnnnnnnnnnnnnnnnnnnnnnnnnnnnnnnnnnnnnnnnnnnnnnnnnnnnnnnnnnnnnnnnnnnnnnnnnnnnnnnnnnnnnnnnnnnnnnnnnnnnnnnnnnnnnnnnnnnnnnnnnnnnnnnnnnnnnnnnnnnnnnnnnnnnnnnnnnnnnnnnnnnnnnnnnnnnnnnnnnnnnnnnnnnnnnnnnnnnnnnnnnnnnnnnnnnnnnnnnnnnnnnnnnnnnnnnnnnnnnnnnnnnnnnnnnnnnnnnnnnnnnnnnnnnnnnnnnnnnnnnnnnnnnnnnnnnnnnnnnnnnnnnnnnnnnnnnnnnnnnnnnnnnnnnnnnnnnnnnnnnnnnnnnnnnnnnnnnnnnnnnnnnnnnnnnnnnnnnnnnnnnnnnnnnnnnnnnnnnnnnnnnnnnnnnnnnnnnnnnnnnnnnnnnnnnnnnnnnnnnnnnnnnnnnnnnnnnnnnnnnnnnnnnnnnnnnnnnnnnnnnnnnnnnnnnnnnnnnnnnnnnnnnnnnnnnnnnnnnnnnnnnnnnnnnnnnnnnnnnnnnnnnnnnnnnnnnnnnnnnnnnnnnnnnnnnnnnnnnnnnnnnnnnnnnnnnnnnnnnnnnnnnnnnnnnnnnnnnnnnnnnnnnnnnnnnnnnnnnnnnnnnnnnnnnnnnnnnnnnnnnnnnnnnnnnnnnnnnnnnnnnnnnnnnnnnnnnnnnnnnnnnnnnnnnnnnnnnnnnnnnnnnnnnnnnnnnnnnnnnnnnnnnnnnnnnnnnnnnnnnnnnnnnnnnnnnnnnnnnnnnnnnnnnnnnnnnnnnnnnnnnnnnnnnnnnnnnnnnnnnnnnnnnnnnnnnnnnnnnnnnnnnnnnnnnnnnnnnnnnnnnnnnnnnnnnnnnnnnnnnnnnnnnnnnnnnnnnnnnnnnnnnnnnnnnnnnnnnnnnnnnnnnnnnnnnnnnnnnnnnnnnnnnnnnnnnnnnnnnnnnnnnnnnnnnnnnnnnnnnnnnnnnnnnnnnnnnnnnnnnnnnnnnnnnnnnnnnnnnnnnnnnnnnnnnnnnnnnnnnnnnnnnnnnnnnnnnnnnnnnnnnnnnnnnnnnnnnnnnnnnnnnnnnnnnnnnnnnnnnnnnnnnnnnnnnnnnnnnnnnnnnnnnnnnnnnnnnnnnnnnnnnnnnnnnnnnnnnnnnnnnnnnnnnnnnnnnnnnnnnnnnnnnnnnnnnnnnnnnnnnnnnnnnnnnnnnnnnnnnnnnnnnnnnnnnnnnnnnnnnnnnnnnnnnnnnnnnnnnnnnnnnnnnnnnnnnnnnnnnnnnnnnnnnnnnnnnnnnnnnnnnnnnnnnnnnnnnnnnnnnnnnnnnnnnnnnnnnnnnnnnnnnnnnnnnnnnnnnnnnnnnnnnnnnnnnnnnnnnnnnnnnnnnnnnnnnnnnnnnnnnnnnnnnnnnnnnnnnnnnnnnnnnnnnnnnnnnnnnnnnnnnnnnnnnnnnnnnnnnnnnnnnnnnnnnnnnnnnnnnnnnnnnnnnnnnnnnnnnnnnnnnnnnnnnnnnnnnnnnnnnnnnnnnnnnnnnnnnnnnnnnnnnnnnnnnnnnnnnnnnnnnnnnnnnnnnnnnnnnnnnnnnnnnnnnnnnnnnnnnnnnnnnnnnnnnnnnnnnnnnnnnnnnnnnnnnnnnnnnnnnnnnnnnnnnnnnnnnnnnnnnnnnnnnnnnnnnnnnnnnnnnnnnnnnnnnnnnnnnnnnnnnnnnnnnnnnnnnnnnnnnnnnnnnnnnnnnnnnnnnnnnnnnnnnnnnnnnnnnnnnnnnnnnnnnnnnnnnnnnnnnnnnnnnnnnnnnnnnnnnnnnnnnnnnnnnnnnnnnnnnnnnnnnnnnnnnnnnnnnnnnnnnnnnnnnnnnnnnnnnnnnnnnnnnnnnnnnnnnnnnnnnnnnnnnnnnnnnnnnnnnnnnnnnnnnnnnnnnnnnnnnnnnnnnnnnnnnnnnnnnnnnnnnnnnnnnnnnnnnnnnnnnnnnnnnnnnnnnnnnnnnnnnnnnnnnnnnnnnnnnnnnnnnnnnnnnnnnnnnnnnnnnnnnnnnnnnnnnnnnnnnnnnnnnnnnnnnnnnnnnnnnnnnnnnnnnnnnnnnnnnnnnnnnnnnnnnnnnnnnnnnnnnnnnnnnnnnnnnnnnnnnnnnnnnnnnnnnnnnnnnnnnnnnnnnnnnnnnnnnnnnnnnnnnnnnnnnnnnnnnnnnnnnnnnnnnnnnnnnnnnnnnnnnnnnnnnnnnnnnnnnnnnnnnnnnnnnnnnnnnnnnnnnnnnnnnnnnnnnnnnnnnnnnnnnnnnnnnnnnnnnnnnnnnnnnnnnnnnnnnnnnnnnnnnnnnnnnnnnnnnnnnnnnnnnnnnnnnnnnnnnnnnnnnnnnnnnnnnnnnnnnnnnnnnnnnnnnnnnnnnnnnnnnnnnnnnnnnnnnnnnnnnnnnnnnnnnnnnnnnnnnnnnnnnnnnnnnnnnnnnnnnnnnnnnnnnnnnnnnnnnnnnnnnnnnnnnnnnnnnnnnnnnnnnnnnnnnnnnnnnnnnnnnnnnnnnnnnnnnnnnnnnnnnnnnnnnnnnnnnnnnnnnnnnnnnnnnnnnnnnnnnnnnnnnnnnnnnnnnnnnnnnnnnnnnnnnnnnnnnnnnnnnnnnnnnnnnnnnnnnnnnnnnnnnnnnnnnnnnnnnnnnnnnnnnnnnnnnnnnnnnnnnnnnnnnnnnnnnnnnnnnnnnnnnnnnnnnnnnnnnnnnnnnnnnnnnnnnnnnnnnnnnnnnnnnnnnnnnnnnnnnnnnnnnnnnnnnnnnnnnnnnnnnnnnnnnnnnnnnnnnnnnnnnnnnnnnnnnnnnnnnnnnnnnnnnnnnnnnnnnnnnnnnnnnnnnnnnnnnnnnnnnnnnnnnnnnnnnnnnnnnnnnnnnnnnnnnnnnnnnnnnnnnnnnnnnnnnnnnnnnnnnnnnnnnnnnnnnnnnnnnnnnnnnnnnnnnnnnnnnnnnnnnnnnnnnnnnnnnnnnnnnnnnnnnnnnnnnnnnnnnnnnnnnnnnnnnnnnnnnnnnnnnnnnnnnnnnnnnnnnnnnnnnnnnnnnnnnnnnnnnnnnnnnnnnnnnnnnnnnnnnnnnnnnnnnnnnnnnnnnnnnnnnnnnnnnnnnnnnnnnnnnnnnnnnnnnnnnnnnnnnnnnnnnnnnnnnnnnnnnnnnnnnnnnnnnnnnnnnnnnnnnnnnnnnnnnnnnnnnnnnnnnnnnnnnnnnnnnnnnnnnnnnnnnnnnnnnnnnnnnnnnnnnnnnnnnnnnnnnnnnnnnnnnnnnnnnnnnnnnnnnnnnnnnnnnnnnnnnnnnnnnnnnnnnnnnnnnnnnnnnnnnnnnnnnnnnnnnnnnnnnnnnnnnnnnnnnnnnnnnnnnnnnnnnnnnnnnnnnnnnnnnnnnnnnnnnnnnnnnnnnnnnnnnnnnnnnnnnnnnnnnnnnnnnnnnnnnnnnnnnnnnnnnnnnnnnnnnnnnnnnnnnnnnnnnnnnnnnnnnnnnnnnnnnnnnnnnnnnnnnnnnnnnnnnnnnnnnnnnnnnnnnnnnnnnnnnnnnnnnnnnnnnnnnnnnnnnnnnnnnnnnnnnnnnnnnnnnnnnnnnnnnnnnnnnnnnnnnnnnnnnnnnnnnnnnnnnnnnnnnnnnnnnnnnnnnnnnnnnnnnnnnnnnnnnnnnnnnnnnnnnnnnnnnnnnnnnnnnnnnnnnnnnnnnnnnnnnnnnnnnnnnnnnnnnnnnnnnnnnnnnnnnnnnnnnnnnnnnnnnnnnnnnnnnnnnnnnnnnnnnnnnnnnnnnnnnnnnnnnnnnnnnnnnnnnnnnnnnnnnnnnnnnnnnnnnnnnnnnnnnnnnnnnnnnnnnnnnnnnnnnnnnnnnnnnnnnnnnnnnnnnnnnnnnnnnnnnnnnnnnnnnnnnnnnnnnnnnnnnnnnnnnnnnnnnnnnnnnnnnnnnnnnnnnnnnnnnnnnnnnnnnnnnnnnnnnnnnnnnnnnnnnnnnnnnnnnnnnnnnnnnnnnnnnnnnnnnnnnnnnnnnnnnnnnnnnnnnnnnnnnnnnnnnnnnnnnnnnnnnnnnnnnnnnnnnnnnnnnnnnnnnnnnnnnnnnnnnnnnnnnnnnnnnnnnnnnnnnnnnnnnnnnnnnnnnnnnnnnnnnnnnnnnnnnnnnnnnnnnnnnnnnnnnnnnnnnnnnnnnnnnnnnnnnnnnnnnnnnnnnnnnnnnnnnnnnnnnnnnnnnnnnnnnnnnnnnnnnnnnnnnnnnnnnnnnnnnnnnnnnnnnnnnnnnnnnnnnnnnnnnnnnnnnnnnnnnnnnnnnnnnnnnnnnnnnnnnnnnnnnnnnnnnnnnnnnnnnnnnnnnnnnnnnnnnnnnnnnnnnnnnnnnnnnnnnnnnnnnnnnnnnnnnnnnnnnnnnnnnnnnnnnnnnnnnnnnnnnnnnnnnnnnnnnnnnnnnnnnnnnnnnnnnnnnnnnnnnnnnnnnnnnnnnnnnnnnnnnnnnnnnnnnnnnnnnnnnnnnnnnnnnnnnnnnnnnnnnnnnnnnnnnnnnnnnnnnnnnnnnnnnnnnnnnnnnnnnnnnnnnnnnnnnnnnnnnnnnnnnnnnnnnnnnnnnnnnnnnnnnnnnnnnnnnnnnnnnnnnnnnnnnnnnnnnnnnnnnnnnnnnnnnnnnnnnnnnnnnnnnnnnnnnnnnnnnnnnnnnnnnnnnnnnnnnnnnnnnnnnnnnnnnnnnnnnnnnnnnnnnnnnnnnnnnnnnnnnnnnnnnnnnnnnnnnnnnnnnnnnnnnnnnnnnnnnnnnnnnnnnnnnnnnnnnnnnnnnnnnnnnnnnnnnnnnnnnnnnnnnnnnnnnnnnnnnnnnnnnnnnnnnnnnnnnnnnnnnnnnnnnnnnnnnnnnnnnnnnnnnnnnnnnnnnnnnnnnnnnnnnnnnnnnnnnnnnnnnnnnnnnnnnnnnnnnnnnnnnnnnnnnnnnnnnnnnnnnnnnnnnnnnnnnnnnnnnnnnnnnnnnnnnnnnnnnnnnnnnnnnnnnnnnnnnnnnnnnnnnnnnnnnnnnnnnnnnnnnnnnnnnnnnnnnnnnnnnnnnnnnnnnnnnnnnnnnnnnnnnnnnnnnnnnnnnnnnnnnnnnnnnnnnnnnnnnnnnnnnnnnnnnnnnnnnnnnnnnnnnnnnnnnnnnnnnnnnnnnnnnnnnnnnnnnnnnnnnnnnnnnnnnnnnnnnnnnnnnnnnnnnnnnnnnnnnnnnnnnnnnnnnnnnnnnnnnnnnnnnnnnnnnnnnnnnnnnnnnnnnnnnnnnnnnnnnnnnnnnnnnnnnnnnnnnnnnnnnnnnnnnnnnnnnnnnnnnnnnnnnnnnnnnnnnnnnnnnnnnnnnnnnnnnnnnnnnnnnnnnnnnnnnnnnnnnnnnnnnnnnnnnnnnnnnnnnnnnnnnnnnnnnnnnnnnnnnnnnnnnnnnnnnnnnnnnnnnnnnnnnnnnnnnnnnnnnnnnnnnnnnnnnnnnnnnnnnnnnnnnnnnnnnnnnnnnnnnnnnnnnnnnnnnnnnnnnnnnnnnnnnnnnnnnnnnnnnnnnnnnnnnnnnnnnnnnnnnnnnnnnnnnnnnnnnnnnnnnnnnnnnnnnnnnnnnnnnnnnnnnnnnnnnnnnnnnnnnnnnnnnnnnnnnnnnnnnnnnnnnnnnnnnnnnnnnnnnnnnnnnnnnnnnnnnnnnnnnnnnnnnnnnnnnnnnnnnnnnnnnnnnnnnnnnnnnnnnnnnnnnnnnnnnnnnnnnnnnnnnnnnnnnnnnnnnnnnnnnnnnnnnnnnnnnnnnnnnnnnnnnnnnnnnnnnnnnnnnnnnnnnnnnnnnnnnnnnnnnnnnnnnnnnnnnnnnnnnnnnnnnnnnnnnnnnnnnnnnnnnnnnnnnnnnnnnnnnnnnnnnnnnnnnnnnnnnnnnnnnnnnnnnnnnnnnnnnnnnnnnnnnnnnnnnnnnnnnnnnnnnnnnnnnnnnnnnnnnnnnnnnnnnnnnnnnnnnnnnnnnnnnnnnnnnnnnnnnnnnnnnnnnnnnnnnnnnnnnnnnnnnnnnnnnnnnnnnnnnnnnnnnnnnnnnnnnnnnnnnnnnnnnnnnnnnnnnnnnnnnnnnnnnnnnnnnnnnnnnnnnnnnnnnnnnnnnnnnnnnnnnnnnnnnnnnnnnnnnnnnnnnnnnnnnnnnnnnnnnnnnnnnnnnnnnnnnnnnnnnnnnnnnnnnnnnnnnnnnnnnnnnnnnnnnnnnnnnnnnnnnnnnnnnnnnnnnnnnnnnnnnnnnnnnnnnnnnnnnnnnnnnnnnnnnnnnnnnnnnnnnnnnnnnnnnnnnnnnnnnnnnnnnnnnnnnnnnnnnnnnnnnnnnnnnnnnnnnnnnnnnnnnnnnnnnnnnnnnnnnnnnnnnnnnnnnnnnnnnnnnnnnnnnnnnnnnnnnnnnnnnnnnnnnnnnnnnnnnnnnnnnnnnnnnnnnnnnnnnnnnnnnnnnnnnnnnnnnnnnnnnnnnnnnnnnnnnnnnnnnnnnnnnnnnnnnnnnnnnnnnnnnnnnnnnnnnnnnnnnnnnnnnnnnnnnnnnnnnnnnnnnnnnnnnnnnnnnnnnnnnnnnnnnnnnnnnnnnnnnnnnnnnnnnnnnnnnnnnnnnnnnnnnnnnnnnnnnnnnnnnnnnnnnnnnnnnnnnnnnnnnnnnnnnnnnnnnnnnnnnnnnnnnnnnnnnnnnnnnnnnnnnnnnnnnnnnnnnnnnnnnnnnnnnnnnnnnnnnnnnnnnnnnnnnnnnnnnnnnnnnnnnnnnnnnnnnnnnnnnnnnnnnnnnnnnnnnnnnnnnnnnnnnnnnnnnnnnnnnnnnnnnnnnnnnnnnnnnnnnnnnnnnnnnnnnnnnnnnnnnnnnnnnnnnnnnnnnnnnnnnnnnnnnnnnnnnnnnnnnnnnnnnnnnnnnnnnnnnnnnnnnnnnnnnnnnnnnnnnnnnnnnnnnnnnnnnnnnnnnnnnnnnnnnnnnnnnnnnnnnnnnnnnnnnnnnnnnnnnnnnnnnnnnnnnnnnnnnnnnnnnnnnnnnnnnnnnnnnnnnnnnnnnnnnnnnnnnnnnnnnnnnnnnnnnnnnnnnnnnnnnnnnnnnnnnnnnnnnnnnnnnnnnnnnnnnnnnnnnnnnnnnnnnnnnnnnnnnnnnnnnnnnnnnnnnnnnnnnnnnnnnnnnnnnnnnnnnnnnnnnnnnnnnnnnnnnnnnnnnnnnnnnnnnnnnnnnnnnnnnnnnnnnnnnnnnnnnnnnnnnnnnnnnnnnnnnnnnnnnnnnnnnnnnnnnnnnnnnnnnnnnnnnnnnnnnnnnnnnnnnnnnnnnnnnnnnnnnnnnnnnnnnnnnnnnnnnnnnnnnnnnnnnnnnnnnnnnnnnnnnnnnnnnnnnnnnnnnnnnnnnnnnnnnnnnnnnnnnnnnnnnnnnnnnnnnnnnnnnnnnnnnnnnnnnnnnnnnnnnnnnnnnnnnnnnnnnnnnnnnnnnnnnnnnnnnnnnnnnnnnnnnnnnnnnnnnnnnnnnnnnnnnnnnnnnnnnnnnnnnnnnnnnnnnnnnnnnnnnnnnnnnnnnnnnnnnnnnnnnnnnnnnnnnnnnnnnnnnnnnnnnnnnnnnnnnnnnnnnnnnnnnnnnnnnnnnnnnnnnnnnnnnnnnnnnnnnnnnnnnnnnnnnnnnnnnnnnnnnnnnnnnnnnnnnnnnnnnnnnnnnnnnnnnnnnnnnnnnnnnnnnnnnnnnnnnnnnnnnnnnnnnnnnnnnnnnnnnnnnnnnnnnnnnnnnnnnnnnnnnnnnnnnnnnnnnnnnnnnnnnnnnnnnnnnnnnnnnnnnnnnnnnnnnnnnnnnnnnnnnnnnnnnnnnnnnnnnnnnnnnnnnnnnnnnnnnnnnnnnnnnnnnnnnnnnnnnnnnnnnnnnnnnnnnnnnnnnnnnnnnnnnnnnnnnnnnnnnnnnnnnnnnnnnnnnnnnnnnnnnnnnnnnnnnnnnnnnnnnnnnnnnnnnnnnnnnnnnnnnnnnnnnnnnnnnnnnnnnnnnnnnnnnnnnnnnnnnnnnnnnnnnnnnnnnnnnnnnnnnnnnnnnnnnnnnnnnnnnnnnnnnnnnnnnnnnnnnnnnnnnnnnnnnnnnnnnnnnnnnnnnnnnnnnnnnnnnnnnnnnnnnnnnnnnnnnnnnnnnnnnnnnnnnnnnnnnnnnnnnnnnnnnnnnnnnnnnnnnnnnnnnnnnnnnnnnnnnnnnnnnnnnnnnnnnnnnnnnnnnnnnnnnnnnnnnnnnnnnnnnnnnnnnnnnnnnnnnnnnnnnnnnnnnnnnnnnnnnnnnnnnnnnnnnnnnnnnnnnnnnnnnnnnnnnnnnnnnnnnnnnnnnnnnnnnnnnnnnnnnnnnnnnnnnnnnnnnnnnnnnnnnnnnnnnnnnnnnnnnnnnnnnnnnnnnnnnnnnnnnnnnnnnnnnnnnnnnnnnnnnnnnnnnnnnnnnnnnnnnnnnnnnnnnnnnnnnnnnnnnnnnnnnnnnnnnnnnnnnnnnnnnnnnnnnnnnnnnnnnnnnnnnnnnnnnnnnnnnnnnnnnnnnnnnnnnnnnnnnnnnnnnnnnnnnnnnnnnnnnnnnnnnnnnnnnnnnnnnnnnnnnnnnnnnnnnnnnnnnnnnnnnnnnnnnnnnnnnnnnnnnnnnnnnnnnnnnnnnnnnnnnnnnnnnnnnnnnnnnnnnnnnnnnnnnnnnnnnnnnnnnnnnnnnnnnnnnnnnnnnnnnnnnnnnnnnnnnnnnnnnnnnnnnnnnnnnnnnnnnnnnnnnnnnnnnnnnnnnnnnnnnnnnnnnnnnnnnnnnnnnnnnnnnnnnnnnnnnnnnnnnnnnnnnnnnnnnnnnnnnnnnnnnnnnnnnnnnnnnnnnnnnnnnnnnnnnnnnnnnnnnnnnnnnnnnnnnnnnnnnnnnnnnnnnnnnnnnnnnnnnnnnnnnnnnnnnnnnnnnnnnnnnnnnnnnnnnnnnnnnnnnnnnnnnnnnnnnnnnnnnnnnnnnnnnnnnnnnnnnnnnnnnnnnnnnnnnnnnnnnnnnnnnnnnnnnnnnnnnnnnnnnnnnnnnnnnnnnnnnnnnnnnnnnnnnnnnnnnnnnnnnnnnnnnnnnnnnnnnnnnnnnnnnnnnnnnnnnnnnnnnnnnnnnnnnnnnnnnnnnnnnnnnnnnnnnnnnnnnnnnnnnnnnnnnnnnnnnnnnnnnnnnnnnnnnnnnnnnnnnnnnnnnnnnnnnnnnnnnnnnnnnnnnnnnnnnnnnnnnnnnnnnnnnnnnnnnnnnnnnnnnnnnnnnnnnnnnnnnnnnnnnnnnnnnnnnnnnnnnnnnnnnnnnnnnnnnnnnnnnnnnnnnnnnnnnnnnnnnnnnnnnnnnnnnnnnnnnnnnnnnnnnnnnnnnnnnnnnnnnnnnnnnnnnnnnnnnnnnnnnnnnnnnnnnnnnnnnnnnnnnnnnnnnnnnnnnnnnnnnnnnnnnnnnnnnnnnnnnnnnnnnnnnnnnnnnnnnnnnnnnnnnnnnnnnnnnnnnnnnnnnnnnnnnnnnnnnnnnnnnnnnnnnnnnnnnnnnnnnnnnnnnnnnnnnnnnnnnnnnnnnnnnnnnnnnnnnnnnnnnnnnnnnnnnnnnnnnnnnnnnnnnnnnnnnnnnnnnnnnnnnnnnnnnnnnnnnnnnnnnnnnnnnnnnnnnnnnnnnnnnnnnnnnnnnnnnnnnnnnnnnnnnnnnnnnnnnnnnnnnnnnnnnnnnnnnnnnnnnnnnnnnnnnnnnnnnnnnnnnnnnnnnnnnnnnnnnnnnnnnnnnnnnnnnnnnnnnnnnnnnnnnnnnnnnnnnnnnnnnnnnnnnnnnnnnnnnnnnnnnnnnnnnnnnnnnnnnnnnnnnnnnnnnnnnnnnnnnnnnnnnnnnnnnnnnnnnnnnnnnnnnnnnnnnnnnnnnnnnnnnnnnnnnnnnnnnnnnnnnnnnnnnnnnnnnnnnnnnnnnnnnnnnnnnnnnnnnnnnnnnnnnnnnnnnnnnnnnnnnnnnnnnnnnnnnnnnnnnnnnnnnnnnnnnnnnnnnnnnnnnnnnnnnnnnnnnnnnnnnnnnnnnnnnnnnnnnnnnnnnnnnnnnnnnnnnnnnnnnnnnnnnnnnnnnnnnnnnnnnnnnnnnnnnnnnnnnnnnnnnnnnnnnnnnnnnnnnnnnnnnnnnnnnnnnnnnnnnnnnnnnnnnnnnnnnnnnnnnnnnnnnnnnnnnnnnnnnnnnnnnnnnnnnnnnnnnnnnnnnnnnnnnnnnnnnnnnnnnnnnnnnnnnnnnnnnnnnnnnnnnnnnnnnnnnnnnnnnnnnnnnnnnnnnnnnnnnnnnnnnnnnnnnnnnnnnnnnnnnnnnnnnnnnnnnnnnnnnnnnnnnnnnnnnnnnnnnnnnnnnnnnnnnnnnnnnnnnnnnnnnnnnnnnnnnnnnnnnnnnnnnnnnnnnnnnnnnnnnnnnnnnnnnnnnnnnnnnnnnnnnnnnnnnnnnnnnnnnnnnnnnnnnnnnnnnnnnnnnnnnnnnnnnnnnnnnnnnnnnnnnnnnnnnnnnnnnnnnnnnnnnnnnnnnnnnnnnnnnnnnnnnnnnnnnnnnnnnnnnnnnnnnnnnnnnnnnnnnnnnnnnnnnnnnnnnnnnnnnnnnnnnnnnnnnnnnnnnnnnnnnnnnnnnnnnnnnnnnnnnnnnnnnnnnnnnnnnnnnnnnnnnnnnnnnnnnnnnnnnnnnnnnnnnnnnnnnnnnnnnnnnnnnnnnnnnnnnnnnnnnnnnnnnnnnnnnnnnnnnnnnnnnnnnnnnnnnnnnnnnnnnnnnnnnnnnnnnnnnnnnnnnnnnnnnnnnnnnnnnnnnnnnnnnnnnnnnnnnnnnnnnnnnnnnnnnnnnnnnnnnnnnnnnnnnnnnnnnnnnnnnnnnnnnnnnnnnnnnnnnnnnnnnnnnnnnnnnnnnnnnnnnnnnnnnnnnnnnnnnnnnnnnnnnnnnnnnnnnnnnnnnnnnnnnnnnnnnnnnnnnnnnnnnnnnnnnnnnnnnnnnnnnnnnnnnnnnnnnnnnnnnnnnnnnnnnnnnnnnnnnnnnnnnnnnnnnnnnnnnnnnnnnnnnnnnnnnnnnnnnnnnnnnnnnnnnnnnnnnnnnnnnnnnnnnnnnnnnnnnnnnnnnnnnnnnnnnnnnnnnnnnnnnnnnnnnnnnnnnnnnnnnnnnnnnnnnnnnnnnnnnnnnnnnnnnnnnnnnnnnnnnnnnnnnnnnnnnnnnnnnnnnnnnnnnnnnnnnnnnnnnnnnnnnnnnnnnnnnnnnnnnnnnnnnnnnnnnnnnnnnnnnnnnnnnnnnnnnnnnnnnnnnnnnnnnnnnnnnnnnnnnnnnnnnnnnnnnnnnnnnnnnnnnnnnnnnnnnnnnnnnnnnnnnnnnnnnnnnnnnnnnnnnnnnnnnnnnnnnnnnnnnnnnnnnnnnnnnnnnnnnnnnnnnnnnnnnnnnnnnnnnnnnnnnnnnnnnnnnnnnnnnnnnnnnnnnnnnnnnnnnnnnnnnnnnnnnnnnnnnnnnnnnnnnnnnnnnnnnnnnnnnnnnnnnnnnnnnnnnnnnnnnnnnnnnnnnnnnnnnnnnnnnnnnnnnnnnnnnnnnnnnnnnnnnnnnnnnnnnnnnnnnnnnnnnnnnnnnnnnnnnnnnnnnnnnnnnnnnnnnnnnnnnnnnnnnnnnnnnnnnnnnnnnnnnnnnnnnnnnnnnnnnnnnnnnnnnnnnnnnnnnnnnnnnnnnnnnnnnnnnnnnnnnnnnnnnnnnnnnnnnnnnnnnnnnnnnnnnnnnnnnnnnnnnnnnnnnnnnnnnnnnnnnnnnnnnnnnnnnnnnnnnnnnnnnnnnnnnnnnnnnnnnnnnnnnnnnnnnnnnnnnnnnnnnnnnnnnnnnnnnnnnnnnnnnnnnnnnnnnnnnnnnnnnnnnnnnnnnnnnnnnnnnnnnnnnnnnnnnnnnnnnnnnnnnnnnnnnnnnnnnnnnnnnnnnnnnnnnnnnnnnnnnnnnnnnnnnnnnnnnnnnnnnnnnnnnnnnnnnnnnnnnnnnnnnnnnnnnnnnnnnnnnnnnnnnnnnnnnnnnnnnnnnnnnnnnnnnnnnnnnnnnnnnnnnnnnnnnnnnnnnnnnnnnnnnnnnnnnnnnnnnnnnnnnnnnnnnnnnnnnnnnnnnnnnnnnnnnnnnnnnnnnnnnnnnnnnnnnnnnnnnnnnnnnnnnnnnnnnnnnnnnnnnnnnnnnnnnnnnnnnnnnnnnnnnnnnnnnnnnnnnnnnnnnnnnnnnnnnnnnnnnnnnnnnnnnnnnnnnnnnnnnnnnnnnnnnnnnnnnnnnnnnnnnnnnnnnnnnnnnnnnnnnnnnnnnnnnnnnnnnnnnnnnnnnnnnnnnnnnnnnnnnnnnnnnnnnnnnnnnnnnnnnnnnnnnnnnnnnnnnnnnnnnnnnnnnnnnnnnnnnnnnnnnnnnnnnnnnnnnnnnnnnnnnnnnnnnnnnnnnnnnnnnnnnnnnnnnnnnnnnnnnnnnnnnnnnnnnnnnnnnnnnnnnnnnnnnnnnnnnnnnnnnnnnnnnnnnnnnnnnnnnnnnnnnnnnnnnnnnnnnnnnnnnnnnnnnnnnnnnnnnnnnnnnnnnnnnnnnnnnnnnnnnnnnnnnnnnnnnnnnnnnnnnnnnnnnnnnnnnnnnnnnnnnnnnnnnnnnnnnnnnnnnnnnnnnnnnnnnnnnnnnnnnnnnnnnnnnnnnnnnnnnnnnnnnnnnnnnnnnnnnnnnnnnnnnnnnnnnnnnnnnnnnnnnnnnnnnnnnnnnnnnnnnnnnnnnnnnnnnnnnnnnnnnnnnnnnnnnnnnnnnnnnnnnnnnnnnnnnnnnnnnnnnnnnnnnnnnnnnnnnnnnnnnnnnnnnnnnnnnnnnnnnnnnnnnnnnnnnnnnnnnnnnnnnnnnnnnnnnnnnnnnnnnnnnnnnnnnnnnnnnnnnnnnnnnnnnnnnnnnnnnnnnnnnnnnnnnnnnnnnnnnnnnnnnnnnnnnnnnnnnnnnnnnnnnnnnnnnnnnnnnnnnnnnnnnnnnnnnnnnnnnnnnnnnnnnnnnnnnnnnnnnnnnnnnnnnnnnnnnnnnnnnnnnnnnnnnnnnnnnnnnnnnnnnnnnnnnnnnnnnnnnnnnnnnnnnnnnnnnnnnnnnnnnnnnnnnnnnnnnnnnnnnnnnnnnnnnnnnnnnnnnnnnnnnnnnnnnnnnnnnnnnnnnnnnnnnnnnnnnnnnnnnnnnnnnnnnnnnnnnnnnnnnnnnnnnnnnnnnnnnnnnnnnnnnnnnnnnnnnnnnnnnnnnnnnnnnnnnnnnnnnnnnnnnnnnnnnnnnnnnnnnnnnnnnnnnnnnnnnnnnnnnnnnnnnnnnnnnnnnnnnnnnnnnnnnnnnnnnnnnnnnnnnnnnnnnnnnnnnnnnnnnnnnnnnnnnnnnnnnnnnnnnnnnnnnnnnnnnnnnnnnnnnnnnnnnnnnnnnnnnnnnnnnnnnnnnnnnnnnnnnnnnnnnnnnnnnnnnnnnnnnnnnnnnnnnnnnnnnnnnnnnnnnnnnnnnnnnnnnnnnnnnnnnnnnnnnnnnnnnnnnnnnnnnnnnnnnnnnnnnnnnnnnnnnnnnnnnnnnnnnnnnnnnnnnnnnnnnnnnnnnnnnnnnnnnnnnnnnnnnnnnnnnnnnnnnnnnnnnnnnnnnnnnnnnnnnnnnnnnnnnnnnnnnnnnnnnnnnnnnnnnnnnnnnnnnnnnnnnnnnnnnnnnnnnnnnnnnnnnnnnnnnnnnnnnnnnnnnnnnnnnnnnnnnnnnnnnnnnnnnnnnnnnnnnnnnnnnnnnnnnnnnnnnnnnnnnnnnnnnnnnnnnnnnnnnnnnnnnnnnnnnnnnnnnnnnnnnnnnnnnnnnnnnnnnnnnnnnnnnnnnnnnnnnnnnnnnnnnnnnnnnnnnnnnnnnnnnnnnnnnnnnnnnnnnnnnnnnnnnnnnnnnnnnnnnnnnnnnnnnnnnnnnnnnnnnnnnnnnnnnnnnnnnnnnnnnnnnnnnnnnnnnnnnnnnnnnnnnnnnnnnnnnnnnnnnnnnnnnnnnnnnnnnnnnnnnnnnnnnnnnnnnnnnnnnnnnnnnnnnnnnnnnnnnnnnnnnnnnnnnnnnnnnnnnnnnnnnnnnnnnnnnnnnnnnnnnnnnnnnnnnnnnnnnnnnnnnnnnnnnnnnnnnnnnnnnnnnnnnnnnnnnnnnnnnnnnnnnnnnnnnnnnnnnnnnnnnnnnnnnnnnnnnnnnnnnnnnnnnnnnnnnnnnnnnnnnnnnnnnnnnnnnnnnnnnnnnnnnnnnnnnnnnnnnnnnnnnnnnnnnnnnnnnnnnnnnnnnnnnnnnnnnnnnnnnnnnnnnnnnnnnnnnnnnnnnnnnnnnnnnnnnnnnnnnnnnnnnnnnnnnnnnnnnnnnnnnnnnnnnnnnnnnnnnnnnnnnnnnnnnnnnnnnnnnnnnnnnnnnnnnnnnnnnnnnnnnnnnnnnnnnnnnnnnnnnnnnnnnnnnnnnnnnnnnnnnnnnnnnnnnnnnnnnnnnnnnnnnnnnnnnnnnnnnnnnnnnnnnnnnnnnnnnnnnnnnnnnnnnnnnnnnnnnnnnnnnnnnnnnnnnnnnnnnnnnnnnnnnnnnnnnnnnnnnnnnnnnnnnnnnnnnnnnnnnnnnnnnnnnnnnnnnnnnnnnnnnnnnnnnnnnnnnnnnnnnnnnnnnnnnnnnnnnnnnnnnnnnnnnnnnnnnnnnnnnnnnnnnnnnnnnnnnnnnnnnnnnnnnnnnnnnnnnnnnnnnnnnnnnnnnnnnnnnnnnnnnnnnnnnnnnnnnnnnnnnnnnnnnnnnnnnnnnnnnnnnnnnnnnnnnnnnnnnnnnnnnnnnnnnnnnnnnnnnnnnnnnnnnnnnnnnnnnnnnnnnnnnnnnnnnnnnnnnnnnnnnnnnnnnnnnnnnnnnnnnnnnnnnnnnnnnnnnnnnnnnnnnnnnnnnnnnnnnnnnnnnnnnnnnnnnnnnnnnnnnnnnnnnnnnnnnnnnnnnnnnnnnnnnnnnnnnnnnnnnnnnnnnnnnnnnnnnnnnnnnnnnnnnnnnnnnnnnnnnnnnnnnnnnnnnnnnnnnnnnnnnnnnnnnnnnnnnnnnnnnnnnnnnnnnnnnnnnnnnnnnnnnnnnnnnnnnnnnnnnnnnnnnnnnnnnnnnnnnnnnnnnnnnnnnnnnnnnnnnnnnnnnnnnnnnnnnnnnnnnnnnnnnnnnnnnnnnnnnnnnnnnnnnnnnnnnnnnnnnnnnnnnnnnnnnnnnnnnnnnnnnnnnnnnnnnnnnnnnnnnnnnnnnnnnnnnnnnnnnnnnnnnnnnnnnnnnnnnnnnnnnnnnnnnnnnnnnnnnnnnnnnnnnnnnnnnnnnnnnnnnnnnnnnnnnnnnnnnnnnnnnnnnnnnnnnnnnnnnnnnnnnnnnnnnnnnnnnnnnnnnnnnnnnnnnnnnnnnnnnnnnnnnnnnnnnnnnnnnnnnnnnnnnnnnnnnnnnnnnnnnnnnnnnnnnnnnnnnnnnnnnnnnnnnnnnnnnnnnnnnnnnnnnnnnnnnnnnnnnnnnnnnnnnnnnnnnnnnnnnnnnnnnnnnnnnnnnnnnnnnnnnnnnnnnnnnnnnnnnnnnnnnnnnnnnnnnnnnnnnnnnnnnnnnnnnnnnnnnnnnnnnnnnnnnnnnnnnnnnnnnnnnnnnnnnnnnnnnnnnnnnnnnnnnnnnnnnnnnnnnnnnnnnnnnnnnnnnnnnnnnnnnnnnnnnnnnnnnnnnnnnnnnnnnnnnnnnnnnnnnnnnnnnnnnnnnnnnnnnnnnnnnnnnnnnnnnnnnnnnnnnnnnnnnnnnnnnnnnnnnnnnnnnnnnnnnnnnnnnnnnnnnnnnnnnnnnnnnnnnnnnnnnnnnnnnnnnnnnnnnnnnnnnnnnnnnnnnnnnnnnnnnnnnnnnnnnnnnnnnnnnnnnnnnnnnnnnnnnnnnnnnnnnnnnnnnnnnnnnnnnnnnnnnnnnnnnnnnnnnnnnnnnnnnnnnnnnnnnnnnnnnnnnnnnnnnnnnnnnnnnnnnnnnnnnnnnnnnnnnnnnnnnnnnnnnnnnnnnnnnnnnnnnnnnnnnnnnnnnnnnnnnnnnnnnnnnnnnnnnnnnnnnnnnnnnnnnnnnnnnnnnnnnnnnnnnnnnnnnnnnnnnnnnnnnnnnnnnnnnnnnnnnnnnnnnnnnnnnnnnnnnnnnnnnnnnnnnnnnnnnnnnnnnnnnnnnnnnnnnnnnnnnnnnnnnnnnnnnnnnnnnnnnnnnnnnnnnnnnnnnnnnnnnnnnnnnnnnnnnnnnnnnnnnnnnnnnnnnnnnnnnnnnnnnnnnnnnnnnnnnnnnnnnnnnnnnnnnnnnnnnnnnnnnnnnnnnnnnnnnnnnnnnnnnnnnnnnnnnnnnnnnnnnnnnnnnnnnnnnnnnnnnnnnnnnnnnnnnnnnnnnnnnnnnnnnnnnnnnnnnnnnnnnnnnnnnnnnnnnnnnnnnnnnnnnnnnnnnnnnnnnnnnnnnnnnnnnnnnnnnnnnnnnnnnnnnnnnnnnnnnnnnnnnnnnnnnnnnnnnnnnnnnnnnnnnnnnnnnnnnnnnnnnnnnnnnnnnnnnnnnnnnnnnnnnnnnnnnnnnnnnnnnnnnnnnnnnnnnnnnnnnnnnnnnnnnnnnnnnnnnnnnnnnnnnnnnnnnnnnnnnnnnnnnnnnnnnnnnnnnnnnnnnnnnnnnnnnnnnnnnnnnnnnnnnnnnnnnnnnnnnnnnnnnnnnnnnnnnnnnnnnnnnnnnnnnnnnnnnnnnnnnnnnnnnnnnnnnnnnnnnnnnnnnnnnnnnnnnnnnnnnnnnnnnnnnnnnnnnnnnnnnnnnnnnnnnnnnnnnnnnnnnnnnnnnnnnnnnnnnnnnnnnnnnnnnnnnnnnnnnnnnnnnnnnnnnnnnnnnnnnnnnnnnnnnnnnnnnnnnnnnnnnnnnnnnnnnnnnnnnnnnnnnnnnnnnnnnnnnnnnnnnnnnnnnnnnnnnnnnnnnnnnnnnnnnnnnnnnnnnnnnnnnnnnnnnnnnnnnnnnnnnnnnnnnnnnnnnnnnnnnnnnnnnnnnnnnnnnnnnnnnnnnnnnnnnnnnnnnnnnnnnnnnnnnnnnnnnnnnnnnnnnnnnnnnnnnnnnnnnnnnnnnnnnnnnnnnnnnnnnnnnnnnnnnnnnnnnnnnnnnnnnnnnnnnnnnnnnnnnnnnnnnnnnnnnnnnnnnnnnnnnnnnnnnnnnnnnnnnnnnnnnnnnnnnnnnnnnnnnnnnnnnnnnnnnnnnnnnnnnnnnnnnnnnnnnnnnnnnnnnnnnnnnnnnnnnnnnnnnnnnnnnnnnnnnnnnnnnnnnnnnnnnnnnnnnnnnnnnnnnnnnnnnnnnnnnnnnnnnnnnnnnnnnnnnnnnnnnnnnnnnnnnnnnnnnnnnnnnnnnnnnnnnnnnnnnnnnnnnnnnnnnnnnnnnnnnnnnnnnnnnnnnnnnnnnnnnnnnnnnnnnnnnnnnnnnnnnnnnnnnnnnnnnnnnnnnnnnnnnnnnnnnnnnnnnnnnnnnnnnnnnnnnnnnnnnnnnnnnnnnnnnnnnnnnnnnnnnnnnnnnnnnnnnnnnnnnnnnnnnnnnnnnnnnnnnnnnnnnnnnnnnnnnnnnnnnnnnnnnnnnnnnnnnnnnnnnnnnnnnnnnnnnnnnnnnnnnnnnnnnnnnnnnnnnnnnnnnnnnnnnnnnnnnnnnnnnnnnnnnnnnnnnnnnnnnnnnnnnnnnnnnnnnnnnnnnnnnnnnnnnnnnnnnnnnnnnnnnnnnnnnnnnnnnnnnnnnnnnnnnnnnnnnnnnnnnnnnnnnnnnnnnnnnnnnnnnnnnnnnnnnnnnnnnnnnnnnnnnnnnnnnnnnnnnnnnnnnnnnnnnnnnnnnnnnnnnnnnnnnnnnnnnnnnnnnnnnnnnnnnnnnnnnnnnnnnnnnnnnnnnnnnnnnnnnnnnnnnnnnnnnnnnnnnnnnnnnnnnnnnnnnnnnnnnnnnnnnnnnnnnnnnnnnnnnnnnnnnnnnnnnnnnnnnnnnnnnnnnnnnnnnnnnnnnnnnnnnnnnnnnnnnnnnnnnnnnnnnnnnnnnnnnnnnnnnnnnnnnnnnnnnnnnnnnnnnnnnnnnnnnnnnnnnnnnnnnnnnnnnnnnnnnnnnnnnnnnnnnnnnnnnnnnnnnnnnnnnnnnnnnnnnnnnnnnnnnnnnnnnnnnnnnnnnnnnnnnnnnnnnnnnnnnnnnnnnnnnnnnnnnnnnnnnnnnnnnnnnnnnnnnnnnnnnnnnnnnnnnnnnnnnnnnnnnnnnnnnnnnnnnnnnnnnnnnnnnnnnnnnnnnnnnnnnnnnnnnnnnnnnnnnnnnnnnnnnnnnnnnnnnnnnnnnnnnnnnnnnnnnnnnnnnnnnnnnnnnnnnnnnnnnnnnnnnnnnnnnnnnnnnnnnnnnnnnnnnnnnnnnnnnnnnnnnnnnnnnnnnnnnnnnnnnnnnnnnnnnnnnnnnnnnnnnnnnnnnnnnnnnnnnnnnnnnnnnnnnnnnnnnnnnnnnnnnnnnnnnnnnnnnnnnnnnnnnnnnnnnnnnnnnnnnnnnnnnnnnnnnnnnnnnnnnnnnnnnnnnnnnnnnnnnnnnnnnnnnnnnnnnnnnnnnnnnnnnnnnnnnnnnnnnnnnnnnnnnnnnnnnnnnnnnnnnnnnnnnnnnnnnnnnnnnnnnnnnnnnnnnnnnnnnnnnnnnnnnnnnnnnnnnnnnnnnnnnnnnnnnnnnnnnnnnnnnnnnnnnnnnnnnnnnnnnnnnnnnnnnnnnnnnnnnnnnnnnnnnnnnnnnnnnnnnnnnnnnnnnnnnnnnnnnnnnnnnnnnnnnnnnnnnnnnnnnnnnnnnnnnnnnnnnnnnnnnnnnnnnnnnnnnnnnnnnnnnnnnnnnnnnnnnnnnnnnnnnnnnnnnnnnnnnnnnnnnnnnnnnnnnnnnnnnnnnnnnnnnnnnnnnnnnnnnnnnnnnnnnnnnnnnnnnnnnnnnnnnnnnnnnnnnnnnnnnnnnnnnnnnnnnnnnnnnnnnnnnnnnnnnnnnnnnnnnnnnnnnnnnnnnnnnnnnnnnnnnnnnnnnnnnnnnnnnnnnnnnnnnnnnnnnnnnnnnnnnnnnnnnnnnnnnnnnnnnnnnnnnnnnnnnnnnnnnnnnnnnnnnnnnnnnnnnnnnnnnnnnnnnnnnnnnnnnnnnnnnnnnnnnnnnnnnnnnnnnnnnnnnnnnnnnnnnnnnnnnnnnnnnnnnnnnnnnnnnnnnnnnnnnnnnnnnnnnnnnnnnnnnnnnnnnnnnnnnnnnnnnnnnnnnnnnnnnnnnnnnnnnnnnnnnnnnnnnnnnnnnnnnnnnnnnnnnnnnnnnnnnnnnnnnnnnnnnnnnnnnnnnnnnnnnnnnnnnnnnnnnnnnnnnnnnnnnnnnnnnnnnnnnnnnnnnnnnnnnnnnnnnnnnnnnnnnnnnnnnnnnnnnnnnnnnnnnnnnnnnnnnnnnnnnnnnnnnnnnnnnnnnnnnnnnnnnnnnnnnnnnnnnnnnnnnnnnnnnnnnnnnnnnnnnnnnnnnnnnnnnnnnnnnnnnnnnnnnnnnnnnnnnnnnnnnnnnnnnnnnnnnnnnnnnnnnnnnnnnnnnnnnnnnnnnnnnnnnnnnnnnnnnnnnnnnnnnnnnnnnnnnnnnnnnnnnnnnnnnnnnnnnnnnnnnnnnnnnnnnnnnnnnnnnnnnnnnnnnnnnnnnnnnnnnnnnnnnnnnnnnnnnnnnnnnnnnnnnnnnnnnnnnnnnnnnnnnnnnnnnnnnnnnnnnnnnnnnnnnnnnnnnnnnnnnnnnnnnnnnnnnnnnnnnnnnnnnnnnnnnnnnnnnnnnnnnnnnnnnnnnnnnnnnnnnnnnnnnnnnnnnnnnnnnnnnnnnnnnnnnnnnnnnnnnnnnnnnnnnnnnnnnnnnnnnnnnnnnnnnnnnnnnnnnnnnnnnnnnnnnnnnnnnnnnnnnnnnnnnnnnnnnnnnnnnnnnnnnnnnnnnnnnnnnnnnnnnnnnnnnnnnnnnnnnnnnnnnnnnnnnnnnnnnnnnnnnnnnnnnnnnnnnnnnnnnnnnnnnnnnnnnnnnnnnnnnnnnnnnnnnnnnnnnnnnnnnnnnnnnnnnnnnnnnnnnnnnnnnnnnnnnnnnnnnnnnnnnnnnnnnnnnnnnnnnnnnnnnnnnnnnnnnnnnnnnnnnnnnnnnnnnnnnnnnnnnnnnnnnnnnnnnnnnnnnnnnnnnnnnnnnnnnnnnnnnnnnnnnnnnnnnnnnnnnnnnnnnnnnnnnnnnnnnnnnnnnnnnnnnnnnnnnnnnnnnnnnnnnnnnnnnnnnnnnnnnnnnnnnnnnnnnnnnnnnnnnnnnnnnnnnnnnnnnnnnnnnnnnnnnnnnnnnnnnnnnnnnnnnnnnnnnnnnnnnnnnnnnnnnnnnnnnnnnnnnnnnnnnnnnnnnnnnnnnnnnnnnnnnnnnnnnnnnnnnnnnnnnnnnnnnnnnnnnnnnnnnnnnnnnnnnnnnnnnnnnnnnnnnnnnnnnnnnnnnnnnnnnnnnnnnnnnnnnnnnnnnnnnnnnnnnnnnnnnnnnnnnnnnnnnnnnnnnnnnnnnnnnnnnnnnnnnnnnnnnnnnnnnnnnnnnnnnnnnnnnnnnnnnnnnnnnnnnnnnnnnnnnnnnnnnnnnnnnnnnnnnnnnnnnnnnnnnnnnnnnnnnnnnnnnnnnnnnnnnnnnnnnnnnnnnnnnnnnnnnnnnnnnnnnnnnnnnnnnnnnnnnnnnnnnnnnnnnnnnnnnnnnnnnnnnnnnnnnnnnnnnnnnnnnnnnnnnnnnnnnnnnnnnnnnnnnnnnnnnnnnnnnnnnnnnnnnnnnnnnnnnnnnnnnnnnnnnnnnnnnnnnnnnnnnnnnnnnnnnnnnnnnnnnnnnnnnnnnnnnnnnnnnnnnnnnnnnnnnnnnnnnnnnnnnnnnnnnnnnnnnnnnnnnnnnnnnnnnnnnnnnnnnnnnnnnnnnnnnnnnnnnnnnnnnnnnnnnnnnnnnnnnnnnnnnnnnnnnnnnnnnnnnnnnnnnnnnnnnnnnnnnnnnnnnnnnnnnnnnnnnnnnnnnnnnnnnnnnnnnnnnnnnnnnnnnnnnnnnnnnnnnnnnnnnnnnnnnnnnnnnnnnnnnnnnnnnnnnnnnnnnnnnnnnnnnnnnnnnnnnnnnnnnnnnnnnnnnnnnnnnnnnnnnnnnnnnnnnnnnnnnnnnnnnnnnnnnnnnnnnnnnnnnnnnnnnnnnnnnnnnnnnnnnnnnnnnnnnnnnnnnnnnnnnnnnnnnnnnnnnnnnnnnnnnnnnnnnnnnnnnnnnnnnnnnnnnnnnnnnnnnnnnnnnnnnnnnnnnnnnnnnnnnnnnnnnnnnnnnnnnnnnnnnnnnnnnnnnnnnnnnnnnnnnnnnnnnnnnnnnnnnnnnnnnnnnnnnnnnnnnnnnnnnnnnnnnnnnnnnnnnnnnnnnnnnnnnnnnnnnnnnnnnnnnnnnnnnnnnnnnnnnnnnnnnnnnnnnnnnnnnnnnnnnnnnnnnnnnnnnnnnnnnnnnnnnnnnnnnnnnnnnnnnnnnnnnnnnnnnnnnnnnnnnnnnnnnnnnnnnnnnnnnnnnnnnnnnnnnnnnnnnnnnnnnnnnnnnnnnnnnnnnnnnnnnnnnnnnnnnnnnnnnnnnnnnnnnnnnnnnnnnnnnnnnnnnnnnnnnnnnnnnnnnnnnnnnnnnnnnnnnnnnnnnnnnnnnnnnnnnnnnnnnnnnnnnnnnnnnnnnnnnnnnnnnnnnnnnnnnnnnnnnnnnnnnnnnnnnnnnnnnnnnnnnnnnnnnnnnnnnnnnnnnnnnnnnnnnnnnnnnnnnnnnnnnnnnnnnnnnnnnnnnnnnnnnnnnnnnnnnnnnnnnnnnnnnnnnnnnnnnnnnnnnnnnnnnnnnnnnnnnnnnnnnnnnnnnnnnnnnnnnnnnnnnnnnnnnnnnnnnnnnnnnnnnnnnnnnnnnnnnnnnnnnnnnnnnnnnnnnnnnnnnnnnnnnnnnnnnnnnnnnnnnnnnnnnnnnnnnnnnnnnnnnnnnnnnnnnnnnnnnnnnnnnnnnnnnnnnnnnnnnnnnnnnnnnnnnnnnnnnnnnnnnnnnnnnnnnnnnnnnnnnnnnnnnnnnnnnnnnnnnnnnnnnnnnnnnnnnnnnnnnnnnnnnnnnnnnnnnnnnnnnnnnnnnnnnnnnnnnnnnnnnnnnnnnnnnnnnnnnnnnnnnnnnnnnnnnnnnnnnnnnnnnnnnnnnnnnnnnnnnnnnnnnnnnnnnnnnnnnnnnnnnnnnnnnnnnnnnnnnnnnnnnnnnnnnnnnnnnnnnnnnnnnnnnnnnnnnnnnnnnnnnnnnnnnnnnnnnnnnnnnnnnnnnnnnnnnnnnnnnnnnnnnnnnnnnnnnnnnnnnnnnnnnnnnnnnnnnnnnnnnnnnnnnnnnnnnnnnnnnnnnnnnnnnnnnnnnnnnnnnnnnnnnnnnnnnnnnnnnnnnnnnnnnnnnnnnnnnnnnnnnnnnnnnnnnnnnnnnnnnnnnnnnnnnnnnnnnnnnnnnnnnnnnnnnnnnnnnnnnnnnnnnnnnnnnnnnnnnnnnnnnnnnnnnnnnnnnnnnnnnnnnnnnnnnnnnnnnnnnnnnnnnnnnnnnnnnnnnnnnnnnnnnnnnnnnnnnnnnnnnnnnnnnnnnnnnnnnnnnnnnnnnnnnnnnnnnnnnnnnnnnnnnnnnnnnnnnnnnnnnnnnnnnnnnnnnnnnnnnnnnnnnnnnnnnnnnnnnnnnnnnnnnnnnnnnnnnnnnnnnnnnnnnnnnnnnnnnnnnnnnnnnnnnnnnnnnnnnnnnnnnnnnnnnnnnnnnnnnnnnnnnnnnnnnnnnnnnnnnnnnnnnnnnnnnnnnnnnnnnnnnnnnnnnnnnnnnnnnnnnnnnnnnnnnnnnnnnnnnnnnnnnnnnnnnnnnnnnnnnnnnnnnnnnnnnnnnnnnnnnnnnnnnnnnnnnnnnnnnnnnnnnnnnnnnnnnnnnnnnnnnnnnnnnnnnnnnnnnnnnnnnnnnnnnnnnnnnnnnnnnnnnnnnnnnnnnnnnnnnnnnnnnnnnnnnnnnnnnnnnnnnnnnnnnnnnnnnnnnnnnnnnnnnnnnnnnnnnnnnnnnnnnnnnnnnnnnnnnnnnnnnnnnnnnnnnnnnnnnnnnnnnnnnnnnnnnnnnnnnnnnnnnnnnnnnnnnnnnnnnnnnnnnnnnnnnnnnnnnnnnnnnnnnnnnnnnnnnnnnnnnnnnnnnnnnnnnnnnnnnnnnnnnnnnnnnnnnnnnnnnnnnnnnnnnnnnnnnnnnnnnnnnnnnnnnnnnnnnnnnnnnnnnnnnnnnnnnnnnnnnnnnnnnnnnnnnnnnnnnnnnnnnnnnnnnnnnnnnnnnnnnnnnnnnnnnnnnnnnnnnnnnnnnnnnnnnnnnnnnnnnnnnnnnnnnnnnnnnnnnnnnnnnnnnnnnnnnnnnnnnnnnnnnnnnnnnnnnnnnnnnnnnnnnnnnnnnnnnnnnnnnnnnnnnnnnnnnnnnnnnnnnnnnnnnnnnnnnnnnnnnnnnnnnnnnnnnnnnnnnnnnnnnnnnnnnnnnnnnnnnnnnnnnnnnnnnnnnnnnnnnnnnnnnnnnnnnnnnnnnnnnnnnnnnnnnnnnnnnnnnnnnnnnnnnnnnnnnnnnnnnnnnnnnnnnnnnnnnnnnnnnnnnnnnnnnnnnnnnnnnnnnnnnnnnnnnnnnnnnnnnnnnnnnnnnnnnnnnnnnnnnnnnnnnnnnnnnnnnnnnnnnnnnnnnnnnnnnnnnnnnnnnnnnnnnnnnnnnnnnnnnnnnnnnnnnnnnnnnnnnnnnnnnnnnnnnnnnnnnnnnnnnnnnnnnnnnnnnnnnnnnnnnnnnnnnnnnnnnnnnnnnnnnnnnnnnnnnnnnnnnnnnnnnnnnnnnnnnnnnnnnnnnnnnnnnnnnnnnnnnnnnnnnnnnnnnnnnnnnnnnnnnnnnnnnnnnnnnnnnnnnnnnnnnnnnnnnnnnnnnnnnnnnnnnnnnnnnnnnnnnnnnnnnnnnnnnnnnnnnnnnnnnnnnnnnnnnnnnnnnnnnnnnnnnnnnnnnnnnnnnnnnnnnnnnnnnnnnnnnnnnnnnnnnnnnnnnnnnnnnnnnnnnnnnnnnnnnnnnnnnnnnnnnnnnnnnnnnnnnnnnnnnnnnnnnnnnnnnnnnnnnnnnnnnnnnnnnnnnnnnnnnnnnnnnnnnnnnnnnnnnnnnnnnnnnnnnnnnnnnnnnnnnnnnnnnnnnnnnnnnnnnnnnnnnnnnnnnnnnnnnnnnnnnnnnnnnnnnnnnnnnnnnnnnnnnnnnnnnnnnnnnnnnnnnnnnnnnnnnnnnnnnnnnnnnnnnnnnnnnnnnnnnnnnnnnnnnnnnnnnnnnnnnnnnnnnnnnnnnnnnnnnnnnnnnnnnnnnnnnnnnnnnnnnnnnnnnnnnnnnnnnnnnnnnnnnnnnnnnnnnnnnnnnnnnnnnnnnnnnnnnnnnnnnnnnnnnnnnnnnnnnnnnnnnnnnnnnnnnnnnnnnnnnnnnnnnnnnnnnnnnnnnnnnnnnnnnnnnnnnnnnnnnnnnnnnnnnnnnnnnnnnnnnnnnnnnnnnnnnnnnnnnnnnnnnnnnnnnnnnnnnnnnnnnnnnnnnnnnnnnnnnnnnnnnnnnnnnnnnnnnnnnnnnnnnnnnnnnnnnnnnnnnnnnnnnnnnnnnnnnnnnnnnnnnnnnnnnnnnnnnnnnnnnnnnnnnnnnnnnnnnnnnnnnnnnnnnnnnnnnnnnnnnnnnnnnnnnnnnnnnnnnnnnnnnnnnnnnnnnnnnnnnnnnnnnnnnnnnnnnnnnnnnnnnnnnnnnnnnnnnnnnnnnnnnnnnnnnnnnnnnnnnnnnnnnnnnnnnnnnnnnnnnnnnnnnnnnnnnnnnnnnnnnnnnnnnnnnnnnnnnnnnnnnnnnnnnnnnnnnnnnnnnnnnnnnnnnnnnnnnnnnnnnnnnnnnnnnnnnnnnnnnnnnnnnnnnnnnnnnnnnnnnnnnnnnnnnnnnnnnnnnnnnnnnnnnnnnnnnnnnnnnnnnnnnnnnnnnnnnnnnnnnnnnnnnnnnnnnnnnnnnnnnnnnnnnnnnnnnnnnnnnnnnnnnnnnnnnnnnnnnnnnnnnnnnnnnnnnnnnnnnnnnnnnnnnnnnnnnnnnnnnnnnnnnnnnnnnnnnnnnnnnnnnnnnnnnnnnnnnnnnnnnnnnnnnnnnnnnnnnnnnnnnnnnnnnnnnnnnnnnnnnnnnnnnnnnnnnnnnnnnnnnnnnnnnnnnnnnnnnnnnnnnnnnnnnnnnnnnnnnnnnnnnnnnnnnnnnnnnnnnnnnnnnnnnnnnnnnnnnnnnnnnnnnnnnnnnnnnnnnnnnnnnnnnnnnnnnnnnnnnnnnnnnnnnnnnnnnnnnnnnnnnnnnnnnnnnnnnnnnnnnnnnnnnnnnnnnnnnnnnnnnnnnnnnnnnnnnnnnnnnnnnnnnnnnnnnnnnnnnnnnnnnnnnnnnnnnnnnnnnnnnnnnnnnnnnnnnnnnnnnnnnnnnnnnnnnnnnnnnnnnnnnnnnnnnnnnnnnnnnnnnnnnnnnnnnnnnnnnnnnnnnnnnnnnnnnnnnnnnnnnnnnnnnnnnnnnnnnnnnnnnnnnnnnnnnnnnnnnnnnnnnnnnnnnnnnnnnnnnnnnnnnnnnnnnnnnnnnnnnnnnnnnnnnnnnnnnnnnnnnnnnnnnnnnnnnnnnnnnnnnnnnnnnnnnnnnnnnnnnnnnnnnnnnnnnnnnnnnnnnnnnnnnnnnnnnnnnnnnnnnnnnnnnnnnnnnnnnnnnnnnnnnnnnnnnnnnnnnnnnnnnnnnnnnnnnnnnnnnnnnnnnnnnnnnnnnnnnnnnnnnnnnnnnnnnnnnnnnnnnnnnnnnnnnnnnnnnnnnnnnnnnnnnnnnnnnnnnnnnnnnnnnnnnnnnnnnnnnnnnnnnnnnnnnnnnnnnnnnnnnnnnnnnnnnnnnnnnnnnnnnnnnnnnnnnnnnnnnnnnnnnnnnnnnnnnnnnnnnnnnnnnnnnnnnnnnnnnnnnnnnnnnnnnnnnnnnnnnnnnnnnnnnnnnnnnnnnnnnnnnnnnnnnnnnnnnnnnnnnnnnnnnnnnnnnnnnnnnnnnnnnnnnnnnnnnnnnnnnnnnnnnnnnnnnnnnnnnnnnnnnnnnnnnnnnnnnnnnnnnnnnnnnnnnnnnnnnnnnnnnnnnnnnnnnnnnnnnnnnnnnnnnnnnnnnnnnnnnnnnnnnnnnnnnnnnnnnnnnnnnnnnnnnnnnnnnnnnnnnnnnnnnnnnnnnnnnnnnnnnnnnnnnnnnnnnnnnnnnnnnnnnnnnnnnnnnnnnnnnnnnnnnnnnnnnnnnnnnnnnnnnnnnnnnnnnnnnnnnnnnnnnnnnnnnnnnnnnnnnnnnnnnnnnnnnnnnnnnnnnnnnnnnnnnnnnnnnnnnnnnnnnnnnnnnnnnnnnnnnnnnnnnnnnnnnnnnnnnnnnnnnnnnnnnnnnnnnnnnnnnnnnnnnnnnnnnnnnnnnnnnnnnnnnnnnnnnnnnnnnnnnnnnnnnnnnnnnnnnnnnnnnnnnnnnnnnnnnnnnnnnnnnnnnnnnnnnnnnnnnnnnnnnnnnnnnnnnnnnnnnnnnnnnnnnnnnnnnnnnnnnnnnnnnnnnnnnnnnnnnnnnnnnnnnnnnnnnnnnnnnnnnnnnnnnnnnnnnnnnnnnnnnnnnnnnnnnnnnnnnnnnnnnnnnnnnnnnnnnnnnnnnnnnnnnnnnnnnnnnnnnnnnnnnnnnnnnnnnnnnnnnnnnnnnnnnnnnnnnnnnnnnnnnnnnnnnnnnnnnnnnnnnnnnnnnnnnnnnnnnnnnnnnnnnnnnnnnnnnnnnnnnnnnnnnnnnnnnnnnnnnnnnnnnnnnnnnnnnnnnnnnnnnnnnnnnnnnnnnnnnnnnnnnnnnnnnnnnnnnnnnnnnnnnnnnnnnnnnnnnnnnnnnnnnnnnnnnnnnnnnnnnnnnnnnnnnnnnnnnnnnnnnnnnnnnnnnnnnnnnnnnnnnnnnnnnnnnnnnnnnnnnnnnnnnnnnnnnnnnnnnnnnnnnnnnnnnnnnnnnnnnnnnnnnnnnnnnnnnnnnnnnnnnnnnnnnnnnnnnnnnnnnnnnnnnnnnnnnnnnnnnnnnnnnnnnnnnnnnnnnnnnnnnnnnnnnnnnnnnnnnnnnnnnnnnnnnnnnnnnnnnnnnnnnnnnnnnnnnnnnnnnnnnnnnnnnnnnnnnnnnnnnnnnnnnnnnnnnnnnnnnnnnnnnnnnnnnnnnnnnnnnnnnnnnnnnnnnnnnnnnnnnnnnnnnnnnnnnnnnnnnnnnnnnnnnnnnnnnnnnnnnnnnnnnnnnnnnnnnnnnnnnnnnnnnnnnnnnnnnnnnnnnnnnnnnnnnnnnnnnnnnnnnnnnnnnnnnnnnnnnnnnnnnnnnnnnnnnnnnnnnnnnnnnnnnnnnnnnnnnnnnnnnnnnnnnnnnnnnnnnnnnnnnnnnnnnnnnnnnnnnnnnnnnnnnnnnnnnnnnnnnnnnnnnnnnnnnnnnnnnnnnnnnnnnnnnnnnnnnnnnnnnnnnnnnnnnnnnnnnnnnnnnnnnnnnnnnnnnnnnnnnnnnnnnnnnnnnnnnnnnnnnnnnnnnnnnnnnnnnnnnnnnnnnnnnnnnnnnnnnnnnnnnnnnnnnnnnnnnnnnnnnnnnnnnnnnnnnnnnnnnnnnnnnnnnnnnnnnnnnnnnnnnnnnnnnnnnnnnnnnnnnnnnnnnnnnnnnnnnnnnnnnnnnnnnnnnnnnnnnnnnnnnnnnnnnnnnnnnnnnnnnnnnnnnnnnnnnnnnnnnnnnnnnnnnnnnnnnnnnnnnnnnnnnnnnnnnnnnnnnnnnnnnnnnnnnnnnnnnnnnnnnnnnnnnnnnnnnnnnnnnnnnnnnnnnnnnnnnnnnnnnnnnnnnnnnnnnnnnnnnnnnnnnnnnnnnnnnnnnnnnnnnnnnnnnnnnnnnnnnnnnnnnnnnnnnnnnnnnnnnnnnnnnnnnnnnnnnnnnnnnnnnnnnnnnnnnnnnnnnnnnnnnnnnnnnnnnnnnnnnnnnnnnnnnnnnnnnnnnnnnnnnnnnnnnnnnnnnnnnnnnnnnnnnnnnnnnnnnnnnnnnnnnnnnnnnnnnnnnnnnnnnnnnnnnnnnnnnnnnnnnnnnnnnnnnnnnnnnnnnnnnnnnnnnnnnnnnnnnnnnnnnnnnnnnnnnnnnnnnnnnnnnnnnnnnnnnnnnnnnnnnnnnnnnnnnnnnnnnnnnnnnnnnnnnnnnnnnnnnnnnnnnnnnnnnnnnnnnnnnnnnnnnnnnnnnnnnnnnnnnnnnnnnnnnnnnnnnnnnnnnnnnnnnnnnnnnnnnnnnnnnnnnnnnnnnnnnnnnnnnnnnnnnnnnnnnnnnnnnnnnnnnnnnnnnnnnnnnnnnnnnnnnnnnnnnnnnnnnnnnnnnnnnnnnnnnnnnnnnnnnnnnnnnnnnnnnnnnnnnnnnnnnnnnnnnnnnnnnnnnnnnnnnnnnnnnnnnnnnnnnnnnnnnnnnnnnnnnnnnnnnnnnnnnnnnnnnnnnnnnnnnnnnnnnnnnnnnnnnnnnnnnnnnnnnnnnnnnnnnnnnnnnnnnnnnnnnnnnnnnnnnnnnnnnnnnnnnnnnnnnnnnnnnnnnnnnnnnnnnnnnnnnnnnnnnnnnnnnnnnnnnnnnnnnnnnnnnnnnnnnnnnnnnnnnnnnnnnnnnnnnnnnnnnnnnnnnnnnnnnnnnnnnnnnnnnnnnnnnnnnnnnnnnnnnnnnnnnnnnnnnnnnnnnnnnnnnnnnnnnnnnnnnnnnnnnnnnnnnnnnnnnnnnnnnnnnnnnnnnnnnnnnnnnnnnnnnnnnnnnnnnnnnnnnnnnnnnnnnnnnnnnnnnnnnnnnnnnnnnnnnnnnnnnnnnnnnnnnnnnnnnnnnnnnnnnnnnnnnnnnnnnnnnnnnnnnnnnnnnnnnnnnnnnnnnnnnnnnnnnnnnnnnnnnnnnnnnnnnnnnnnnnnnnnnnnnnnnnnnnnnnnnnnnnnnnnnnnnnnnnnnnnnnnnnnnnnnnnnnnnnnnnnnnnnnnnnnnnnnnnnnnnnnnnnnnnnnnnnnnnnnnnnnnnnnnnnnnnnnnnnnnnnnnnnnnnnnnnnnnnnnnnnnnnnnnnnnnnnnnnnnnnnnnnnnnnnnnnnnnnnnnnnnnnnnnnnnnnnnnnnnnnnnnnnnnnnnnnnnnnnnnnnnnnnnnnnnnnnnnnnnnnnnnnnnnnnnnnnnnnnnnnnnnnnnnnnnnnnnnnnnnnnnnnnnnnnnnnnnnnnnnnnnnnnnnnnnnnnnnnnnnnnnnnnnnnnnnnnnnnnnnnnnnnnnnnnnnnnnnnnnnnnnnnnnnnnnnnnnnnnnnnnnnnnnnnnnnnnnnnnnnnnnnnnnnnnnnnnnnnnnnnnnnnnnnnnnnnnnnnnnnnnnnnnnnnnnnnnnnnnnnnnnnnnnnnnnnnnnnnnnnnnnnnnnnnnnnnnnnnnnnnnnnnnnnnnnnnnnnnnnnnnnnnnnnnnnnnnnnnnnnnnnnnnnnnnnnnnnnnnnnnnnnnnnnnnnnnnnnnnnnnnnnnnnnnnnnnnnnnnnnnnnnnnnnnnnnnnnnnnnnnnnnnnnnnnnnnnnnnnnnnnnnnnnnnnnnnnnnnnnnnnnnnnnnnnnnnnnnnnnnnnnnnnnnnnnnnnnnnnnnnnnnnnnnnnnnnnnnnnnnnnnnnnnnnnnnnnnnnnnnnnnnnnnnnnnnnnnnnnnnnnnnnnnnnnnnnnnnnnnnnnnnnnnnnnnnnnnnnnnnnnnnnnnnnnnnnnnnnnnnnnnnnnnnnnnnnnnnnnnnnnnnnnnnnnnnnnnnnnnnnnnnnnnnnnnnnnnnnnnnnnnnnnnnnnnnnnnnnnnnnnnnnnnnnnnnnnnnnnnnnnnnnnnnnnnnnnnnnnnnnnnnnnnnnnnnnnnnnnnnnnnnnnnnnnnnnnnnnnnnnnnnnnnnnnnnnnnnnnnnnnnnnnnnnnnnnnnnnnnnnnnnnnnnnnnnnnnnnnnnnnnnnnnnnnnnnnnnnnnnnnnnnnnnnnnnnnnnnnnnnnnnnnnnnnnnnnnnnnnnnnnnnnnnnnnnnnnnnnnnnnnnnnnnnnnnnnnnnnnnnnnnnnnnnnnnnnnnnnnnnnnnnnnnnnnnnnnnnnnnnnnnnnnnnnnnnnnnnnnnnnnnnnnnnnnnnnnnnnnnnnnnnnnnnnnnnnnnnnnnnnnnnnnnnnnnnnnnnnnnnnnnnnnnnnnnnnnnnnnnnnnnnnnnnnnnnnnnnnnnnnnnnnnnnnnnnnnnnnnnnnnnnnnnnnnnnnnnnnnnnnnnnnnnnnnnnnnnnnnnnnnnnnnnnnnnnnnnnnnnnnnnnnnnnnnnnnnnnnnnnnnnnnnnnnnnnnnnnnnnnnnnnnnnnnnnnnnnnnnnnnnnnnnnnnnnnnnnnnnnnnnnnnnnnnnnnnnnnnnnnnnnnnnnnnnnnnnnnnnnnnnnnnnnnnnnnnnnnnnnnnnnnnnnnnnnnnnnnnnnnnnnnnnnnnnnnnnnnnnnnnnnnnnnnnnnnnnnnnnnnnnnnnnnnnnnnnnnnnnnnnnnnnnnnnnnnnnnnnnnnnnnnnnnnnnnnnnnnnnnnnnnnnnnnnnnnnnnnnnnnnnnnnnnnnnnnnnnnnnnnnnnnnnnnnnnnnnnnnnnnnnnnnnnnnnnnnnnnnnnnnnnnnnnnnnnnnnnnnnnnnnnnnnnnnnnnnnnnnnnnnnnnnnnnnnnnnnnnnnnnnnnnnnnnnnnnnnnnnnnnnnnnnnnnnnnnnnnnnnnnnnnnnnnnnnnnnnnnnnnnnnnnnnnnnnnnnnnnnnnnnnnnnnnnnnnnnnnnnnnnnnnnnnnnnnnnnnnnnnnnnnnnnnnnnnnnnnnnnnnnnnnnnnnnnnnnnnnnnnnnnnnnnnnnnnnnnnnnnnnnnnnnnnnnnnnnnnnnnnnnnnnnnnnnnnnnnnnnnnnnnnnnnnnnnnnnnnnnnnnnnnnnnnnnnnnnnnnnnnnnnnnnnnnnnnnnnnnnnnnnnnnnnnnnnnnnnnnnnnnnnnnnnnnnnnnnnnnnnnnnnnnnnnnnnnnnnnnnnnnnnnnnnnnnnnnnnnnnnnnnnnnnnnnnnnnnnnnnnnnnnnnnnnnnnnnnnnnnnnnnnnnnnnnnnnnnnnnnnnnnnnnnnnnnnnnnnnnnnnnnnnnnnnnnnnnnnnnnnnnnnnnnnnnnnnnnnnnnnnnnnnnnnnnnnnnnnnnnnnnnnnnnnnnnnnnnnnnnnnnnnnnnnnnnnnnnnnnnnnnnnnnnnnnnnnnnnnnnnnnnnnnnnnnnnnnnnnnnnnnnnnnnnnnnnnnnnnnnnnnnnnnnnnnnnnnnnnnnnnnnnnnnnnnnnnnnnnnnnnnnnnnnnnnnnnnnnnnnnnnnnnnnnnnnnnnnnnnnnnnnnnnnnnnnnnnnnnnnnnnnnnnnnnnnnnnnnnnnnnnnnnnnnnnnnnnnnnnnnnnnnnnnnnnnnnnnnnnnnnnnnnnnnnnnnnnnnnnnnnnnnnnnnnnnnnnnnnnnnnnnnnnnnnnnnnnnnnnnnnnnnnnnnnnnnnnnnnnnnnnnnnnnnnnnnnnnnnnnnnnnnnnnnnnnnnnnnnnnnnnnnnnnnnnnnnnnnnnnnnnnnnnnnnnnnnnnnnnnnnnnnnnnnnnnnnnnnnnnnnnnnnnnnnnnnnnnnnnnnnnnnnnnnnnnnnnnnnnnnnnnnnnnnnnnnnnnnnnnnnnnnnnnnnnnnnnnnnnnnnnnnnnnnnnnnnnnnnnnnnnnnnnnnnnnnnnnnnnnnnnnnnnnnnnnnnnnnnnnnnnnnnnnnnnnnnnnnnnnnnnnnnnnnnnnnnnnnnnnnnnnnnnnnnnnnnnnnnnnnnnnnnnnnnnnnnnnnnnnnnnnnnnnnnnnnnnnnnnnnnnnnnnnnnnnnnnnnnnnnnnnnnnnnnnnnnnnnnnnnnnnnnnnnnnnnnnnnnnnnnnnnnnnnnnnnnnnnnnnnnnnnnnnnnnnnnnnnnnnnnnnnnnnnnnnnnnnnnnnnnnnnnnnnnnnnnnnnnnnnnnnnnnnnnnnnnnnnnnnnnnnnnnnnnnnnnnnnnnnnnnnnnnnnnnnnnnnnnnnnnnnnnnnnnnnnnnnnnnnnnnnnnnnnnnnnnnnnnnnnnnnnnnnnnnnnnnnnnnnnnnnnnnnnnnnnnnnnnnnnnnnnnnnnnnnnnnnnnnnnnnnnnnnnnnnnnnnnnnnnnnnnnnnnnnnnnnnnnnnnnnnnnnnnnnnnnnnnnnnnnnnnnnnnnnnnnnnnnnnnnnnnnnnnnnnnnnnnnnnnnnnnnnnnnnnnnnnnnnnnnnnnnnnnnnnnnnnnnnnnnnnnnnnnnnnnnnnnnnnnnnnnnnnnnnnnnnnnnnnnnnnnnnnnnnnnnnnnnnnnnnnnnnnnnnnnnnnnnnnnnnnnnnnnnnnnnnnnnnnnnnnnnnnnnnnnnnnnnnnnnnnnnnnnnnnnnnnnnnnnnnnnnnnnnnnnnnnnnnnnnnnnnnnnnnnnnnnnnnnnnnnnnnnnnnnnnnnnnnnnnnnnnnnnnnnnnnnnnnnnnnnnnnnnnnnnnnnnnnnnnnnnnnnnnnnnnnnnnnnnnnnnnnnnnnnnnnnnnnnnnnnnnnnnnnnnnnnnnnnnnnnnnnnnnnnnnnnnnnnnnnnnnnnnnnnnnnnnnnnnnnnnnnnnnnnnnnnnnnnnnnnnnnnnnnnnnnnnnnnnnnnnnnnnnnnnnnnnnnnnnnnnnnnnnnnnnnnnnnnnnnnnnnnnnnnnnnnnnnnnnnnnnnnnnnnnnnnnnnnnnnnnnnnnnnnnnnnnnnnnnnnnnnnnnnnnnnnnnnnnnnnnnnnnnnnnnnnnnnnnnnnnnnnnnnnnnnnnnnnnnnnnnnnnnnnnnnnnnnnnnnnnnnnnnnnnnnnnnnnnnnnnnnnnnnnnnnnnnnnnnnnnnnnnnnnnnnnnnnnnnnnnnnnnnnnnnnnnnnnnnnnnnnnnnnnnnnnnnnnnnnnnnnnnnnnnnnnnnnnnnnnnnnnnnnnnnnnnnnnnnnnnnnnnnnnnnnnnnnnnnnnnnnnnnnnnnnnnnnnnnnnnnnnnnnnnnnnnnnnnnnnnnnnnnnnnnnnnnnnnnnnnnnnnnnnnnnnnnnnnnnnnnnnnnnnnnnnnnnnnnnnnnnnnnnnnnnnnnnnnnnnnnnnnnnnnnnnnnnnnnnnnnnnnnnnnnnnnnnnnnnnnnnnnnnnnnnnnnnnnnnnnnnnnnnnnnnnnnnnnnnnnnnnnnnnnnnnnnnnnnnnnnnnnnnnnnnnnnnnnnnnnnnnnnnnnnnnnnnnnnnnnnnnnnnnnnnnnnnnnnnnnnnnnnnnnnnnnnnnnnnnnnnnnnnnnnnnnnnnnnnnnnnnnnnnnnnnnnnnnnnnnnnnnnnnnnnnnnnnnnnnnnnnnnnnnnnnnnnnnnnnnnnnnnnnnnnnnnnnnnnnnnnnnnnnnnnnnnnnnnnnnnnnnnnnnnnnnnnnnnnnnnnnnnnnnnnnnnnnnnnnnnnnnnnnnnnnnnnnnnnnnnnnnnnnnnnnnnnnnnnnnnnnnnnnnnnnnnnnnnnnnnnnnnnnnnnnnnnnnnnnnnnnnnnnnnnnnnnnnnnnnnnnnnnnnnnnnnnnnnnnnnnnnnnnnnnnnnnnnnnnnnnnnnnnnnnnnnnnnnnnnnnnnnnnnnnnnnnnnnnnnnnnnnnnnnnnnnnnnnnnnnnnnnnnnnnnnnnnnnnnnnnnnnnnnnnnnnnnnnnnnnnnnnnnnnnnnnnnnnnnnnnnnnnnnnnnnnnnnnnnnnnnnnnnnnnnnnnnnnnnnnnnnnnnnnnnnnnnnnnnnnnnnnnnnnnnnnnnnnnnnnnnnnnnnnnnnnnnnnnnnnnnnnnnnnnnnnnnnnnnnnnnnnnnnnnnnnnnnnnnnnnnnnnnnnnnnnnnnnnnnnnnnnnnnnnnnnnnnnnnnnnnnnnnnnnnnnnnnnnnnnnnnnnnnnnnnnnnnnnnnnnnnnnnnnnnnnnnnnnnnnnnnnnnnnnnnnnnnnnnnnnnnnnnnnnnnnnnnnnnnnnnnnnnnnnnnnnnnnnnnnnnnnnnnnnnnnnnnnnnnnnnnnnnnnnnnnnnnnnnnnnnnnnnnnnnnnnnnnnnnnnnnnnnnnnnnnnnnnnnnnnnnnnnnnnnnnnnnnnnnnnnnnnnnnnnnnnnnnnnnnnnnnnnnnnnnnnnnnnnnnnnnnnnnnnnnnnnnnnnnnnnnnnnnnnnnnnnnnnnnnnnnnnnnnnnnnnnnnnnnnnnnnnnnnnnnnnnnnnnnnnnnnnnnnnnnnnnnnnnnnnnnnnnnnnnnnnnnnnnnnnnnnnnnnnnnnnnnnnnnnnnnnnnnnnnnnnnnnnnnnnnnnnnnnnnnnnnnnnnnnnnnnnnnnnnnnnnnnnnnnnnnnnnnnnnnnnnnnnnnnnnnnnnnnnnnnnnnnnnnnnnnnnnnnnnnnnnnnnnnnnnnnnnnnnnnnnnnnnnnnnnnnnnnnnnnnnnnnnnnnnnnnnnnnnnnnnnnnnnnnnnnnnnnnnnnnnnnnnnnnnnnnnnnnnnnnnnnnnnnnnnnnnnnnnnnnnnnnnnnnnnnnnnnnnnnnnnnnnnnnnnnnnnnnnnnnnnnnnnnnnnnnnnnnnnnnnnnnnnnnnnnnnnnnnnnnnnnnnnnnnnnnnnnnnnnnnnnnnnnnnnnnnnnnnnnnnnnnnnnnnnnnnnnnnnnnnnnnnnnnnnnnnnnnnnnnnnnnnnnnnnnnnnnnnnnnnnnnnnnnnnnnnnnnnnnnnnnnnnnnnnnnnnnnnnnnnnnnnnnnnnnnnnnnnnnnnnnnnnnnnnnnnnnnnnnnnnnnnnnnnnnnnnnnnnnnnnnnnnnnnnnnnnnnnnnnnnnnnnnnnnnnnnnnnnnnnnnnnnnnnnnnnnnnnnnnnnnnnnnnnnnnnnnnnnnnnnnnnnnnnnnnnnnnnnnnnnnnnnnnnnnnnnnnnnnnnnnnnnnnnnnnnnnnnnnnnnnnnnnnnnnnnnnnnnnnnnnnnnnnnnnnnnnnnnnnnnnnnnnnnnnnnnnnnnnnnnnnnnnnnnnnnnnnnnnnnnnnnnnnnnnnnnnnnnnnnnnnnnnnnnnnnnnnnnnnnnnnnnnnnnnnnnnnnnnnnnnnnnnnnnnnnnnnnnnnnnnnnnnnnnnnnnnnnnnnnnnnnnnnnnnnnnnnnnnnnnnnnnnnnnnnnnnnnnnnnnnnnnnnnnnnnnnnnnnnnnnnnnnnnnnnnnnnnnnnnnnnnnnnnnnnnnnnnnnnnnnnnnnnnnnnnnnnnnnnnnnnnnnnnnnnnnnnnnnnnnnnnnnnnnnnnnnnnnnnnnnnnnnnnnnnnnnnnnnnnnnnnnnnnnnnnnnnnnnnnnnnnnnnnnnnnnnnnnnnnnnnnnnnnnnnnnnnnnnnnnnnnnnnnnnnnnnnnnnnnnnnnnnnnnnnnnnnnnnnnnnnnnnnnnnnnnnnnnnnnnnnnnnnnnnnnnnnnnnnnnnnnnnnnnnnnnnnnnnnnnnnnnnnnnnnnnnnnnnnnnnnnnnnnnnnnnnnnnnnnnnnnnnnnnnnnnnnnnnnnnnnnnnnnnnnnnnnnnnnnnnnnnnnnnnnnnnnnnnnnnnnnnnnnnnnnnnnnnnnnnnnnnnnnnnnnnnnnnnnnnnnnnnnnnnnnnnnnnnnnnnnnnnnnnnnnnnnnnnnnnnnnnnnnnnnnnnnnnnnnnnnnnnnnnnnnnnnnnnnnnnnnnnnnnnnnnnnnnnnnnnnnnnnnnnnnnnnnnnnnnnnnnnnnnnnnnnnnnnnnnnnnnnnnnnnnnnnnnnnnnnnnnnnnnnnnnnnnnnnnnnnnnnnnnnnnnnnnnnnnnnnnnnnnnnnnnnnnnnnnnnnnnnnnnnnnnnnnnnnnnnnnnnnnnnnnnnnnnnnnnnnnnnnnnnnnnnnnnnnnnnnnnnnnnnnnnnnnnnnnnnnnnnnnnnnnnnnnnnnnnnnnnnnnnnnnnnnnnnnnnnnnnnnnnnnnnnnnnnnnnnnnnnnnnnnnnnnnnnnnnnnnnnnnnnnnnnnnnnnnnnnnnnnnnnnnnnnnnnnnnnnnnnnnnnnnnnnnnnnnnnnnnnnnnnnnnnnnnnnnnnnnnnnnnnnnnnnnnnnnnnnnnnnnnnnnnnnnnnnnnnnnnnnnnnnnnnnnnnnnnnnnnnnnnnnnnnnnnnnnnnnnnnnnnnnnnnnnnnnnnnnnnnnnnnnnnnnnnnnnnnnnnnnnnnnnnnnnnnnnnnnnnnnnnnnnnnnnnnnnnnnnnnnnnnnnnnnnnnnnnnnnnnnnnnnnnnnnnnnnnnnnnnnnnnnnnnnnnnnnnnnnnnnnnnnnnnnnnnnnnnnnnnnnnnnnnnnnnnnnnnnnnnnnnnnnnnnnnnnnnnnnnnnnnnnnnnnnnnnnnnnnnnnnnnnnnnnnnnnnnnnnnnnnnnnnnnnnnnnnnnnnnnnnnnnnnnnnnnnnnnnnnnnnnnnnnnnnnnnnnnnnnnnnnnnnnnnnnnnnnnnnnnnnnnnnnnnnnnnnnnnnnnnnnnnnnnnnnnnnnnnnnnnnnnnnnnnnnnnnnnnnnnnnnnnnnnnnnnnnnnnnnnnnnnnnnnnnnnnnnnnnnnnnnnnnnnnnnnnnnnnnnnnnnnnnnnnnnnnnnnnnnnnnnnnnnnnnnnnnnnnnnnnnnnnnnnnnnnnnnnnnnnnnnnnnnnnnnnnnnnnnnnnnnnnnnnnnnnnnnnnnnnnnnnnnnnnnnnnnnnnnnnnnnnnnnnnnnnnnnnnnnnnnnnnnnnnnnnnnnnnnnnnnnnnnnnnnnnnnnnnnnnnnnnnnnnnnnnnnnnnnnnnnnnnnnnnnnnnnnnnnnnnnnnnnnnnnnnnnnnnnnnnnnnnnnnnnnnnnnnnnnnnnnnnnnnnnnnnnnnnnnnnnnnnnnnnnnnnnnnnnnnnnnnnnnnnnnnnnnnnnnnnnnnnnnnnnnnnnnnnnnnnnnnnnnnnnnnnnnnnnnnnnnnnnnnnnnnnnnnnnnnnnnnnnnnnnnnnnnnnnnnnnnnnnnnnnnnnnnnnnnnnnnnnnnnnnnnnnnnnnnnnnnnnnnnnnnnnnnnnnnnnnnnnnnnnnnnnnnnnnnnnnnnnnnnnnnnnnnnnnnnnnnnnnnnnnnnnnnnnnnnnnnnnnnnnnnnnnnnnnnnnnnnnnnnnnnnnnnnnnnnnnnnnnnnnnnnnnnnnnnnnnnnnnnnnnnnnnnnnnnnnnnnnnnnnnnnnnnnnnnnnnnnnnnnnnnnnnnnnnnnnnnnnnnnnnnnnnnnnnnnnnnnnnnnnnnnnnnnnnnnnnnnnnnnnnnnnnnnnnnnnnnnnnnnnnnnnnnnnnnnnnnnnnnnnnnnnnnnnnnnnnnnnnnnnnnnnnnnnnnnnnnnnnnnnnnnnnnnnnnnnnnnnnnnnnnnnnnnnnnnnnnnnnnnnnnnnnnnnnnnnnnnnnnnnnnnnnnnnnnnnnnnnnnnnnnnnnnnnnnnnnnnnnnnnnnnnnnnnnnnnnnnnnnnnnnnnnnnnnnnnnnnnnnnnnnnnnnnnnnnnnnnnnnnnnnnnnnnnnnnnnnnnnnnnnnnnnnnnnnnnnnnnnnnnnnnnnnnnnnnnnnnnnnnnnnnnnnnnnnnnnnnnnnnnnnnnnnnnnnnnnnnnnnnnnnnnnnnnnnnnnnnnnnnnnnnnnnnnnnnnnnnnnnnnnnnnnnnnnnnnnnnnnnnnnnnnnnnnnnnnnnnnnnnnnnnnnnnnnnnnnnnnnnnnnnnnnnnnnnnnnnnnnnnnnnnnnnnnnnnnnnnnnnnnnnnnnnnnnnnnnnnnnnnnnnnnnnnnnnnnnnnnnnnnnnnnnnnnnnnnnnnnnnnnnnnnnnnnnnnnnnnnnnnnnnnnnnnnnnnnnnnnnnnnnnnnnnnnnnnnnnnnnnnnnnnnnnnnnnnnnnnnnnnnnnnnnnnnnnnnnnnnnnnnnnnnnnnnnnnnnnnnnnnnnnnnnnnnnnnnnnnnnnnnnnnnnnnnnnnnnnnnnnnnnnnnnnnnnnnnnnnnnnnnnnnnnnnnnnnnnnnnnnnnnnnnnnnnnnnnnnnnnnnnnnnnnnnnnnnnnnnnnnnnnnnnnnnnnnnnnnnnnnnnnnnnnnnnnnnnnnnnnnnnnnnnnnnnnnnnnnnnnnnnnnnnnnnnnnnnnnnnnnnnnnnnnnnnnnnnnnnnnnnnnnnnnnnnnnnnnnnnnnnnnnnnnnnnnnnnnnnnnnnnnnnnnnnnnnnnnnnnnnnnnnnnnnnnnnnnnnnnnnnnnnnnnnnnnnnnnnnnnnnnnnnnnnnnnnnnnnnnnnnnnnnnnnnnnnnnnnnnnnnnnnnnnnnnnnnnnnnnnnnnnnnnnnnnnnnnnnnnnnnnnnnnnnnnnnnnnnnnnnnnnnnnnnnnnnnnnnnnnnnnnnnnnnnnnnnnnnnnnnnnnnnnnnnnnnnnnnnnnnnnnnnnnnnnnnnnnnnnnnnnnnnnnnnnnnnnnnnnnnnnnnnnnnnnnnnnnnnnnnnnnnnnnnnnnnnnnnnnnnnnnnnnnnnnnnnnnnnnnnnnnnnnnnnnnnnnnnnnnnnnnnnnnnnnnnnnnnnnnnnnnnnnnnnnnnnnnnnnnnnnnnnnnnnnnnnnnnnnnnnnnnnnnnnnnnnnnnnnnnnnnnnnnnnnnnnnnnnnnnnnnnnnnnnnnnnnnnnnnnnnnnnnnnnnnnnnnnnnnnnnnnnnnnnnnnnnnnnnnnnnnnnnnnnnnnnnnnnnnnnnnnnnnnnnnnnnnnnnnnnnnnnnnnnnnnnnnnnnnnnnnnnnnnnnnnnnnnnnnnnnnnnnnnnnnnnnnnnnnnnnnnnnnnnnnnnnnnnnnnnnnnnnnnnnnnnnnnnnnnnnnnnnnnnnnnnnnnnnnnnnnnnnnnnnnnnnnnnnnnnnnnnnnnnnnnnnnnnnnnnnnnnnnnnnnnnnnnnnnnnnnnnnnnnnnnnnnnnnnnnnnnnnnnnnnnnnnnnnnnnnnnnnnnnnnnnnnnnnnnnnnnnnnnnnnnnnnnnnnnnnnnnnnnnnnnnnnnnnnnnnnnnnnnnnnnnnnnnnnnnnnnnnnnnnnnnnnnnnnnnnnnnnnnnnnnnnnnnnnnnnnnnnnnnnnnnnnnnnnnnnnnnnnnnnnnnnnnnnnnnnnnnnnnnnnnnnnnnnnnnnnnnnnnnnnnnnnnnnnnnnnnnnnnnnnnnnnnnnnnnnnnnnnnnnnnnnnnnnnnnnnnnnnnnnnnnnnnnnnnnnnnnnnnnnnnnnnnnnnnnnnnnnnnnnnnnnnnnnnnnnnnnnnnnnnnnnnnnnnnnnnnnnnnnnnnnnnnnnnnnnnnnnnnnnnnnnnnnnnnnnnnnnnnnnnnnnnnnnnnnnnnnnnnnnnnnnnnnnnnnnnnnnnnnnnnnnnnnnnnnnnnnnnnnnnnnnnnnnnnnnnnnnnnnnnnnnnnnnnnnnnnnnnnnnnnnnnnnnnnnnnnnnnnnnnnnnnnnnnnnnnnnnnnnnnnnnnnnnnnnnnnnnnnnnnnnnnnnnnnnnnnnnnnnnnnnnnnnnnnnnnnnnnnnnnnnnnnnnnnnnnnnnnnnnnnnnnnnnnnnnnnnnnnnnnnnnnnnnnnnnnnnnnnnnnnnnnnnnnnnnnnnnnnnnnnnnnnnnnnnnnnnnnnnnnnnnnnnnnnnnnnnnnnnnnnnnnnnnnnnnnnnnnnnnnnnnnnnnnnnnnnnnnnnnnnnnnnnnnnnnnnnnnnnnnnnnnnnnnnnnnnnnnnnnnnnnnnnnnnnnnnnnnnnnnnnnnnnnnnnnnnnnnnnnnnnnnnnnnnnnnnnnnnnnnnnnnnnnnnnnnnnnnnnnnnnnnnnnnnnnnnnnnnnnnnnnnnnnnnnnnnnnnnnnnnnnnnnnnnnnnnnnnnnnnnnnnnnnnnnnnnnnnnnnnnnnnnnnnnnnnnnnnnnnnnnnnnnnnnnnnnnnnnnnnnnnnnnnnnnnnnnnnnnnnnnnnnnnnnnnnnnnnnnnnnnnnnnnnnnnnnnnnnnnnnnnnnnnnnnnnnnnnnnnnnnnnnnnnnnnnnnnnnnnnnnnnnnnnnnnnnnnnnnnnnnnnnnnnnnnnnnnnnnnnnnnnnnnnnnnnnnnnnnnnnnnnnnnnnnnnnnnnnnnnnnnnnnnnnnnnnnnnnnnnnnnnnnnnnnnnnnnnnnnnnnnnnnnnnnnnnnnnnnnnnnnnnnnnnnnnnnnnnnnnnnnnnnnnnnnnnnnnnnnnnnnnnnnnnnnnnnnnnnnnnnnnnnnnnnnnnnnnnnnnnnnnnnnnnnnnnnnnnnnnnnnnnnnnnnnnnnnnnnnnnnnnnnnnnnnnnnnnnnnnnnnnnnnnnnnnnnnnnnnnnnnnnnnnnnnnnnnnnnnnnnnnnnnnnnnnnnnnnnnnnnnnnnnnnnnnnnnnnnnnnnnnnnnnnnnnnnnnnnnnnnnnnnnnnnnnnnnnnnnnnnnnnnnnnnnnnnnnnnnnnnnnnnnnnnnnnnnnnnnnnnnnnnnnnnnnnnnnnnnnnnnnnnnnnnnnnnnnnnnnnnnnnnnnnnnnnnnnnnnnnnnnnnnnnnnnnnnnnnnnnnnnnnnnnnnnnnnnnnnnnnnnnnnnnnnnnnnnnnnnnnnnnnnnnnnnnnnnnnnnnnnnnnnnnnnnnnnnnnnnnnnnnnnnnnnnnnnnnnnnnnnnnnnnnnnnnnnnnnnnnnnnnnnnnnnnnnnnnnnnnnnnnnnnnnnnnnnnnnnnnnnnnnnnnnnnnnnnnnnnnnnnnnnnnnnnnnnnnnnnnnnnnnnnnnnnnnnnnnnnnnnnnnnnnnnnnnnnnnnnnnnnnnnnnnnnnnnnnnnnnnnnnnnnnnnnnnnnnnnnnnnnnnnnnnnnnnnnnnnnnnnnnnnnnnnnnnnnnnnnnnnnnnnnnnnnnnnnnnnnnnnnnnnnnnnnnnnnnnnnnnnnnnnnnnnnnnnnnnnnnnnnnnnnnnnnnnnnnnnnnnnnnnnnnnnnnnnnnnnnnnnnnnnnnnnnnnnnnnnnnnnnnnnnnnnnnnnnnnnnnnnnnnnnnnnnnnnnnnnnnnnnnnnnnnnnnnnnnnnnnnnnnnnnnnnnnnnnnnnnnnnnnnnnnnnnnnnnnnnnnnnnnnnnnnnnnnnnnnnnnnnnnnnnnnnnnnnnnnnnnnnnnnnnnnnnnnnnnnnnnnnnnnnnnnnnnnnnnnnnnnnnnnnnnnnnnnnnnnnnnnnnnnnnnnnnnnnnnnnnnnnnnnnnnnnnnnnnnnnnnnnnnnnnnnnnnnnnnnnnnnnnnnnnnnnnnnnnnnnnnnnnnnnnnnnnnnnnnnnnnnnnnnnnnnnnnnnnnnnnnnnnnnnnnnnnnnnnnnnnnnnnnnnnnnnnnnnnnnnnnnnnnnnnnnnnnnnnnnnnnnnnnnnnnnnnnnnnnnnnnnnnnnnnnnnnnnnnnnnnnnnnnnnnnnnnnnnnnnnnnnnnnnnnnnnnnnnnnnnnnnnnnnnnnnnnnnnnnnnnnnnnnnnnnnnnnnnnnnnnnnnnnnnnnnnnnnnnnnnnnnnnnnnnnnnnnnnnnnnnnnnnnnnnnnnnnnnnnnnnnnnnnnnnnnnnnnnnnnnnnnnnnnnnnnnnnnnnnnnnnnnnnnnnnnnnnnnnnnnnnnnnnnnnnnnnnnnnnnnnnnnnnnnnnnnnnnnnnnnnnnnnnnnnnnnnnnnnnnnnnnnnnnnnnnnnnnnnnnnnnnnnnnnnnnnnnnnnnnnnnnnnnnnnnnnnnnnnnnnnnnnnnnnnnnnnnnnnnnnnnnnnnnnnnnnnnnnnnnnnnnnnnnnnnnnnnnnnnnnnnnnnnnnnnnnnnnnnnnnnnnnnnnnnnnnnnnnnnnnnnnnnnnnnnnnnnnnnnnnnnnnnnnnnnnnnnnnnnnnnnnnnnnnnnnnnnnnnnnnnnnnnnnnnnnnnnnnnnnnnnnnnnnnnnnnnnnnnnnnnnnnnnnnnnnnnnnnnnnnnnnnnnnnnnnnnnnnnnnnnnnnnnnnnnnnnnnnnnnnnnnnnnnnnnnnnnnnnnnnnnnnnnnnnnnnnnnnnnnnnnnnnnnnnnnnnnnnnnnnnnnnnnnnnnnnnnnnnnnnnnnnnnnnnnnnnnnnnnnnnnnnnnnnnnnnnnnnnnnnnnnnnnnnnnnnnnnnnnnnnnnnnnnnnnnnnnnnnnnnnnnnnnnnnnnnnnnnnnnnnnnnnnnnnnnnnnnnnnnnnnnnnnnnnnnnnnnnnnnnnnnnnnnnnnnnnnnnnnnnnnnnnnnnnnnnnnnnnnnnnnnnnnnnnnnnnnnnnnnnnnnnnnnnnnnnnnnnnnnnnnnnnnnnnnnnnnnnnnnnnnnnnnnnnnnnnnnnnnnnnnnnnnnnnnnnnnnnnnnnnnnnnnnnnnnnnnnnnnnnnnnnnnnnnnnnnnnnnnnnnnnnnnnnnnnnnnnnnnnnnnnnnnnnnnnnnnnnnnnnnnnnnnnnnnnnnnnnnnnnnnnnnnnnnnnnnnnnnnnnnnnnnnnnnnnnnnnnnnnnnnnnnnnnnnnnnnnnnnnnnnnnnnnnnnnnnnnnnnnnnnnnnnnnnnnnnnnnnnnnnnnnnnnnnnnnnnnnnnnnnnnnnnnnnnnnnnnnnnnnnnnnnnnnnnnnnnnnnnnnnnnnnnnnnnnnnnnnnnnnnnnnnnnnnnnnnnnnnnnnnnnnnnnnnnnnnnnnnnnnnnnnnnnnnnnnnnnnnnnnnnnnnnnnnnnnnnnnnnnnnnnnnnnnnnnnnnnnnnnnnnnnnnnnnnnnnnnnnnnnnnnnnnnnnnnnnnnnnnnnnnnnnnnnnnnnnnnnnnnnnnnnnnnnnnnnnnnnnnnnnnnnnnnnnnnnnnnnnnnnnnnnnnnnnnnnnnnnnnnnnnnnnnnnnnnnnnnnnnnnnnnnnnnnnnnnnnnnnnnnnnnnnnnnnnnnnnnnnnnnnnnnnnnnnnnnnnnnnnnnnnnnnnnnnnnnnnnnnnnnnnnnnnnnnnnnnnnnnnnnnnnnnnnnnnnnnnnnnnnnnnnnnnnnnnnnnnnnnnnnnnnnnnnnnnnnnnnnnnnnnnnnnnnnnnnnnnnnnnnnnnnnnnnnnnnnnnnnnnnnnnnnnnnnnnnnnnnnnnnnnnnnnnnnnnnnnnnnnnnnnnnnnnnnnnnnnnnnnnnnnnnnnnnnnnnnnnnnnnnnnnnnnnnnnnnnnnnnnnnnnnnnnnnnnnnnnnnnnnnnnnnnnnnnnnnnnnnnnnnnnnnnnnnnnnnnnnnnnnnnnnnnnnnnnnnnnnnnnnnnnnnnnnnnnnnnnnnnnnnnnnnnnnnnnnnnnnnnnnnnnnnnnnnnnnnnnnnnnnnnnnnnnnnnnnnnnnnnnnnnnnnnnnnnnnnnnnnnnnnnnnnnnnnnnnnnnnnnnnnnnnnnnnnnnnnnnnnnnnnnnnnnnnnnnnnnnnnnnnnnnnnnnnnnnnnnnnnnnnnnnnnnnnnnnnnnnnnnnnnnnnnnnnnnnnnnnnnnnnnnnnnnnnnnnnnnnnnnnnnnnnnnnnnnnnnnnnnnnnnnnnnnnnnnnnnnnnnnnnnnnnnnnnnnnnnnnnnnnnnnnnnnnnnnnnnnnnnnnnnnnnnnnnnnnnnnnnnnnnnnnnnnnnnnnnnnnnnnnnnnnnnnnnnnnnnnnnnnnnnnnnnnnnnnnnnnnnnnnnnnnnnnnnnnnnnnnnnnnnnnnnnnnnnnnnnnnnnnnnnnnnnnnnnnnnnnnnnnnnnnnnnnnnnnnnnnnnnnnnnnnnnnnnnnnnnnnnnnnnnnnnnnnnnnnnnnnnnnnnnnnnnnnnnnnnnnnnnnnnnnnnnnnnnnnnnnnnnnnnnnnnnnnnnnnnnnnnnnnnnnnnnnnnnnnnnnnnnnnnnnnnnnnnnnnnnnnnnnnnnnnnnnnnnnnnnnnnnnnnnnnnnnnnnnnnnnnnnnnnnnnnnnnnnnnnnnnnnnnnnnnnnnnnnnnnnnnnnnnnnnnnnnnnnnnnnnnnnnnnnnnnnnnnnnnnnnnnnnnnnnnnnnnnnnnnnnnnnnnnnnnnnnnnnnnnnnnnnnnnnnnnnnnnnnnnnnnnnnnnnnnnnnnnnnnnnnnnnnnnnnnnnnnnnnnnnnnnnnnnnnnnnnnnnnnnnnnnnnnnnnnnnnnnnnnnnnnnnnnnnnnnnnnnnnnnnnnnnnnnnnnnnnnnnnnnnnnnnnnnnnnnnnnnnnnnnnnnnnnnnnnnnnnnnnnnnnnnnnnnnnnnnnnnnnnnnnnnnnnnnnnnnnnnnnnnnnnnnnnnnnnnnnnnnnnnnnnnnnnnnnnnnnnnnnnnnnnnnnnnnnnnnnnnnnnnnnnnnnnnnnnnnnnnnnnnnnnnnnnnnnnnnnnnnnnnnnnnnnnnnnnnnnnnnnnnnnnnnnnnnnnnnnnnnnnnnnnnnnnnnnnnnnnnnnnnnnnnnnnnnnnnnnnnnnnnnnnnnnnnnnnnnnnnnnnnnnnnnnnnnnnnnnnnnnnnnnnnnnnnnnnnnnnnnnnnnnnnnnnnnnnnnnnnnnnnnnnnnnnnnnnnnnnnnnnnnnnnnnnnnnnnnnnnnnnnnnnnnnnnnnnnnnnnnnnnnnnnnnnnnnnnnnnnnnnnnnnnnnnnnnnnnnnnnnnnnnnnnnnnnnnnnnnnnnnnnnnnnnnnnnnnnnnnnnnnnnnnnnnnnnnnnnnnnnnnnnnnnnnnnnnnnnnnnnnnnnnnnnnnnnnnnnnnnnnnnnnnnnnnnnnnnnnnnnnnnnnnnnnnnnnnnnnnnnnnnnnnnnnnnnnnnnnnnnnnnnnnnnnnnnnnnnnnnnnnnnnnnnnnnnnnnnnnnnnnnnnnnnnnnnnnnnnnnnnnnnnnnnnnnnnnnnnnnnnnnnnnnnnnnnnnnnnnnnnnnnnnnnnnnnnnnnnnnnnnnnnnnnnnnnnnnnnnnnnnnnnnnnnnnnnnnnnnnnnnnnnnnnnnnnnnnnnnnnnnnnnnnnnnnnnnnnnnnnnnnnnnnnnnnnnnnnnnnnnnnnnnnnnnnnnnnnnnnnnnnnnnnnnnnnnnnnnnnnnnnnnnnnnnnnnnnnnnnnnnnnnnnnnnnnnnnnnnnnnnnnnnnnnnnnnnnnnnnnnnnnnnnnnnnnnnnnnnnnnnnnnnnnnnnnnnnnnnnnnnnnnnnnnnnnnnnnnnnnnnnnnnnnnnnnnnnnnnnnnnnnnnnnnnnnnnnnnnnnnnnnnnnnnnnnnnnnnnnnnnnnnnnnnnnnnnnnnnnnnnnnnnnnnnnnnnnnnnnnnnnnnnnnnnnnnnnnnnnnnnnnnnnnnnnnnnnnnnnnnnnnnnnnnnnnnnnnnnnnnnnnnnnnnnnnnnnnnnnnnnnnnnnnnnnnnnnnnnnnnnnnnnnnnnnnnnnnnnnnnnnnnnnnnnnnnnnnnnnnnnnnnnnnnnnnnnnnnnnnnnnnnnnnnnnnnnnnnnnnnnnnnnnnnnnnnnnnnnnnnnnnnnnnnnnnnnnnnnnnnnnnnnnnnnnnnnnnnnnnnnnnnnnnnnnnnnnnnnnnnnnnnnnnnnnnnnnnnnnnnnnnnnnnnnnnnnnnnnnnnnnnnnnnnnnnnnnnnnnnnnnnnnnnnnnnnnnnnnnnnnnnnnnnnnnnnnnnnnnnnnnnnnnnnnnnnnnnnnnnnnnnnnnnnnnnnnnnnnnnnnnnnnnnnnnnnnnnnnnnnnnnnnnnnnnnnnnnnnnnnnnnnnnnnnnnnnnnnnnnnnnnnnnnnnnnnnnnnnnnnnnnnnnnnnnnnnnnnnnnnnnnnnnnnnnnnnnnnnnnnnnnnnnnnnnnnnnnnnnnnnnnnnnnnnnnnnnnnnnnnnnnnnnnnnnnnnnnnnnnnnnnnnnnnnnnnnnnnnnnnnnnnnnnnnnnnnnnnnnnnnnnnnnnnnnnnnnnnnnnnnnnnnnnnnnnnnnnnnnnnnnnnnnnnnnnnnnnnnnnnnnnnnnnnnnnnnnnnnnnnnnnnnnnnnnnnnnnnnnnnnnnnnnnnnnnnnnnnnnnnnnnnnnnnnnnnnnnnnnnnnnnnnnnnnnnnnnnnnnnnnnnnnnnnnnnnnnnnnnnnnnnnnnnnnnnnnnnnnnnnnnnnnnnnnnnnnnnnnnnnnnnnnnnnnnnnnnnnnnnnnnnnnnnnnnnnnnnnnnnnnnnnnnnnnnnnnnnnnnnnnnnnnnnnnnnnnnnnnnnnnnnnnnnnnnnnnnnnnnnnnnnnnnnnnnnnnnnnnnnnnnnnnnnnnnnnnnnnnnnnnnnnnnnnnnnnnnnnnnnnnnnnnnnnnnnnnnnnnnnnnnnnnnnnnnnnnnnnnnnnnnnnnnnnnnnnnnnnnnnnnnnnnnnnnnnnnnnnnnnnnnnnnnnnnnnnnnnnnnnnnnnnnnnnnnnnnnnnnnnnnnnnnnnnnnnnnnnnnnnnnnnnnnnnnnnnnnnnnnnnnnnnnnnnnnnnnnnnnnnnnnnnnnnnnnnnnnnnnnnnnnnnnnnnnnnnnnnnnnnnnnnnnnnnnnnnnnnnnnnnnnnnnnnnnnnnnnnnnnnnnnnnnnnnnnnnnnnnnnnnnnnnnnnnnnnnnnnnnnnnnnnnnnnnnnnnnnnnnnnnnnnnnnnnnnnnnnnnnnnnnnnnnnnnnnnnnnnnnnnnnnnnnnnnnnnnnnnnnnnnnnnnnnnnnnnnnnnnnnnnnnnnnnnnnnnnnnnnnnnnnnnnnnnnnnnnnnnnnnnnnnnnnnnnnnnnnnnnnnnnnnnnnnnnnnnnnnnnnnnnnnnnnnnnnnnnnnnnnnnnnnnnnnnnnnnnnnnnnnnnnnnnnnnnnnnnnnnnnnnnnnnnnnnnnnnnnnnnnnnnnnnnnnnnnnnnnnnnnnnnnnnnnnnnnnnnnnnnnnnnnnnnnnnnnnnnnnnnnnnnnnnnnnnnnnnnnnnnnnnnnnnnnnnnnnnnnnnnnnnnnnnnnnnnnnnnnnnnnnnnnnnnnnnnnnnnnnnnnnnnnnnnnnnnnnnnnnnnnnnnnnnnnnnnnnnnnnnnnnnnnnnnnnnnnnnnnnnnnnnnnnnnnnnnnnnnnnnnnnnnnnnnnnnnnnnnnnnnnnnnnnnnnnnnnnnnnnnnnnnnnnnnnnnnnnnnnnnnnnnnnnnnnnnnnnnnnnnnnnnnnnnnnnnnnnnnnnnnnnnnnnnnnnnnnnnnnnnnnnnnnnnnnnnnnnnnnnnnnnnnnnnnnnnnnnnnnnnnnnnnnnnnnnnnnnnnnnnnnnnnnnnnnnnnnnnnnnnnnnnnnnnnnnnnnnnnnnnnnnnnnnnnnnnnnnnnnnnnnnnnnnnnnnnnnnnnnnnnnnnnnnnnnnnnnnnnnnnnnnnnnnnnnnnnnnnnnnnnnnnnnnnnnnnnnnnnnnnnnnnnnnnnnnnnnnnnnnnnnnnnnnnnnnnnnnnnnnnnnnnnnnnnnnnnnnnnnnnnnnnnnnnnnnnnnnnnnnnnnnnnnnnnnnnnnnnnnnnnnnnnnnnnnnnnnnnnnnnnnnnnnnnnnnnnnnnnnnnnnnnnnnnnnnnnnnnnnnnnnnnnnnnnnnnnnnnnnnnnnnnnnnnnnnnnnnnnnnnnnnnnnnnnnnnnnnnnnnnnnnnnnnnnnnnnnnnnnnnnnnnnnnnnnnnnnnnnnnnnnnnnnnnnnnnnnnnnnnnnnnnnnnnnnnnnnnnnnnnnnnnnnnnnnnnnnnnnnnnnnnnnnnnnnnnnnnnnnnnnnnnnnnnnnnnnnnnnnnnnnnnnnnnnnnnnnnnnnnnnnnnnnnnnnnnnnnnnnnnnnnnnnnnnnnnnnnnnnnnnnnnnnnnnnnnnnnnnnnnnnnnnnnnnnnnnnnnnnnnnnnnnnnnnnnnnnnnnnnnnnnnnnnnnnnnnnnnnnnnnnnnnnnnnnnnnnnnnnnnnnnnnnnnnnnnnnnnnnnnnnnnnnnnnnnnnnnnnnnnnnnnnnnnnnnnnnnnnnnnnnnnnnnnnnnnnnnnnnnnnnnnnnnnnnnnnnnnnnnnnnnnnnnnnnnnnnnnnnnnnnnnnnnnnnnnnnnnnnnnnnnnnnnnnnnnnnnnnnnnnnnnnnnnnnnnnnnnnnnnnnnnnnnnnnnnnnnnnnnnnnnnnnnnnnnnnnnnnnnnnnnnnnnnnnnnnnnnnnnnnnnnnnnnnnnnnnnnnnnnnnnnnnnnnnnnnnnnnnnnnnnnnnnnnnnnnnnnnnnnnnnnnnnnnnnnnnnnnnnnnnnnnnnnnnnnnnnnnnnnnnnnnnnnnnnnnnnnnnnnnnnnnnnnnnnnnnnnnnnnnnnnnnnnnnnnnnnnnnnnnnnnnnnnnnnnnnnnnnnnnnnnnnnnnnnnnnnnnnnnnnnnnnnnnnnnnnnnnnnnnnnnnnnnnnnnnnnnnnnnnnnnnnnnnnnnnnnnnnnnnnnnnnnnnnnnnnnnnnnnnnnnnnnnnnnnnnnnnnnnnnnnnnnnnnnnnnnnnnnnnnnnnnnnnnnnnnnnnnnnnnnnnnnnnnnnnnnnnnnnnnnnnnnnnnnnnnnnnnnnnnnnnnnnnnnnnnnnnnnnnnnnnnnnnnnnnnnnnnnnnnnnnnnnnnnnnnnnnnnnnnnnnnnnnnnnnnnnnnnnnnnnnnnnnnnnnnnnnnnnnnnnnnnnnnnnnnnnnnnnnnnnnnnnnnnnnnnnnnnnnnnnnnnnnnnnnnnnnnnnnnnnnnnnnnnnnnnnnnnnnnnnnnnnnnnnnnnnnnnnnnnnnnnnnnnnnnnnnnnnnnnnnnnnnnnnnnnnnnnnnnnnnnnnnnnnnnnnnnnnnnnnnnnnnnnnnnnnnnnnnnnnnnnnnnnnnnnnnnnnnnnnnnnnnnnnnnnnnnnnnnnnnnnnnnnnnnnnnnnnnnnnnnnnnnnnnnnnnnnnnnnnnnnnnnnnnnnnnnnnnnnnnnnnnnnnnnnnnnnnnnnnnnnnnnnnnnnnnnnnnnnnnnnnnnnnnnnnnnnnnnnnnnnnnnnnnnnnnnnnnnnnnnnnnnnnnnnnnnnnnnnnnnnnnnnnnnnnnnnnnnnnnnnnnnnnnnnnnnnnnnnnnnnnnnnnnnnnnnnnnnnnnnnnnnnnnnnnnnnnnnnnnnnnnnnnnnnnnnnnnnnnnnnnnnnnnnnnnnnnnnnnnnnnnnnnnnnnnnnnnnnnnnnnnnnnnnnnnnnnnnnnnnnnnnnnnnnnnnnnnnnnnnnnnnnnnnnnnnnnnnnnnnnnnnnnnnnnnnnnnnnnnnnnnnnnnnnnnnnnnnnnnnnnnnnnnnnnnnnnnnnnnnnnnnnnnnnnnnnnnnnnnnnnnnnnnnnnnnnnnnnnnnnnnnnnnnnnnnnnnnnnnnnnnnnnnnnnnnnnnnnnnnnnnnnnnnnnnnnnnnnnnnnnnnnnnnnnnnnnnnnnnnnnnnnnnnnnnnnnnnnnnnnnnnnnnnnnnnnnnnnnnnnnnnnnnnnnnnnnnnnnnnnnnnnnnnnnnnnnnnnnnnnnnnnnnnnnnnnnnnnnnnnnnnnnnnnnnnnnnnnnnnnnnnnnnnnnnnnnnnnnnnnnnnnnnnnnnnnnnnnnnnnnnnnnnnnnnnnnnnnnnnnnnnnnnnnnnnnnnnnnnnnnnnnnnnnnnnnnnnnnnnnnnnnnnnnnnnnnnnnnnnnnnnnnnnnnnnnnnnnnnnnnnnnnnnnnnnnnnnnnnnnnnnnnnnnnnnnnnnnnnnnnnnnnnnnnnnnnnnnnnnnnnnnnnnnnnnnnnnnnnnnnnnnnnnnnnnnnnnnnnnnnnnnnnnnnnnnnnnnnnnnnnnnnnnnnnnnnnnnnnnnnnnnnnnnnnnnnnnnnnnnnnnnnnnnnnnnnnnnnnnnnnnnnnnnnnnnnnnnnnnnnnnnnnnnnnnnnnnnnnnnnnnnnnnnnnnnnnnnnnnnnnnnnnnnnnnnnnnnnnnnnnnnnnnnnnnnnnnnnnnnnnnnnnnnnnnnnnnnnnnnnnnnnnnnnnnnnnnnnnnnnnnnnnnnnnnnnnnnnnnnnnnnnnnnnnnnnnnnnnnnnnnnnnnnnnnnnnnnnnnnnnnnnnnnnnnnnnnnnnnnnnnnnnnnnnnnnnnnnnnnnnnnnnnnnnnnnnnnnnnnnnnnnnnnnnnnnnnnnnnnnnnnnnnnnnnnnnnnnnnnnnnnnnnnnnnnnnnnnnnnnnnnnnnnnnnnnnnnnnnnnnnnnnnnnnnnnnnnnnnnnnnnnnnnnnnnnnnnnnnnnnnnnnnnnnnnnnnnnnnnnnnnnnnnnnnnnnnnnnnnnnnnnnnnnnnnnnnnnnnnnnnnnnnnnnnnnnnnnnnnnnnnnnnnnnnnnnnnnnnnnnnnnnnnnnnnnnnnnnnnnnnnnnnnnnnnnnnnnnnnnnnnnnnnnnnnnnnnnnnnnnnnnnnnnnnnnnnnnnnnnnnnnnnnnnnnnnnnnnnnnnnnnnnnnnnnnnnnnnnnnnnnnnnnnnnnnnnnnnnnnnnnnnnnnnnnnnnnnnnnnnnnnnnnnnnnnnnnnnnnnnnnnnnnnnnnnnnnnnnnnnnnnnnnnnnnnnnnnnnnnnnnnnnnnnnnnnnnnnnnnnnnnnnnnnnnnnnnnnnnnnnnnnnnnnnnnnnnnnnnnnnnnnnnnnnnnnnnnnnnnnnnnnnnnnnnnnnnnnnnnnnnnnnnnnnnnnnnnnnnnnnnnnnnnnnnnnnnnnnnnnnnnnnnnnnnnnnnnnnnnnnnnnnnnnnnnnnnnnnnnnnnnnnnnnnnnnnnnnnnnnnnnnnnnnnnnnnnnnnnnnnnnnnnnnnnnnnnnnnnnnnnnnnnnnnnnnnnnnnnnnnnnnnnnnnnnnnnnnnnnnnnnnnnnnnnnnnnnnnnnnnnnnnnnnnnnnnnnnnnnnnnnnnnnnnnnnnnnnnnnnnnnnnnnnnnnnnnnnnnnnnnnnnnnnnnnnnnnnnnnnnnnnnnnnnnnnnnnnnnnnnnnnnnnnnnnnnnnnnnnnnnnnnnnnnnnnnnnnnnnnnnnnnnnnnnnnnnnnnnnnnnnnnnnnnnnnnnnnnnnnnnnnnnnnnnnnnnnnnnnnnnnnnnnnnnnnnnnnnnnnnnnnnnnnnnnnnnnnnnnnnnnnnnnnnnnnnnnnnnnnnnnnnnnnnnnnnnnnnnnnnnnnnnnnnnnnnnnnnnnnnnnnnnnnnnnnnnnnnnnnnnnnnnnnnnnnnnnnnnnnnnnnnnnnnnnnnnnnnnnnnnnnnnnnnnnnnnnnnnnnnnnnnnnnnnnnnnnnnnnnnnnnnnnnnnnnnnnnnnnnnnnnnnnnnnnnnnnnnnnnnnnnnnnnnnnnnnnnnnnnnnnnnnnnnnnnnnnnnnnnnnnnnnnnnnnnnnnnnnnnnnnnnnnnnnnnnnnnnnnnnnnnnnnnnnnnnnnnnnnnnnnnnnnnnnnnnnnnnnnnnnnnnnnnnnnnnnnnnnnnnnnnnnnnnnnnnnnnnnnnnnnnnnnnnnnnnnnnnnnnnnnnnnnnnnnnnnnnnnnnnnnnnnnnnnnnnnnnnnnnnnnnnnnnnnnnnnnnnnnnnnnnnnnnnnnnnnnnnnnnnnnnnnnnnnnnnnnnnnnnnnnnnnnnnnnnnnnnnnnnnnnnnnnnnnnnnnnnnnnnnnnnnnnnnnnnnnnnnnnnnnnnnnnnnnnnnnnnnnnnnnnnnnnnnnnnnnnnnnnnnnnnnnnnnnnnnnnnnnnnnnnnnnnnnnnnnnnnnnnnnnnnnnnnnnnnnnnnnnnnnnnnnnnnnnnnnnnnnnnnnnnnnnnnnnnnnnnnnnnnnnnnnnnnnnnnnnnnnnnnnnnnnnnnnnnnnnnnnnnnnnnnnnnnnnnnnnnnnnnnnnnnnnnnnnnnnnnnnnnnnnnnnnnnnnnnnnnnnnnnnnnnnnnnnnnnnnnnnnnnnnnnnnnnnnnnnnnnnnnnnnnnnnnnnnnnnnnnnnnnnnnnnnnnnnnnnnnnnnnnnnnnnnnnnnnnnnnnnnnnnnnnnnnnnnnnnnnnnnnnnnnnnnnnnnnnnnnnnnnnnnnnnnnnnnnnnnnnnnnnnnnnnnnnnnnnnnnnnnnnnnnnnnnnnnnnnnnnnnnnnnnnnnnnnnnnnnnnnnnnnnnnnnnnnnnnnnnnnnnnnnnnnnnnnnnnnnnnnnnnnnnnnnnnnnnnnnnnnnnnnnnnnnnnnnnnnnnnnnnnnnnnnnnnnnnnnnnnnnnnnnnnnnnnnnnnnnnnnnnnnnnnnnnnnnnnnnnnnnnnnnnnnnnnnnnnnnnnnnnnnnnnnnnnnnnnnnnnnnnnnnnnnnnnnnnnnnnnnnnnnnnnnnnnnnnnnnnnnnnnnnnnnnnnnnnnnnnnnnnnnnnnnnnnnnnnnnnnnnnnnnnnnnnnnnnnnnnnnnnnnnnnnnnnnnnnnnnnnnnnnnnnnnnnnnnnnnnnnnnnnnnnnnnnnnnnnnnnnnnnnnnnnnnnnnnnnnnnnnnnnnnnnnnnnnnnnnnnnnnnnnnnnnnnnnnnnnnnnnnnnnnnnnnnnnnnnnnnnnnnnnnnnnnnnnnnnnnnnnnnnnnnnnnnnnnnnnnnnnnnnnnnnnnnnnnnnnnnnnnnnnnnnnnnnnnnnnnnnnnnnnnnnnnnnnnnnnnnnnnnnnnnnnnnnnnnnnnnnnnnnnnnnnnnnnnnnnnnnnnnnnnnnnnnnnnnnnnnnnnnnnnnnnnnnnnnnnnnnnnnnnnnnnnnnnnnnnnnnnnnnnnnnnnnnnnnnnnnnnnnnnnnnnnnnnnnnnnnnnnnnnnnnnnnnnnnnnnnnnnnnnnnnnnnnnnnnnnnnnnnnnnnnnnnnnnnnnnnnnnnnnnnnnnnnnnnnnnnnnnnnnnnnnnnnnnnnnnnnnnnnnnnnnnnnnnnnnnnnnnnnnnnnnnnnnnnnnnnnnnnnnnnnnnnnnnnnnnnnnnnnnnnnnnnnnnnnnnnnnnnnnnnnnnnnnnnnnnnnnnnnnnnnnnnnnnnnnnnnnnnnnnnnnnnnnnnnnnnnnnnnnnnnnnnnnnnnnnnnnnnnnnnnnnnnnnnnnnnnnnnnnnnnnnnnnnnnnnnnnnnnnnnnnnnnnnnnnnnnnnnnnnnnnnnnnnnnnnnnnnnnnnnnnnnnnnnnnnnnnnnnnnnnnnnnnnnnnnnnnnnnnnnnnnnnnnnnnnnnnnnnnnnnnnnnnnnnnnnnnnnnnnnnnnnnnnnnnnnnnnnnnnnnnnnnnnnnnnnnnnnnnnnnnnnnnnnnnnnnnnnnnnnnnnnnnnnnnnnnnnnnnnnnnnnnnnnnnnnnnnnnnnnnnnnnnnnnnnnnnnnnnnnnnnnnnnnnnnnnnnnnnnnnnnnnnnnnnnnnnnnnnnnnnnnnnnnnnnnnnnnnnnnnnnnnnnnnnnnnnnnnnnnnnnnnnnnnnnnnnnnnnnnnnnnnnnnnnnnnnnnnnnnnnnnnnnnnnnnnnnnnnnnnnnnnnnnnnnnnnnnnnnnnnnnnnnnnnnnnnnnnnnnnnnnnnnnnnnnnnnnnnnnnnnnnnnnnnnnnnnnnnnnnnnnnnnnnnnnnnnnnnnnnnnnnnnnnnnnnnnnnnnnnnnnnnnnnnnnnnnnnnnnnnnnnnnnnnnnnnnnnnnnnnnnnnnnnnnnnnnnnnnnnnnnnnnnnnnnnnnnnnnnnnnnnnnnnnnnnnnnnnnnnnnnnnnnnnnnnnnnnnnnnnnnnnnnnnnnnnnnnnnnnnnnnnnnnnnnnnnnnnnnnnnnnnnnnnnnnnnnnnnnnnnnnnnnnnnnnnnnnnnnnnnnnnnnnnnnnnnnnnnnnnnnnnnnnnnnnnnnnnnnnnnnnnnnnnnnnnnnnnnnnnnnnnnnnnnnnnnnnnnnnnnnnnnnnnnnnnnnnnnnnnnnnnnnnnnnnnnnnnnnnnnnnnnnnnnnnnnnnnnnnnnnnnnnnnnnnnnnnnnnnnnnnnnnnnnnnnnnnnnnnnnnnnnnnnnnnnnnnnnnnnnnnnnnnnnnnnnnnnnnnnnnnnnnnnnnnnnnnnnnnnnnnnnnnnnnnnnnnnnnnnnnnnnnnnnnnnnnnnnnnnnnnnnnnnnnnnnnnnnnnnnnnnnnnnnnnnnnnnnnnnnnnnnnnnnnnnnnnnnnnnnnnnnnnnnnnnnnnnnnnnnnnnnnnnnnnnnnnnnnnnnnnnnnnnnnnnnnnnnnnnnnnnnnnnnnnnnnnnnnnnnnnnnnnnnnnnnnnnnnnnnnnnnnnnnnnnnnnnnnnnnnnnnnnnnnnnnnnnnnnnnnnnnnnnnnnnnnnnnnnnnnnnnnnnnnnnnnnnnnnnnnnnnnnnnnnnnnnnnnnnnnnnnnnnnnnnnnnnnnnnnnnnnnnnnnnnnnnnnnnnnnnnnnnnnnnnnnnnnnnnnnnnnnnnnnnnnnnnnnnnnnnnnnnnnnnnnnnnnnnnnnnnnnnnnnnnnnnnnnnnnnnnnnnnnnnnnnnnnnnnnnnnnnnnnnnnnnnnnnnnnnnnnnnnnnnnnnnnnnnnnnnnnnnnnnnnnnnnnnnnnnnnnnnnnnnnnnnnnnnnnnnnnnnnnnnnnnnnnnnnnnnnnnnnnnnnnnnnnnnnnnnnnnnnnnnnnnnnnnnnnnnnnnnnnnnnnnnnnnnnnnnnnnnnnnnnnnnnnnnnnnnnnnnnnnnnnnnnnnnnnnnnnnnnnnnnnnnnnnnnnnnnnnnnnnnnnnnnnnnnnnnnnnnnnnnnnnnnnnnnnnnnnnnnnnnnnnnnnnnnnnnnnnnnnnnnnnnnnnnnnnnnnnnnnnnnnnnnnnnnnnnnnnnnnnnnnnnnnnnnnnnnnnnnnnnnnnnnnnnnnnnnnnnnnnnnnnnnnnnnnnnnnnnnnnnnnnnnnnnnnnnnnnnnnnnnnnnnnnnnnnnnnnnnnnnnnnnnnnnnnnnnnnnnnnnnnnnnnnnnnnnnnnnnnnnnnnnnnnnnnnnnnnnnnnnnnnnnnnnnnnnnnnnnnnnnnnnnnnnnnnnnnnnnnnnnnnnnnnnnnnnnnnnnnnnnnnnnnnnnnnnnnnnnnnnnnnnnnnnnnnnnnnnnnnnnnnnnnnnnnnnnnnnnnnnnnnnnnnnnnnnnnnnnnnnnnnnnnnnnnnnnnnnnnnnnnnnnnnnnnnnnnnnnnnnnnnnnnnnnnnnnnnnnnnnnnnnnnnnnnnnnnnnnnnnnnnnnnnnnnnnnnnnnnnnnnnnnnnnnnnnnnnnnnnnnnnnnnnnnnnnnnnnnnnnnnnnnnnnnnnnnnnnnnnnnnnnnnnnnnnnnnnnnnnnnnnnnnnnnnnnnnnnnnnnnnnnnnnnnnnnnnnnnnnnnnnnnnnnnnnnnnnnnnnnnnnnnnnnnnnnnnnnnnnnnnnnnnnnnnnnnnnnnnnnnnnnnnnnnnnnnnnnnnnnnnnnnnnnnnnnnnnnnnnnnnnnnnnnnnnnnnnnnnnnnnnnnnnnnnnnnnnnnnnnnnnnnnnnnnnnnnnnnnnnnnnnnnnnnnnnnnnnnnnnnnnnnnnnnnnnnnnnnnnnnnnnnnnnnnnnnnnnnnnnnnnnnnnnnnnnnnnnnnnnnnnnnnnnnnnnnnnnnnnnnnnnnnnnnnnnnnnnnnnnnnnnnnnnnnnnnnnnnnnnnnnnnnnnnnnnnnnnnnnnnnnnnnnnnnnnnnnnnnnnnnnnnnnnnnnnnnnnnnnnnnnnnnnnnnnnnnnnnnnnnnnnnnnnnnnnnnnnnnnnnnnnnnnnnnnnnnnnnnnnnnnnnnnnnnnnnnnnnnnnnnnnnnnnnnnnnnnnnnnnnnnnnnnnnnnnnnnnnnnnnnnnnnnnnnnnnnnnnnnnnnnnnnnnnnnnnnnnnnnnnnnnnnnnnnnnnnnnnnnnnnnnnnnnnnnnnnnnnnnnnnnnnnnnnnnnnnnnnnnnnnnnnnnnnnnnnnnnnnnnnnnnnnnnnnnnnnnnnnnnnnnnnnnnnnnnnnnnnnnnnnnnnnnnnnnnnnnnnnnnnnnnnnnnnnnnnnnnnnnnnnnnnnnnnnnnnnnnnnnnnnnnnnnnnnnnnnnnnnnnnnnnnnnnnnnnnnnnnnnnnnnnnnnnnnnnnnnnnnnnnnnnnnnnnnnnnnnnnnnnnnnnnnnnnnnnnnnnnnnnnnnnnnnnnnnnnnnnnnnnnnnnnnnnnnnnnnnnnnnnnnnnnnnnnnnnnnnnnnnnnnnnnnnnnnnnnnnnnnnnnnnnnnnnnnnnnnnnnnnnnnnnnnnnnnnnnnnnnnnnnnnnnnnnnnnnnnnnnnnnnnnnnnnnnnnnnnnnnnnnnnnnnnnnnnnnnnnnnnnnnnnnnnnnnnnnnnnnnnnnnnnnnnnnnnnnnnnnnnnnnnnnnnnnnnnnnnnnnnnnnnnnnnnnnnnnnnnnnnnnnnnnnnnnnnnnnnnnnnnnnnnnnnnnnnnnnnnnnnnnnnnnnnnnnnnnnnnnnnnnnnnnnnnnnnnnnnnnnnnnnnnnnnnnnnnnnnnnnnnnnnnnnnnnnnnnnnnnnnnnnnnnnnnnnnnnnnnnnnnnnnnnnnnnnnnnnnnnnnnnnnnnnnnnnnnnnnnnnnnnnnnnnnnnnnnnnnnnnnnnnnnnnnnnnnnnnnnnnnnnnnnnnnnnnnnnnnnnnnnnnnnnnnnnnnnnnnnnnnnnnnnnnnnnnnnnnnnnnnnnnnnnnnnnnnnnnnnnnnnnnnnnnnnnnnnnnnnnnnnnnnnnnnnnnnnnnnnnnnnnnnnnnnnnnnnnnnnnnnnnnnnnnnnnnnnnnnnnnnnnnnnnnnnnnnnnnnnnnnnnnnnnnnnnnnnnnnnnnnnnnnnnnnnnnnnnnnnnnnnnnnnnnnnnnnnnnnnnnnnnnnnnnnnnnnnnnnnnnnnnnnnnnnnnnnnnnnnnnnnnnnnnnnnnnnnnnnnnnnnnnnnnnnnnnnnnnnnnnnnnnnnnnnnnnnnnnnnnnnnnnnnnnnnnnnnnnnnnnnnnnnnnnnnnnnnnnnnnnnnnnnnnnnnnnnnnnnnnnnnnnnnnnnnnnnnnnnnnnnnnnnnnnnnnnnnnnnnnnnnnnnnnnnnnnnnnnnnnnnnnnnnnnnnnnnnnnnnnnnnnnnnnnnnnnnnnnnnnnnnnnnnnnnnnnnnnnnnnnnnnnnnnnnnnnnnnnnnnnnnnnnnnnnnnnnnnnnnnnnnnnnnnnnnnnnnnnnnnnnnnnnnnnnnnnnnnnnnnnnnnnnnnnnnnnnnnnnnnnnnnnnnnnnnnnnnnnnnnnnnnnnnnnnnnnnnnnnnnnnnnnnnnnnnnnnnnnnnnnnnnnnnnnnnnnnnnnnnnnnnnnnnnnnnnnnnnnnnnnnnnnnnnnnnnnnnnnnnnnnnnnnnnnnnnnnnnnnnnnnnnnnnnnnnnnnnnnnnnnnnnnnnnnnnnnnnnnnnnnnnnnnnnnnnnnnnnnnnnnnnnnnnnnnnnnnnnnnnnnnnnnnnnnnnnnnnnnnnnnnnnnnnnnnnnnnnnnnnnnnnnnnnnnnnnnnnnnnnnnnnnnnnnnnnnnnnnnnnnnnnnnnnnnnnnnnnnnnnnnnnnnnnnnnnnnnnnnnnnnnnnnnnnnnnnnnnnnnnnnnnnnnnnnnnnnnnnnnnnnnnnnnnnnnnnnnnnnnnnnnnnnnnnnnnnnnnnnnnnnnnnnnnnnnnnnnnnnnnnnnnnnnnnnnnnnnnnnnnnnnnnnnnnnnnnnnnnnnnnnnnnnnnnnnnnnnnnnnnnnnnnnnnnnnnnnnnnnnnnnnnnnnnnnnnnnnnnnnnnnnnnnnnnnnnnnnnnnnnnnnnnnnnnnnnnnnnnnnnnnnnnnnnnnnnnnnnnnnnnnnnnnnnnnnnnnnnnnnnnnnnnnnnnnnnnnnnnnnnnnnnnnnnnnnnnnnnnnnnnnnnnnnnnnnnnnnnnnnnnnnnnnnnnnnnnnnnnnnnnnnnnnnnnnnnnnnnnnnnnnnnnnnnnnnnnnnnnnnnnnnnnnnnnnnnnnnnnnnnnnnnnnnnnnnnnnnnnnnnnnnnnnnnnnnnnnnnnnnnnnnnnnnnnnnnnnnnnnnnnnnnnnnnnnnnnnnnnnnnnnnnnnnnnnnnnnnnnnnnnnnnnnnnnnnnnnnnnnnnnnnnnnnnnnnnnnnnnnnnnnnnnnnnnnnnnnnnnnnnnnnnnnnnnnnnnnnnnnnnnnnnnnnnnnnnnnnnnnnnnnnnnnnnnnnnnnnnnnnnnnnnnnnnnnnnnnnnnnnnnnnnnnnnnnnnnnnnnnnnnnnnnnnnnnnnnnnnnnnnnnnnnnnnnnnnnnnnnnnnnnnnnnnnnnnnnnnnnnnnnnnnnnnnnnnnnnnnnnnnnnnnnnnnnnnnnnnnnnnnnnnnnnnnnnnnnnnnnnnnnnnnnnnnnnnnnnnnnnnnnnnnnnnnnnnnnnnnnnnnnnnnnnnnnnnnnnnnnnnnnnnnnnnnnnnnnnnnnnnnnnnnnnnnnnnnnnnnnnnnnnnnnnnnnnnnnnnnnnnnnnnnnnnnnnnnnnnnnnnnnnnnnnnnnnnnnnnnnnnnnnnnnnnnnnnnnnnnnnnnnnnnnnnnnnnnnnnnnnnnnnnnnnnnnnnnnnnnnnnnnnnnnnnnnnnnnnnnnnnnnnnnnnnnnnnnnnnnnnnnnnnnnnnnnnnnnnnnnnnnnnnnnnnnnnnnnnnnnnnnnnnnnnnnnnnnnnnnnnnnnnnnnnnnnnnnnnnnnnnnnnnnnnnnnnnnnnnnnnnnnnnnnnnnnnnnnnnnnnnnnnnnnnnnnnnnnnnnnnnnnnnnnnnnnnnnnnnnnnnnnnnnnnnnnnnnnnnnnnnnnnnnnnnnnnnnnnnnnnnnnnnnnnnnnnnnnnnnnnnnnnnnnnnnnnnnnnnnnnnnnnnnnnnnnnnnnnnnnnnnnnnnnnnnnnnnnnnnnnnnnnnnnnnnnnnnnnnnnnnnnnnnnnnnnnnnnnnnnnnnnnnnnnnnnnnnnnnnnnnnnnnnnnnnnnnnnnnnnnnnnnnnnnnnnnnnnnnnnnnnnnnnnnnnnnnnnnnnnnnnnnnnnnnnnnnnnnnnnnnnnnnnnnnnnnnnnnnnnnnnnnnnnnnnnnnnnnnnnnnnnnnnnnnnnnnnnnnnnnnnnnnnnnnnnnnnnnnnnnnnnnnnnnnnnnnnnnnnnnnnnnnnnnnnnnnnnnnnnnnnnnnnnnnnnnnnnnnnnnnnnnnnnnnnnnnnnnnnnnnnnnnnnnnnnnnnnnnnnnnnnnnnnnnnnnnnnnnnnnnnnnnnnnnnnnnnnnnnnnnnnnnnnnnnnnnnnnnnnnnnnnnnnnnnnnnnnnnnnnnnnnnnnnnnnnnnnnnnnnnnnnnnnnnnnnnnnnnnnnnnnnnnnnnnnnnnnnnnnnnnnnnnnnnnnnnnnnnnnnnnnnnnnnnnnnnnnnnnnnnnnnnnnnnnnnnnnnnnnnnnnnnnnnnnnnnnnnnnnnnnnnnnnnnnnnnnnnnnnnnnnnnnnnnnnnnnnnnnnnnnnnnnnnnnnnnnnnnnnnnnnnnnnnnnnnnnnnnnnnnnnnnnnnnnnnnnnnnnnnnnnnnnnnnnnnnnnnnnnnnnnnnnnnnnnnnnnnnnnnnnnnnnnnnnnnnnnnnnnnnnnnnnnnnnnnnnnnnnnnnnnnnnnnnnnnnnnnnnnnnnnnnnnnnnnnnnnnnnnnnnnnnnnnnnnnnnnnnnnnnnnnnnnnnnnnnnnnnnnnnnnnnnnnnnnnnnnnnnnnnnnnnnnnnnnnnnnnnnnnnnnnnnnnnnnnnnnnnnnnnnnnnnnnnnnnnnnnnnnnnnnnnnnnnnnnnnnnnnnnnnnnnnnnnnnnnnnnnnnnnnnnnnnnnnnnnnnnnnnnnnnnnnnnnnnnnnnnnnnnnnnnnnnnnnnnnnnnnnnnnnnnnnnnnnnnnnnnnnnnnnnnnnnnnnnnnnnnnnnnnnnnnnnnnnnnnnnnnnnnnnnnnnnnnnnnnnnnnnnnnnnnnnnnnnnnnnnnnnnnnnnnnnnnnnnnnnnnnnnnnnnnnnnnnnnnnnnnnnnnnnnnnnnnnnnnnnnnnnnnnnnnnnnnnnnnnnnnnnnnnnnnnnnnnnnnnnnnnnnnnnnnnnnnnnnnnnnnnnnnnnnnnnnnnnnnnnnnnnnnnnnnnnnnnnnnnnnnnnnnnnnnnnnnnnnnnnnnnnnnnnnnnnnnnnnnnnnnnnnnnnnnnnnnnnnnnnnnnnnnnnnnnnnnnnnnnnnnnnnnnnnnnnnnnnnnnnnnnnnnnnnnnnnnnnnnnnnnnnnnnnnnnnnnnnnnnnnnnnnnnnnnnnnnnnnnnnnnnnnnnnnnnnnnnnnnnnnnnnnnnnnnnnnnnnnnnnnnnnnnnnnnnnnnnnnnnnnnnnnnnnnnnnnnnnnnnnnnnnnnnnnnnnnnnnnnnnnnnnnnnnnnnnnnnnnnnnnnnnnnnnnnnnnnnnnnnnnnnnnnnnnnnnnnnnnnnnnnnnnnnnnnnnnnnnnnnnnnnnnnnnnnnnnnnnnnnnnnnnnnnnnnnnnnnnnnnnnnnnnnnnnnnnnnnnnnnnnnnnnnnnnnnnnnnnnnnnnnnnnnnnnnnnnnnnnnnnnnnnnnnnnnnnnnnnnnnnnnnnnnnnnnnnnnnnnnnnnnnnnnnnnnnnnnnnnnnnnnnnnnnnnnnnnnnnnnnnnnnnnnnnnnnnnnnnnnnnnnnnnnnnnnnnnnnnnnnnnnnnnnnnnnnnnnnnnnnnnnnnnnnnnnnnnnnnnnnnnnnnnnnnnnnnnnnnnnnnnnnnnnnnnnnnnnnnnnnnnnnnnnnnnnnnnnnnnnnnnnnnnnnnnnnnnnnnnnnnnnnnnnnnnnnnnnnnnnnnnnnnnnnnnnnnnnnnnnnnnnnnnnnnnnnnnnnnnnnnnnnnnnnnnnnnnnnnnnnnnnnnnnnnnnnnnnnnnnnnnnnnnnnnnnnnnnnnnnnnnnnnnnnnnnnnnnnnnnnnnnnnnnnnnnnnnnnnnnnnnnnnnnnnnnnnnnnnnnnnnnnnnnnnnnnnnnnnnnnnnnnnnnnnnnnnnnnnnnnnnnnnnnnnnnnnnnnnnnnnnnnnnnnnnnnnnnnnnnnnnnnnnnnnnnnnnnnnnnnnnnnnnnnnnnnnnnnnnnnnnnnnnnnnnnnnnnnnnnnnnnnnnnnnnnnnnnnnnnnnnnnnnnnnnnnnnnnnnnnnnnnnnnnnnnnnnnnnnnnnnnnnnnnnnnnnnnnnnnnnnnnnnnnnnnnnnnnnnnnnnnnnnnnnnnnnnnnnnnnnnnnnnnnnnnnnnnnnnnnnnnnnnnnnnnnnnnnnnnnnnnnnnnnnnnnnnnnnnnnnnnnnnnnnnnnnnnnnnnnnnnnnnnnnnnnnnnnnnnnnnnnnnnnnnnnnnnnnnnnnnnnnnnnnnnnnnnnnnnnnnnnnnnnnnnnnnnnnnnnnnnnnnnnnnnnnnnnnnnnnnnnnnnnnnnnnnnnnnnnnnnnnnnnnnnnnnnnnnnnnnnnnnnnnnnnnnnnnnnnnnnnnnnnnnnnnnnnnnnnnnnnnnnnnnnnnnnnnnnnnnnnnnnnnnnnnnnnnnnnnnnnnnnnnnnnnnnnnnnnnnnnnnnnnnnnnnnnnnnnnnnnnnnnnnnnnnnnnnnnnnnnnnnnnnnnnnnnnnnnnnnnnnnnnnnnnnnnnnnnnnnnnnnnnnnnnnnnnnnnnnnnnnnnnnnnnnnnnnnnnnnnnnnnnnnnnnnnnnnnnnnnnnnnnnnnnnnnnnnnnnnnnnnnnnnnnnnnnnnnnnnnnnnnnnnnnnnnnnnnnnnnnnnnnnnnnnnnnnnnnnnnnnnnnnnnnnnnnnnnnnnnnnnnnnnnnnnnnnnnnnnnnnnnnnnnnnnnnnnnnnnnnnnnnnnnnnnnnnnnnnnnnnnnnnnnnnnnnnnnnnnnnnnnnnnnnnnnnnnnnnnnnnnnnnnnnnnnnnnnnnnnnnnnnnnnnnnnnnnnnnnnnnnnnnnnnnnnnnnnnnnnnnnnnnnnnnnnnnnnnnnnnnnnnnnnnnnnnnnnnnnnnnnnnnnnnnnnnnnnnnnnnnnnnnnnnnnnnnnnnnnnnnnnnnnnnnnnnnnnnnnnnnnnnnnnnnnnnnnnnnnnnnnnnnnnnnnnnnnnnnnnnnnnnnnnnnnnnnnnnnnnnnnnnnnnnnnnnnnnnnnnnnnnnnnnnnnnnnnnnnnnnnnnnnnnnnnnnnnnnnnnnnnnnnnnnnnnnnnnnnnnnnnnnnnnnnnnnnnnnnnnnnnnnnnnnnnnnnnnnnnnnnnnnnnnnnnnnnnnnnnnnnnnnnnnnnnnnnnnnnnnnnnnnnnnnnnnnnnnnnnnnnnnnnnnnnnnnnnnnnnnnnnnnnnnnnnnnnnnnnnnnnnnnnnnnnnnnnnnnnnnnnnnnnnnnnnnnnnnnnnnnnnnnnnnnnnnnnnnnnnnnnnnnnnnnnnnnnnnnnnnnnnnnnnnnnnnnnnnnnnnnnnnnnnnnnnnnnnnnnnnnnnnnnnnnnnnnnnnnnnnnnnnnnnnnnnnnnnnnnnnnnnnnnnnnnnnnnnnnnnnnnnnnnnnnnnnnnnnnnnnnnnnnnnnnnnnnnnnnnnnnnnnnnnnnnnnnnnnnnnnnnnnnnnnnnnnnnnnnnnnnnnnnnnnnnnnnnnnnnnnnnnnnnnnnnnnnnnnnnnnnnnnnnnnnnnnnnnnnnnnnnnnnnnnnnnnnnnnnnnnnnnnnnnnnnnnnnnnnnnnnnnnnnnnnnnnnnnnnnnnnnnnnnnnnnnnnnnnnnnnnnnnnnnnnnnnnnnnnnnnnnnnnnnnnnnnnnnnnnnnnnnnnnnnnnnnnnnnnnnnnnnnnnnnnnnnnnnnnnnnnnnnnnnnnnnnnnnnnnnnnnnnnnnnnnnnnnnnnnnnnnnnnnnnnnnnnnnnnnnnnnnnnnnnnnnnnnnnnnnnnnnnnnnnnnnnnnnnnnnnnnnnnnnnnnnnnnnnnnnnnnnnnnnnnnnnnnnnnnnnnnnnnnnnnnnnnnnnnnnnnnnnnnnnnnnnnnnnnnnnnnnnnnnnnnnnnnnnnnnnnnnnnnnnnnnnnnnnnnnnnnnnnnnnnnnnnnnnnnnnnnnnnnnnnnnnnnnnnnnnnnnnnnnnnnnnnnnnnnnnnnnnnnnnnnnnnnnnnnnnnnnnnnnnnnnnnnnnnnnnnnnnnnnnnnnnnnnnnnnnnnnnnnnnnnnnnnnnnnnnnnnnnnnnnnnnnnnnnnnnnnnnnnnnnnnnnnnnnnnnnnnnnnnnnnnnnnnnnnnnnnnnnnnnnnnnnnnnnnnnnnnnnnnnnnnnnnnnnnnnnnnnnnnnnnnnnnnnnnnnnnnnnnnnnnnnnnnnnnnnnnnnnnnnnnnnnnnnnnnnnnnnnnnnnnnnnnnnnnnnnnnnnnnnnnnnnnnnnnnnnnnnnnnnnnnnnnnnnnnnnnnnnnnnnnnnnnnnnnnnnnnnnnnnnnnnnnnnnnnnnnnnnnnnnnnnnnnnnnnnnnnnnnnnnnnnnnnnnnnnnnnnnnnnnnnnnnnnnnnnnnnnnnnnnnnnnnnnnnnnnnnnnnnnnnnnnnnnnnnnnnnnnnnnnnnnnnnnnnnnnnnnnnnnnnnnnnnnnnnnnnnnnnnnnnnnnnnnnnnnnnnnnnnnnnnnnnnnnnnnnnnnnnnnnnnnnnnnnnnnnnnnnnnnnnnnnnnnnnnnnnnnnnnnnnnnnnnnnnnnnnnnnnnnnnnnnnnnnnnnnnnnnnnnnnnnnnnnnnnnnnnnnnnnnnnnnnnnnnnnnnnnnnnnnnnnnnnnnnnnnnnnnnnnnnnnnnnnnnnnnnnnnnnnnnnnnnnnnnnnnnnnnnnnnnnnnnnnnnnnnnnnnnnnnnnnnnnnnnnnnnnnnnnnnnnnnnnnnnnnnnnnnnnnnnnnnnnnnnnnnnnnnnnnnnnnnnnnnnnnnnnnnnnnnnnnnnnnnnnnnnnnnnnnnnnnnnnnnnnnnnnnnnnnnnnnnnnnnnnnnnnnnnnnnnnnnnnnnnnnnnnnnnnnnnnnnnnnnnnnnnnnnnnnnnnnnnnnnnnnnnnnnnnnnnnnnnnnnnnnnnnnnnnnnnnnnnnnnnnnnnnnnnnnnnnnnnnnnnnnnnnnnnnnnnnnnnnnnnnnnnnnnnnnnnnnnnnnnnnnnnnnnnnnnnnnnnnnnnnnnnnnnnnnnnnnnnnnnnnnnnnnnnnnnnnnnnnnnnnnnnnnnnnnnnnnnnnnnnnnnnnnnnnnnnnnnnnnnnnnnnnnnnnnnnnnnnnnnnnnnnnnnnnnnnnnnnnnnnnnnnnnnnnnnnnnnnnnnnnnnnnnnnnnnnnnnnnnnnnnnnnnnnnnnnnnnnnnnnnnnnnnnnnnnnnnnnnnnnnnnnnnnnnnnnnnnnnnnnnnnnnnnnnnnnnnnnnnnnnnnnnnnnnnnnnnnnnnnnnnnnnnnnnnnnnnnnnnnnnnnnnnnnnnnnnnnnnnnnnnnnnnnnnnnnnnnnnnnnnnnnnnnnnnnnnnnnnnnnnnnnnnnnnnnnnnnnnnnnnnnnnnnnnnnnnnnnnnnnnnnnnnnnnnnnnnnnnnnnnnnnnnnnnnnnnnnnnnnnnnnnnnnnnnnnnnnnnnnnnnnnnnnnnnnnnnnnnnnnnnnnnnnnnnnnnnnnnnnnnnnnnnnnnnnnnnnnnnnnnnnnnnnnnnnnnnnnnnnnnnnnnnnnnnnnnnnnnnnnnnnnnnnnnnnnnnnnnnnnnnnnnnnnnnnnnnnnnnnnnnnnnnnnnnnnnnnnnnnnnnnnnnnnnnnnnnnnnnnnnnnnnnnnnnnnnnnnnnnnnnnnnnnnnnnnnnnnnnnnnnnnnnnnnnnnnnnnnnnnnnnnnnnnnnnnnnnnnnnnnnnnnnnnnnnnnnnnnnnnnnnnnnnnnnnnnnnnnnnnnnnnnnnnnnnnnnnnnnnnnnnnnnnnnnnnnnnnnnnnnnnnnnnnnnnnnnnnnnnnnnnnnnnnnnnnnnnnnnnnnnnnnnnnnnnnnnnnnnnnnnnnnnnnnnnnnnnnnnnnnnnnnnnnnnnnnnnnnnnnnnnnnnnnnnnnnnnnnnnnnnnnnnnnnnnnnnnnnnnnnnnnnnnnnnnnnnnnnnnnnnnnnnnnnnnnnnnnnnnnnnnnnnnnnnnnnnnnnnnnnnnnnnnnnnnnnnnnnnnnnnnnnnnnnnnnnnnnnnnnnnnnnnnnnnnnnnnnnnnnnnnnnnnnnnnnnnnnnnnnnnnnnnnnnnnnnnnnnnnnnnnnnnnnnnnnnnnnnnnnnnnnnnnnnnnnnnnnnnnnnnnnnnnnnnnnnnnnnnnnnnnnnnnnnnnnnnnnnnnnnnnnnnnnnnnnnnnnnnnnnnnnnnnnnnnnnnnnnnnnnnnnnnnnnnnnnnnnnnnnnnnnnnnnnnnnnnnnnnnnnnnnnnnnnnnnnnnnnnnnnnnnnnnnnnnnnnnnnnnnnnnnnnnnnnnnnnnnnnnnnnnnnnnnnnnnnnnnnnnnnnnnnnnnnnnnnnnnnnnnnnnnnnnnnnnnnnnnnnnnnnnnnnnnnnnnnnnnnnnnnnnnnnnnnnnnnnnnnnnnnnnnnnnnnnnnnnnnnnnnnnnnnnnnnnnnnnnnnnnnnnnnnnnnnnnnnnnnnnnnnnnnnnnnnnnnnnnnnnnnnnnnnnnnnnnnnnnnnnnnnnnnnnnnnnnnnnnnnnnnnnnnnnnnnnnnnnnnnnnnnnnnnnnnnnnnnnnnnnnnnnnnnnnnnnnnnnnnnnnnnnnnnnnnnnnnnnnnnnnnnnnnnnnnnnnnnnnnnnnnnnnnnnnnnnnnnnnnnnnnnnnnnnnnnnnnnnnnnnnnnnnnnnnnnnnnnnnnnnnnnnnnnnnnnnnnnnnnnnnnnnnnnnnnnnnnnnnnnnnnnnnnnnnnnnnnnnnnnnnnnnnnnnnnnnnnnnnnnnnnnnnnnnnnnnnnnnnnnnnnnnnnnnnnnnnnnnnnnnnnnnnnnnnnnnnnnnnnnnnnnnnnnnnnnnnnnnnnnnnnnnnnnnnnnnnnnnnnnnnnnnnnnnnnnnnnnnnnnnnnnnnnnnnnnnnnnnnnnnnnnnnnnnnnnnnnnnnnnnnnnnnnnnnnnnnnnnnnnnnnnnnnnnnnnnnnnnnnnnnnnnnnnnnnnnnnnnnnnnnnnnnnnnnnnnnnnnnnnnnnnnnnnnnnnnnnnnnnnnnnnnnnnnnnnnnnnnnnnnnnnnnnnnnnnnnnnnnnnnnnnnnnnnnnnnnnnnnnnnnnnnnnnnnnnnnnnnnnnnnnnnnnnnnnnnnnnnnnnnnnnnnnnnnnnnnnnnnnnnnnnnnnnnnnnnnnnnnnnnnnnnnnnnnnnnnnnnnnnnnnnnnnnnnnnnnnnnnnnnnnnnnnnnnnnnnnnnnnnnnnnnnnnnnnnnnnnnnnnnnnnnnnnnnnnnnnnnnnnnnnnnnnnnnnnnnnnnnnnnnnnnnnnnnnnnnnnnnnnnnnnnnnnnnnnnnnnnnnnnnnnnnnnnnnnnnnnnnnnnnnnnnnnnnnnnnnnnnnnnnnnnnnnnnnnnnnnnnnnnnnnnnnnnnnnnnnnnnnnnnnnnnnnnnnnnnnnnnnnnnnnnnnnnnnnnnnnnnnnnnnnnnnnnnnnnnnnnnnnnnnnnnnnnnnnnnnnnnnnnnnnnnnnnnnnnnnnnnnnnnnnnnnnnnnnnnnnnnnnnnnnnnnnnnnnnnnnnnnnnnnnnnnnnnnnnnnnnnnnnnnnnnnnnnnnnnnnnnnnnnnnnnnnnnnnnnnnnnnnnnnnnnnnnnnnnnnnnnnnnnnnnnnnnnnnnnnnnnnnnnnnnnnnnnnnnnnnnnnnnnnnnnnnnnnnnnnnnnnnnnnnnnnnnnnnnnnnnnnnnnnnnnnnnnnnnnnnnnnnnnnnnnnnnnnnnnnnnnnnnnnnnnnnnnnnnnnnnnnnnnnnnnnnnnnnnnnnnnnnnnnnnnnnnnnnnnnnnnnnnnnnnnnnnnnnnnnnnnnnnnnnnnnnnnnnnnnnnnnnnnnnnnnnnnnnnnnnnnnnnnnnnnnnnnnnnnnnnnnnnnnnnnnnnnnnnnnnnnnnnnnnnnnnnnnnnnnnnnnnnnnnnnnnnnnnnnnnnnnnnnnnnnnnnnnnnnnnnnnnnnnnnnnnnnnnnnnnnnnnnnnnnnnnnnnnnnnnnnnnnnnnnnnnnnnnnnnnnnnnnnnnnnnnnnnnnnnnnnnnnnnnnnnnnnnnnnnnnnnnnnnnnnnnnnnnnnnnnnnnnnnnnnnnnnnnnnnnnnnnnnnnnnnnnnnnnnnnnnnnnnnnnnnnnnnnnnnnnnnnnnnnnnnnnnnnnnnnnnnnnnnnnnnnnnnnnnnnnnnnnnnnnnnnnnnnnnnnnnnnnnnnnnnnnnnnnnnnnnnnnnnnnnnnnnnnnnnnnnnnnnnnnnnnnnnnnnnnnnnnnnnnnnnnnnnnnnnnnnnnnnnnnnnnnnnnnnnnnnnnnnnnnnnnnnnnnnnnnnnnnnnnnnnnnnnnnnnnnnnnnnnnnnnnnnnnnnnnnnnnnnnnnnnnnnnnnnnnnnnnnnnnnnnnnnnnnnnnnnnnnnnnnnnnnnnnnnnnnnnnnnnnnnnnnnnnnnnnnnnnnnnnnnnnnnnnnnnnnnnnnnnnnnnnnnnnnnnnnnnnnnnnnnnnnnnnnnnnnnnnnnnnnnnnnnnnnnnnnnnnnnnnnnnnnnnnnnnnnnnnnnnnnnnnnnnnnnnnnnnnnnnnnnnnnnnnnnnnnnnnnnnnnnnnnnnnnnnnnnnnnnnnnnnnnnnnnnnnnnnnnnnnnnnnnnnnnnnnnnnnnnnnnnnnnnnnnnnnnnnnnnnnnnnnnnnnnnnnnnnnnnnnnnnnnnnnnnnnnnnnnnnnnnnnnnnnnnnnnnnnnnnnnnnnnnnnnnnnnnnnnnnnnnnnnnnnnnnnnnnnnnnnnnnnnnnnnnnnnnnnnnnnnnnnnnnnnnnnnnnnnnnnnnnnnnnnnnnnnnnnnnnnnnnnnnnnnnnnnnnnnnnnnnnnnnnnnnnnnnnnnnnnnnnnnnnnnnnnnnnnnnnnnnnnnnnnnnnnnnnnnnnnnnnnnnnnnnnnnnnnnnnnnnnnnnnnnnnnnnnnnnnnnnnnnnnnnnnnnnnnnnnnnnnnnnnnnnnnnnnnnnnnnnnnnnnnnnnnnnnnnnnnnnnnnnnnnnnnnnnnnnnnnnnnnnnnnnnnnnnnnnnnnnnnnnnnnnnnnnnnnnnnnnnnnnnnnnnnnnnnnnnnnnnnnnnnnnnnnnnnnnnnnnnnnnnnnnnnnnnnnnnnnnnnnnnnnnnnnnnnnnnnnnnnnnnnnnnnnnnnnnnnnnnnnnnnnnnnnnnnnnnnnnnnnnnnnnnnnnnnnnnnnnnnnnnnnnnnnnnnnnnnnnnnnnnnnnnnnnnnnnnnnnnnnnnnnnnnnnnnnnnnnnnnnnnnnnnnnnnnnnnnnnnnnnnnnnnnnnnnnnnnnnnnnnnnnnnnnnnnnnnnnnnnnnnnnnnnnnnnnnnnnnnnnnnnnnnnnnnnnnnnnnnnnnnnnnnnnnnnnnnnnnnnnnnnnnnnnnnnnnnnnnnnnnnnnnnnnnnnnnnnnnnnnnnnnnnnnnnnnnnnnnnnnnnnnnnnnnnnnnnnnnnnnnnnnnnnnnnnnnnnnnnnnnnnnnnnnnnnnnnnnnnnnnnnnnnnnnnnnnnnnnnnnnnnnnnnnnnnnnnnnnnnnnnnnnnnnnnnnnnnnnnnnnnnnnnnnnnnnnnnnnnnnnnnnnnnnnnnnnnnnnnnnnnnnnnnnnnnnnnnnnnnnnnnnnnnnnnnnnnnnnnnnnnnnnnnnnnnnnnnnnnnnnnnnnnnnnnnnnnnnnnnnnnnnnnnnnnnnnnnnnnnnnnnnnnnnnnnnnnnnnnnnnnnnnnnnnnnnnnnnnnnnnnnnnnnnnnnnnnnnnnnnnnnnnnnnnnnnnnnnnnnnnnnnnnnnnnnnnnnnnnnnnnnnnnnnnnnnnnnnnnnnnnnnnnnnnnnnnnnnnnnnnnnnnnnnnnnnnnnnnnnnnnnnnnnnnnnnnnnnnnnnnnnnnnnnnnnnnnnnnnnnnnnnnnnnnnnnnnnnnnnnnnnnnnnnnnnnnnnnnnnnnnnnnnnnnnnnnnnnnnnnnnnnnnnnnnnnnnnnnnnnnnnnnnnnnnnnnnnnnnnnnnnnnnnnnnnnnnnnnnnnnnnnnnnnnnnnnnnnnnnnnnnnnnnnnnnnnnnnnnnnnnnnnnnnnnnnnnnnnnnnnnnnnnnnnnnnnnnnnnnnnnnnnnnnnnnnnnnnnnnnnnnnnnnnnnnnnnnnnnnnnnnnnnnnnnnnnnnnnnnnnnnnnnnnnnnnnnnnnnnnnnnnnnnnnnnnnnnnnnnnnnnnnnnnnnnnnnnnnnnnnnnnnnnnnnnnnnnnnnnnnnnnnnnnnnnnnnnnnnnnnnnnnnnnnnnnnnnnnnnnnnnnnnnnnnnnnnnnnnnnnnnnnnnnnnnnnnnnnnnnnnnnnnnnnnnnnnnnnnnnnnnnnnnnnnnnnnnnnnnnnnnnnnnnnnnnnnnnnnnnnnnnnnnnnnnnnnnnnnnnnnnnnnnnnnnnnnnnnnnnnnnnnnnnnnnnnnnnnnnnnnnnnnnnnnnnnnnnnnnnnnnnnnnnnnnnnnnnnnnnnnnnnnnnnnnnnnnnnnnnnnnnnnnnnnnnnnnnnnnnnnnnnnnnnnnnnnnnnnnnnnnnnnnnnnnnnnnnnnnnnnnnnnnnnnnnnnnnnnnnnnnnnnnnnnnnnnnnnnnnnnnnnnnnnnnnnnnnnnnnnnnnnnnnnnnnnnnnnnnnnnnnnnnnnnnnnnnnnnnnnnnnnnnnnnnnnnnnnnnnnnnnnnnnnnnnnnnnnnnnnnnnnnnnnnnnnnnnnnnnnnnnnnnnnnnnnnnnnnnnnnnnnnnnnnnnnnnnnnnnnnnnnnnnnnnnnnnnnnnnnnnnnnnnnnnnnnnnnnnnnnnnnnnnnnnnnnnnnnnnnnnnnnnnnnnnnnnnnnnnnnnnnnnnnnnnnnnnnnnnnnnnnnnnnnnnnnnnnnnnnnnnnnnnnnnnnnnnnnnnnnnnnnnnnnnnnnnnnnnnnnnnnnnnnnnnnnnnnnnnnnnnnnnnnnnnnnnnnnnnnnnnnnnnnnnnnnnnnnnnnnnnnnnnnnnnnnnnnnnnnnnnnnnnnnnnnnnnnnnnnnnnnnnnnnnnnnnnnnnnnnnnnnnnnnnnnnnnnnnnnnnnnnnnnnnnnnnnnnnnnnnnnnnnnnnnnnnnnnnnnnnnnnnnnnnnnnnnnnnnnnnnnnnnnnnnnnnnnnnnnnnnnnnnnnnnnnnnnnnnnnnnnnnnnnnnnnnnnnnnnnnnnnnnnnnnnnnnnnnnnnnnnnnnnnnnnnnnnnnnnnnnnnnnnnnnnnnnnnnnnnnnnnnnnnnnnnnnnnnnnnnnnnnnnnnnnnnnnnnnnnnnnnnnnnnnnnnnnnnnnnnnnnnnnnnnnnnnnnnnnnnnnnnnnnnnnnnnnnnnnnnnnnnnnnnnnnnnnnnnnnnnnnnnnnnnnnnnnnnnnnnnnnnnnnnnnnnnnnnnnnnnnnnnnnnnnnnnnnnnnnnnnnnnnnnnnnnnnnnnnnnnnnnnnnnnnnnnnnnnnnnnnnnnnnnnnnnnnnnnnnnnnnnnnnnnnnnnnnnnnnnnnnnnnnnnnnnnnnnnnnnnnnnnnnnnnnnnnnnnnnnnnnnnnnnnnnnnnnnnnnnnnnnnnnnnnnnnnnnnnnnnnnnnnnnnnnnnnnnnnnnnnnnnnnnnnnnnnnnnnnnnnnnnnnnnnnnnnnnnnnnnnnnnnnnnnnnnnnnnnnnnnnnnnnnnnnnnnnnnnnnnnnnnnnnnnnnnnnnnnnnnnnnnnnnnnnnnnnnnnnnnnnnnnnnnnnnnnnnnnnnnnnnnnnnnnnnnnnnnnnnnnnnnnnnnnnnnnnnnnnnnnnnnnnnnnnnnnnnnnnnnnnnnnnnnnnnnnnnnnnnnnnnnnnnnnnnnnnnnnnnnnnnnnnnnnnnnnnnnnnnnnnnnnnnnnnnnnnnnnnnnnnnnnnnnnnnnnnnnnnnnnnnnnnnnnnnnnnnnnnnnnnnnnnnnnnnnnnnnnnnnnnnnnnnnnnnnnnnnnnnnnnnnnnnnnnnnnnnnnnnnnnnnnnnnnnnnnnnnnnnnnnnnnnnnnnnnnnnnnnnnnnnnnnnnnnnnnnnnnnnnnnnnnnnnnnnnnnnnnnnnnnnnnnnnnnnnnnnnnnnnnnnnnnnnnnnnnnnnnnnnnnnnnnnnnnnnnnnnnnnnnnnnnnnnnnnnnnnnnnnnnnnnnnnnnnnnnnnnnnnnnnnnnnnnnnnnnnnnnnnnnnnnnnnnnnnnnnnnnnnnnnnnnnnnnnnnnnnnnnnnnnnnnnnnnnnnnnnnnnnnnnnnnnnnnnnnnnnnnnnnnnnnnnnnnnnnnnnnnnnnnnnnnnnnnnnnnnnnnnnnnnnnnnnnnnnnnnnnnnnnnnnnnnnnnnnnnnnnnnnnnnnnnnnnnnnnnnnnnnnnnnnnnnnnnnnnnnnnnnnnnnnnnnnnnnnnnnnnnnnnnnnnnnnnnnnnnnnnnnnnnnnnnnnnnnnnnnnnnnnnnnnnnnnnnnnnnnnnnnnnnnnnnnnnnnnnnnnnnnnnnnnnnnnnnnnnnnnnnnnnnnnnnnnnnnnnnnnnnnnnnnnnnnnnnnnnnnnnnnnnnnnnnnnnnnnnnnnnnnnnnnnnnnnnnnnnnnnnnnnnnnnnnnnnnnnnnnnnnnnnnnnnnnnnnnnnnnnnnnnnnnnnnnnnnnnnnnnnnnnnnnnnnnnnnnnnnnnnnnnnnnnnnnnnnnnnnnnnnnnnnnnnnnnnnnnnnnnnnnnnnnnnnnnnnnnnnnnnnnnnnnnnnnnnnnnnnnnnnnnnnnnnnnnnnnnnnnnnnnnnnnnnnnnnnnnnnnnnnnnnnnnnnnnnnnnnnnnnnnnnnnnnnnnnnnnnnnnnnnnnnnnnnnnnnnnnnnnnnnnnnnnnnnnnnnnnnnnnnnnnnnnnnnnnnnnnnnnnnnnnnnnnnnnnnnnnnnnnnnnnnnnnnnnnnnnnnnnnnnnnnnnnnnnnnnnnnnnnnnnnnnnnnnnnnnnnnnnnnnnnnnnnnnnnnnnnnnnnnnnnnnnnnnnnnnnnnnnnnnnnnnnnnnnnnnnnnnnnnnnnnnnnnnnnnnnnnnnnnnnnnnnnnnnnnnnnnnnnnnnnnnnnnnnnnnnnnnnnnnnnnnnnnnnnnnnnnnnnnnnnnnnnnnnnnnnnnnnnnnnnnnnnnnnnnnnnnnnnnnnnnnnnnnnnnnnnnnnnnnnnnnnnnnnnnnnnnnnnnnnnnnnnnnnnnnnnnnnnnnnnnnnnnnnnnnnnnnnnnnnnnnnnnnnnnnnnnnnnnnnnnnnnnnnnnnnnnnnnnnnnnnnnnnnnnnnnnnnnnnnnnnnnnnnnnnnnnnnnnnnnnnnnnnnnnnnnnnnnnnnnnnnnnnnnnnnnnnnnnnnnnnnnnnnnnnnnnnnnnnnnnnnnnnnnnnnnnnnnnnnnnnnnnnnnnnnnnnnnnnnnnnnnnnnnnnnnnnnnnnnnnnnnnnnnnnnnnnnnnnnnnnnnnnnnnnnnnnnnnnnnnnnnnnnnnnnnnnnnnnnnnnnnnnnnnnnnnnnnnnnnnnnnnnnnnnnnnnnnnnnnnnnnnnnnnnnnnnnnnnnnnnnnnnnnnnnnnnnnnnnnnnnnnnnnnnnnnnnnnnnnnnnnnnnnnnnnnnnnnnnnnnnnnnnnnnnnnnnnnnnnnnnnnnnnnnnnnnnnnnnnnnnnnnnnnnnnnnnnnnnnnnnnnnnnnnnnnnnnnnnnnnnnnnnnnnnnnnnnnnnnnnnnnnnnnnnnnnnnnnnnnnnnnnnnnnnnnnnnnnnnnnnnnnnnnnnnnnnnnnnnnnnnnnnnnnnnnnnnnnnnnnnnnnnnnnnnnnnnnnnnnnnnnnnnnnnnnnnnnnnnnnnnnnnnnnnnnnnnnnnnnnnnnnnnnnnnnnnnnnnnnnnnnnnnnnnnnnnnnnnnnnnnnnnnnnnnnnnnnnnnnnnnnnnnnnnnnnnnnnnnnnnnnnnnnnnnnnnnnnnnnnnnnnnnnnnnnnnnnnnnnnnnnnnnnnnnnnnnnnnnnnnnnnnnnnnnnnnnnnnnnnnnnnnnnnnnnnnnnnnnnnnnnnnnnnnnnnnnnnnnnnnnnnnnnnnnnnnnnnnnnnnnnnnnnnnnnnnnnnnnnnnnnnnnnnnnnnnnnnnnnnnnnnnnnnnnnnnnnnnnnnnnnnnnnnnnnnnnnnnnnnnnnnnnnnnnnnnnnnnnnnnnnnnnnnnnnnnnnnnnnnnnnnnnnnnnnnnnnnnnnnnnnnnnnnnnnnnnnnnnnnnnnnnnnnnnnnnnnnnnnnnnnnnnnnnnnnnnnnnnnnnnnnnnnnnnnnnnnnnnnnnnnnnnnnnnnnnnnnnnnnnnnnnnnnnnnnnnnnnnnnnnnnnnnnnnnnnnnnnnnnnnnnnnnnnnnnnnnnnnnnnnnnnnnnnnnnnnnnnnnnnnnnnnnnnnnnnnnnnnnnnnnnnnnnnnnnnnnnnnnnnnnnnnnnnnnnnnnnnnnnnnnnnnnnnnnnnnnnnnnnnnnnnnnnnnnnnnnnnnnnnnnnnnnnnnnnnnnnnnnnnnnnnnnnnnnnnnnnnnnnnnnnnnnnnnnnnnnnnnnnnnnnnnnnnnnnnnnnnnnnnnnnnnnnnnnnnnnnnnnnnnnnnnnnnnnnnnnnnnnnnnnnnnnnnnnnnnnnnnnnnnnnnnnnnnnnnnnnnnnnnnnnnnnnnnnnnnnnnnnnnnnnnnnnnnnnnnnnnnnnnnnnnnnnnnnnnnnnnnnnnnnnnnnnnnnnnnnnnnnnnnnnnnnnnnnnnnnnnnnnnnnnnnnnnnnnnnnnnnnnnnnnnnnnnnnnnnnnnnnnnnnnnnnnnnnnnnnnnnnnnnnnnnnnnnnnnnnnnnnnnnnnnnnnnnnnnnnnnnnnnnnnnnnnnnnnnnnnnnnnnnnnnnnnnnnnnnnnnnnnnnnnnnnnnnnnnnnnnnnnnnnnnnnnnnnnnnnnnnnnnnnnnnnnnnnnnnnnnnnnnnnnnnnnnnnnnnnnnnnnnnnnnnnnnnnnnnnnnnnnnnnnnnnnnnnnnnnnnnnnnnnnnnnnnnnnnnnnnnnnnnnnnnnnnnnnnnnnnnnnnnnnnnnnnnnnnnnnnnnnnnnnnnnnnnnnnnnnnnnnnnnnnnnnnnnnnnnnnnnnnnnnnnnnnnnnnnnnnnnnnnnnnnnnnnnnnnnnnnnnnnnnnnnnnnnnnnnnnnnnnnnnnnnnnnnnnnnnnnnnnnnnnnnnnnnnnnnnnnnnnnnnnnnnnnnnnnnnnnnnnnnnnnnnnnnnnnnnnnnnnnnnnnnnnnnnnnnnnnnnnnnnnnnnnnnnnnnnnnnnnnnnnnnnnnnnnnnnnnnnnnnnnnnnnnnnnnnnnnnnnnnnnnnnnnnnnnnnnnnnnnnnnnnnnnnnnnnnnnnnnnnnnnnnnnnnnnnnnnnnnnnnnnnnnnnnnnnnnnnnnnnnnnnnnnnnnnnnnnnnnnnnnnnnnnnnnnnnnnnnnnnnnnnnnnnnnnnnnnnnnnnnnnnnnnnnnnnnnnnnnnnnnnnnnnnnnnnnnnnnnnnnnnnnnnnnnnnnnnnnnnnnnnnnnnnnnnnnnnnnnnnnnnnnnnnnnnnnnnnnnnnnnnnnnnnnnnnnnnnnnnnnnnnnnnnnnnnnnnnnnnnnnnnnnnnnnnnnnnnnnnnnnnnnnnnnnnnnnnnnnnnnnnnnnnnnnnnnnnnnnnnnnnnnnnnnnnnnnnnnnnnnnnnnnnnnnnnnnnnnnnnnnnnnnnnnnnnnnnnnnnnnnnnnnnnnnnnnnnnnnnnnnnnnnnnnnnnnnnnnnnnnnnnnnnnnnnnnnnnnnnnnnnnnnnnnnnnnnnnnnnnnnnnnnnnnnnnnnnnnnnnnnnnnnnnnnnnnnnnnnnnnnnnnnnnnnnnnnnnnnnnnnnnnnnnnnnnnnnnnnnnnnnnnnnnnnnnnnnnnnnnnnnnnnnnnnnnnnnnnnnnnnnnnnnnnnnnnnnnnnnnnnnnnnnnnnnnnnnnnnnnnnnnnnnnnnnnnnnnnnnnnnnnnnnnnnnnnnnnnnnnnnnnnnnnnnnnnnnnnnnnnnnnnnnnnnnnnnnnnnnnnnnnnnnnnnnnnnnnnnnnnnnnnnnnnnnnnnnnnnnnnnnnnnnnnnnnnnnnnnnnnnnnnnnnnnnnnnnnnnnnnnnnnnnnnnnnnnnnnnnnnnnnnnnnnnnnnnnnnnnnnnnnnnnnnnnnnnnnnnnnnnnnnnnnnnnnnnnnnnnnnnnnnnnnnnnnnnnnnnnnnnnnnnnnnnnnnnnnnnnnnnnnnnnnnnnnnnnnnnnnnnnnnnnnnnnnnnnnnnnnnnnnnnnnnnnnnnnnnnnnnnnnnnnnnnnnnnnnnnnnnnnnnnnnnnnnnnnnnnnnnnnnnnnnnnnnnnnnnnnnnnnnnnnnnnnnnnnnnnnnnnnnnnnnnnnnnnnnnnnnnnnnnnnnnnnnnnnnnnnnnnnnnnnnnnnnnnnnnnnnnnnnnnnnnnnnnnnnnnnnnnnnnnnnnnnnnnnnnnnnnnnnnnnnnnnnnnnnnnnnnnnnnnnnnnnnnnnnnnnnnnnnnnnnnnnnnnnnnnnnnnnnnnnnnnnnnnnnnnnnnnnnnnnnnnnnnnnnnnnnnnnnnnnnnnnnnnnnnnnnnnnnnnnnnnnnnnnnnnnnnnnnnnnnnnnnnnnnnnnnnnnnnnnnnnnnnnnnnnnnnnnnnnnnnnnnnnnnnnnnnnnnnnnnnnnnnnnnnnnnnnnnnnnnnnnnnnnnnnnnnnnnnnnnnnnnnnnnnnnnnnnnnnnnnnnnnnnnnnnnnnnnnnnnnnnnnnnnnnnnnnnnnnnnnnnnnnnnnnnnnnnnnnnnnnnnnnnnnnnnnnnnnnnnnnnnnnnnnnnnnnnnnnnnnnnnnnnnnnnnnnnnnnnnnnnnnnnnnnnnnnnnnnnnnnnnnnnnnnnnnnnnnnnnnnnnnnnnnnnnnnnnnnnnnnnnnnnnnnnnnnnnnnnnnnnnnnnnnnnnnnnnnnnnnnnnnnnnnnnnnnnnnnnnnnnnnnnnnnnnnnnnnnnnnnnnnnnnnnnnnnnnnnnnnnnnnnnnnnnnnnnnnnnnnnnnnnnnnnnnnnnnnnnnnnnnnnnnnnnnnnnnnnnnnnnnnnnnnnnnnnnnnnnnnnnnnnnnnnnnnnnnnnnnnnnnnnnnnnnnnnnnnnnnnnnnnnnnnnnnnnnnnnnnnnnnnnnnnnnnnnnnnnnnnnnnnnnnnnnnnnnnnnnnnnnnnnnnnnnnnnnnnnnnnnnnnnnnnnnnnnnnnnnnnnnnnnnnnnnnnnnnnnnnnnnnnnnnnnnnnnnnnnnnnnnnnnnnnnnnnnnnnnnnnnnnnnnnnnnnnnnnnnnnnnnnnnnnnnnnnnnnnnnnnnnnnnnnnnnnnnnnnnnnnnnnnnnnnnnnnnnnnnnnnnnnnnnnnnnnnnnnnnnnnnnnnnnnnnnnnnnnnnnnnnnnnnnnnnnnnnnnnnnnnnnnnnnnnnnnnnnnnnnnnnnnnnnnnnnnnnnnnnnnnnnnnnnnnnnnnnnnnnnnnnnnnnnnnnnnnnnnnnnnnnnnnnnnnnnnnnnnnnnnnnnnnnnnnnnnnnnnnnnnnnnnnnnnnnnnnnnnnnnnnnnnnnnnnnnnnnnnnnnnnnnnnnnnnnnnnnnnnnnnnnnnnnnnnnnnnnnnnnnnnnnnnnnnnnnnnnnnnnnnnnnnnnnnnnnnnnnnnnnnnnnnnnnnnnnnnnnnnnnnnnnnnnnnnnnnnnnnnnnnnnnnnnnnnnnnnnnnnnnnnnnnnnnnnnnnnnnnnnnnnnnnnnnnnnnnnnnnnnnnnnnnnnnnnnnnnnnnnnnnnnnnnnnnnnnnnnnnnnnnnnnnnnnnnnnnnnnnnnnnnnnnnnnnnnnnnnnnnnnnnnnnnnnnnnnnnnnnnnnnnnnnnnnnnnnnnnnnnnnnnnnnnnnnnnnnnnnnnnnnnnnnnnnnnnnnnnnnnnnnnnnnnnnnnnnnnnnnnnnnnnnnnnnnnnnnnnnnnnnnnnnnnnnnnnnnnnnnnnnnnnnnnnnnnnnnnnnnnnnnnnnnnnnnnnnnnnnnnnnnnnnnnnnnnnnnnnnnnnnnnnnnnnnnnnnnnnnnnnnnnnnnnnnnnnnnnnnnnnnnnnnnnnnnnnnnnnnnnnnnnnnnnnnnnnnnnnnnnnnnnnnnnnnnnnnnnnnnnnnnnnnnnnnnnnnnnnnnnnnnnnnnnnnnnnnnnnnnnnnnnnnnnnnnnnnnnnnnnnnnnnnnnnnnnnnnnnnnnnnnnnnnnnnnnnnnnnnnnnnnnnnnnnnnnnnnnnnnnnnnnnnnnnnnnnnnnnnnnnnnnnnnnnnnnnnnnnnnnnnnnnnnnnnnnnnnnnnnnnnnnnnnnnnnnnnnnnnnnnnnnnnnnnnnnnnnnnnnnnnnnnnnnnnnnnnnnnnnnnnnnnnnnnnnnnnnnnnnnnnnnnnnnnnnnnnnnnnnnnnnnnnnnnnnnnnnnnnnnnnnnnnnnnnnnnnnnnnnnnnnnnnnnnnnnnnnnnnnnnnnnnnnnnnnnnnnnnnnnnnnnnnnnnnnnnnnnnnnnnnnnnnnnnnnnnnnnnnnnnnnnnnnnnnnnnnnnnnnnnnnnnnnnnnnnnnnnnnnnnnnnnnnnnnnnnnnnnnnnnnnnnnnnnnnnnnnnnnnnnnnnnnnnnnnnnnnnnnnnnnnnnnnnnnnnnnnnnnnnnnnnnnnnnnnnnnnnnnnnnnnnnnnnnnnnnnnnnnnnnnnnnnnnnnnnnnnnnnnnnnnnnnnnnnnnnnnnnnnnnnnnnnnnnnnnnnnnnnnnnnnnnnnnnnnnnnnnnnnnnnnnnnnnnnnnnnnnnnnnnnnnnnnnnnnnnnnnnnnnnnnnnnnnnnnnnnnnnnnnnnnnnnnnnnnnnnnnnnnnnnnnnnnnnnnnnnnnnnnnnnnnnnnnnnnnnnnnnnnnnnnnnnnnnnnnnnnnnnnnnnnnnnnnnnnnnnnnnnnnnnnnnnnnnnnnnnnnnnnnnnnnnnnnnnnnnnnnnnnnnnnnnnnnnnnnnnnnnnnnnnnnnnnnnnnnnnnnnnnnnnnnnnnnnnnnnnnnnnnnnnnnnnnnnnnnnnnnnnnnnnnnnnnnnnnnnnnnnnnnnnnnnnnnnnnnnnnnnnnnnnnnnnnnnnnnnnnnnnnnnnnnnnnnnnnnnnnnnnnnnnnnnnnnnnnnnnnnnnnnnnnnnnnnnnnnnnnnnnnnnnnnnnnnnnnnnnnnnnnnnnnnnnnnnnnnnnnnnnnnnnnnnnnnnnnnnnnnnnnnnnnnnnnnnnnnnnnnnnnnnnnnnnnnnnnnnnnnnnnnnnnnnnnnnnnnnnnnnnnnnnnnnnnnnnnnnnnnnnnnnnnnnnnnnnnnnnnnnnnnnnnnnnnnnnnnnnnnnnnnnnnnnnnnnnnnnnnnnnnnnnnnnnnnnnnnnnnnnnnnnnnnnnnnnnnnnnnnnnnnnnnnnnnnnnnnnnnnnnnnnnnnnnnnnnnnnnnnnnnnnnnnnnnnnnnnnnnnnnnnnnnnnnnnnnnnnnnnnnnnnnnnnnnnnnnnnnnnnnnnnnnnnnnnnnnnnnnnnnnnnnnnnnnnnnnnnnnnnnnnnnnnnnnnnnnnnnnnnnnnnnnnnnnnnnnnnnnnnnnnnnnnnnnnnnnnnnnnnnnnnnnnnnnnnnnnnnnnnnnnnnnnnnnnnnnnnnnnnnnnnnnnnnnnnnnnnnnnnnnnnnnnnnnnnnnnnnnnnnnnnnnnnnnnnnnnnnnnnnnnnnnnnnnnnnnnnnnnnnnnnnnnnnnnnnnnnnnnnnnnnnnnnnnnnnnnnnnnnnnnnnnnnnnnnnnnnnnnnnnnnnnnnnnnnnnnnnnnnnnnnnnnnnnnnnnnnnnnnnnnnnnnnnnnnnnnnnnnnnnnnnnnnnnnnnnnnnnnnnnnnnnnnnnnnnnnnnnnnnnnnnnnnnnnnnnnnnnnnnnnnnnnnnnnnnnnnnnnnnnnnnnnnnnnnnnnnnnnnnnnnnnnnnnnnnnnnnnnnnnnnnnnnnnnnnnnnnnnnnnnnnnnnnnnnnnnnnnnnnnnnnnnnnnnnnnnnnnnnnnnnnnnnnnnnnnnnnnnnnnnnnnnnnnnnnnnnnnnnnnnnnnnnnnnnnnnnnnnnnnnnnnnnnnnnnnnnnnnnnnnnnnnnnnnnnnnnnnnnnnnnnnnnnnnnnnnnnnnnnnnnnnnnnnnnnnnnnnnnnnnnnnnnnnnnnnnnnnnnnnnnnnnnnnnnnnnnnnnnnnnnnnnnnnnnnnnnnnnnnnnnnnnnnnnnnnnnnnnnnnnnnnnnnnnnnnnnnnnnnnnnnnnnnnnnnnnnnnnnnnnnnnnnnnnnnnnnnnnnnnnnnnnnnnnnnnnnnnnnnnnnnnnnnnnnnnnnnnnnnnnnnnnnnnnnnnnnnnnnnnnnnnnnnnnnnnnnnnnnnnnnnnnnnnnnnnnnnnnnnnnnnnnnnnnnnnnnnnnnnnnnnnnnnnnnnnnnnnnnnnnnnnnnnnnnnnnnnnnnnnnnnnnnnnnnnnnnnnnnnnnnnnnnnnnnnnnnnnnnnnnnnnnnnnnnnnnnnnnnnnnnnnnnnnnnnnnnnnnnnnnnnnnnnnnnnnnnnnnnnnnnnnnnnnnnnnnnnnnnnnnnnnnnnnnnnnnnnnnnnnnnnnnnnnnnnnnnnnnnnnnnnnnnnnnnnnnnnnnnnnnnnnnnnnnnnnnnnnnnnnnnnnnnnnnnnnnnnnnnnnnnnnnnnnnnnnnnnnnnnnnnnnnnnnnnnnnnnnnnnnnnnnnnnnnnnnnnnnnnnnnnnnnnnnnnnnnnnnnnnnnnnnnnnnnnnnnnnnnnnnnnnnnnnnnnnnnnnnnnnnnnnnnnnnnnnnnnnnnnnnnnnnnnnnnnnnnnnnnnnnnnnnnnnnnnnnnnnnnnnnnnnnnnnnnnnnnnnnnnnnnnnnnnnnnnnnnnnnnnnnnnnnnnnnnnnnnnnnnnnnnnnnnnnnnnnnnnnnnnnnnnnnnnnnnnnnnnnnnnnnnnnnnnnnnnnnnnnnnnnnnnnnnnnnnnnnnnnnnnnnnnnnnnnnnnnnnnnnnnnnnnnnnnnnnnnnnnnnnnnnnnnnnnnnnnnnnnnnnnnnnnnnnnnnnnnnnnnnnnnnnnnnnnnnnnnnnnnnnnnnnnnnnnnnnnnnnnnnnnnnnnnnnnnnnnnnnnnnnnnnnnnnnnnnnnnnnnnnnnnnnnnnnnnnnnnnnnnnnnnnnnnnnnnnnnnnnnnnnnnnnnnnnnnnnnnnnnnnnnnnnnnnnnnnnnnnnnnnnnnnnnnnnnnnnnnnnnnnnnnnnnnnnnnnnnnnnnnnnnnnnnnnnnnnnnnnnnnnnnnnnnnnnnnnnnnnnnnnnnnnnnnnnnnnnnnnnnnnnnnnnnnnnnnnnnnnnnnnnnnnnnnnnnnnnnnnnnnnnnnnnnnnnnnnnnnnnnnnnnnnnnnnnnnnnnnnnnnnnnnnnnnnnnnnnnnnnnnnnnnnnnnnnnnnnnnnnnnnnnnnnnnnnnnnnnnnnnnnnnnnnnnnnnnnnnnnnnnnnnnnnnnnnnnnnnnnnnnnnnnnnnnnnnnnnnnnnnnnnnnnnnnnnnnnnnnnnnnnnnnnnnnnnnnnnnnnnnnnnnnnnnnnnnnnnnnnnnnnnnnnnnnnnnnnnnnnnnnnnnnnnnnnnnnnnnnnnnnnnnnnnnnnnnnnnnnnnnnnnnnnnnnnnnnnnnnnnnnnnnnnnnnnnnnnnnnnnnnnnnnnnnnnnnnnnnnnnnnnnnnnnnnnnnnnnnnnnnnnnnnnnnnnnnnnnnnnnnnnnnnnnnnnnnnnnnnnnnnnnnnnnnnnnnnnnnnnnnnnnnnnnnnnnnnnnnnnnnnnnnnnnnnnnnnnnnnnnnnnnnnnnnnnnnnnnnnnnnnnnnnnnnnnnnnnnnnnnnnnnnnnnnnnnnnnnnnnnnnnnnnnnnnnnnnnnnnnnnnnnnnnnnnnnnnnnnnnnnnnnnnnnnnnnnnnnnnnnnnnnnnnnnnnnnnnnnnnnnnnnnnnnnnnnnnnnnnnnnnnnnnnnnnnnnnnnnnnnnnnnnnnnnnnnnnnnnnnnnnnnnnnnnnnnnnnnnnnnnnnnnnnnnnnnnnnnnnnnnnnnnnnnnnnnnnnnnnnnnnnnnnnnnnnnnnnnnnnnnnnnnnnnnnnnnnnnnnnnnnnnnnnnnnnnnnnnnnnnnnnnnnnnnnnnnnnnnnnnnnnnnnnnnnnnnnnnnnnnnnnnnnnnnnnnnnnnnnnnnnnnnnnnnnnnnnnnnnnnnnnnnnnnnnnnnnnnnnnnnnnnnnnnnnnnnnnnnnnnnnnnnnnnnnnnnnnnnnnnnnnnnnnnnnnnnnnnnnnnnnnnnnnnnnnnnnnnnnnnnnnnnnnnnnnnnnnnnnnnnnnnnnnnnnnnnnnnnnnnnnnnnnnnnnnnnnnnnnnnnnnnnnnnnnnnnnnnnnnnnnnnnnnnnnnnnnnnnnnnnnnnnnnnnnnnnnnnnnnnnnnnnnnnnnnnnnnnnnnnnnnnnnnnnnnnnnnnnnnnnnnnnnnnnnnnnnnnnnnnnnnnnnnnnnnnnnnnnnnnnnnnnnnnnnnnnnnnnnnnnnnnnnnnnnnnnnnnnnnnnnnnnnnnnnnnnnnnnnnnnnnnnnnnnnnnnnnnnnnnnnnnnnnnnnnnnnnnnnnnnnnnnnnnnnnnnnnnnnnnnnnnnnnnnnnnnnnnnnnnnnnnnnnnnnnnnnnnnnnnnnnnnnnnnnnnnnnnnnnnnnnnnnnnnnnnnnnnnnnnnnnnnnnnnnnnnnnnnnnnnnnnnnnnnnnnnnnnnnnnnnnnnnnnnnnnnnnnnnnnnnnnnnnnnnnnnnnnnnnnnnnnnnnnnnnnnnnnnnnnnnnnnnnnnnnnnnnnnnnnnnnnnnnnnnnnnnnnnnnnnnnnnnnnnnnnnnnnnnnnnnnnnnnnnnnnnnnnnnnnnnnnnnnnnnnnnnnnnnnnnnnnnnnnnnnnnnnnnnnnnnnnnnnnnnnnnnnnnnnnnnnnnnnnnnnnnnnnnnnnnnnnnnnnnnnnnnnnnnnnnnnnnnnnnnnnnnnnnnnnnnnnnnnnnnnnnnnnnnnnnnnnnnnnnnnnnnnnnnnnnnnnnnnnnnnnnnnnnnnnnnnnnnnnnnnnnnnnnnnnnnnnnnnnnnnnnnnnnnnnnnnnnnnnnnnnnnnnnnnnnnnnnnnnnnnnnnnnnnnnnnnnnnnnnnnnnnnnnnnnnnnnnnnnnnnnnnnnnnnnnnnnnnnnnnnnnnnnnnnnnnnnnnnnnnnnnnnnnnnnnnnnnnnnnnnnnnnnnnnnnnnnnnnnnnnnnnnnnnnnnnnnnnnnnnnnnnnnnnnnnnnnnnnnnnnnnnnnnnnnnnnnnnnnnnnnnnnnnnnnnnnnnnnnnnnnnnnnnnnnnnnnnnnnnnnnnnnnnnnnnnnnnnnnnnnnnnnnnnnnnnnnnnnnnnnnnnnnnnnnnnnnnnnnnnnnnnnnnnnnnnnnnnnnnnnnnnnnnnnnnnnnnnnnnnnnnnnnnnnnnnnnnnnnnnnnnnnnnnnnnnnnnnnnnnnnnnnnnnnnnnnnnnnnnnnnnnnnnnnnnnnnnnnnnnnnnnnnnnnnnnnnnnnnnnnnnnnnnnnnnnnnnnnnnnnnnnnnnnnnnnnnnnnnnnnnnnnnnnnnnnnnnnnnnnnnnnnnnnnnnnnnnnnnnnnnnnnnnnnnnnnnnnnnnnnnnnnnnnnnnnnnnnnnnnnnnnnnnnnnnnnnnnnnnnnnnnnnnnnnnnnnnnnnnnnnnnnnnnnnnnnnnnnnnnnnnnnnnnnnnnnnnnnnnnnnnnnnnnnnnnnnnnnnnnnnnnnnnnnnnnnnnnnnnnnnnnnnnnnnnnnnnnnnnnnnnnnnnnnnnnnnnnnnnnnnnnnnnnnnnnnnnnnnnnnnnnnnnnnnnnnnnnnnnnnnnnnnnnnnnnnnnnnnnnnnnnnnnnnnnnnnnnnnnnnnnnnnnnnnnnnnnnnnnnnnnnnnnnnnnnnnnnnnnnnnnnnnnnnnnnnnnnnnnnnnnnnnnnnnnnnnnnnnnnnnnnnnnnnnnnnnnnnnnnnnnnnnnnnnnnnnnnnnnnnnnnnnnnnnnnnnnnnnnnnnnnnnnnnnnnnnnnnnnnnnnnnnnnnnnnnnnnnnnnnnnnnnnnnnnnnnnnnnnnnnnnnnnnnnnnnnnnnnnnnnnnnnnnnnnnnnnnnnnnnnnnnnnnnnnnnnnnnnnnnnnnnnnnnnnnnnnnnnnnnnnnnnnnnnnnnnnnnnnnnnnnnnnnnnnnnnnnnnnnnnnnnnnnnnnnnnnnnnnnnnnnnnnnnnnnnnnnnnnnnnnnnnnnnnnnnnnnnnnnnnnnnnnnnnnnnnnnnnnnnnnnnnnnnnnnnnnnnnnnnnnnnnnnnnnnnnnnnnnnnnnnnnnnnnnnnnnnnnnnnnnnnnnnnnnnnnnnnnnnnnnnnnnnnnnnnnnnnnnnnnnnnnnnnnnnnnnnnnnnnnnnnnnnnnnnnnnnnnnnnnnnnnnnnnnnnnnnnnnnnnnnnnnnnnnnnnnnnnnnnnnnnnnnnnnnnnnnnnnnnnnnnnnnnnnnnnnnnnnnnnnnnnnnnnnnnnnnnnnnnnnnnnnnnnnnnnnnnnnnnnnnnnnnnnnnnnnnnnnnnnnnnnnnnnnnnnnnnnnnnnnnnnnnnnnnnnnnnnnnnnnnnnnnnnnnnnnnnnnnnnnnnnnnnnnnnnnnnnnnnnnnnnnnnnnnnnnnnnnnnnnnnnnnnnnnnnnnnnnnnnnnnnnnnnnnnnnnnnnnnnnnnnnnnnnnnnnnnnnnnnnnnnnnnnnnnnnnnnnnnnnnnnnnnnnnnnnnnnnnnnnnnnnnnnnnnnnnnnnnnnnnnnnnnnnnnnnnnnnnnnnnnnnnnnnnnnnnnnnnnnnnnnnnnnnnnnnnnnnnnnnnnnnnnnnnnnnnnnnnnnnnnnnnnnnnnnnnnnnnnnnnnnnnnnnnnnnnnnnnnnnnnnnnnnnnnnnnnnnnnnnnnnnnnnnnnnnnnnnnnnnnnnnnnnnnnnnnnnnnnnnnnnnnnnnnnnnnnnnnnnnnnnnnnnnnnnnnnnnnnnnnnnnnnnnnnnnnnnnnnnnnnnnnnnnnnnnnnnnnnnnnnnnnnnnnnnnnnnnnnnnnnnnnnnnnnnnnnnnnnnnnnnnnnnnnnnnnnnnnnnnnnnnnnnnnnnnnnnnnnnnnnnnnnnnnnnnnnnnnnnnntgacctgccctacggacggtgggcgcgggaaccgctaacggctaggctgcctcgtccataggggtcaacggtccggcttcataccgacgctcgtattcggccggactgagatagcccagggcactgtgacgtcgggtcggattatagaacatctcgatgtatttgaacacctccctgcgggcttgttcttccgtggcgtaatcgctgtcgatccactcggtcttgagggacccgaagaagctctccatcatcgcattgtcccacgggtcgcccttgcgtgacatgctcatcgtcagaccctcgcgtgtcaacaaatcgcggaacgcctgcgaggcgtactgaacgccgcggtccgagtgatggaccaggtcgtcttgcggacaacgccgacgcaacgccatctccaacgccgcacagaccagggacgcatcgatggtccggctcaggctccagcccacgatccgccgcgagaagcaatccaggaccaccgccaggtacagccagccctcgaccagacgaatatacgtgatatccgccagccacttctgattcggacgcgtggcggcgaagtcgcgttgcagccgattcgtcgcgatcggctcgtcgtgattcgagtcggtcgtcttgacgaaacgccgtttatgccggccacgaaggcccagatcgcccatcacgtgacgaacggtctcccggcagcaggcgatctggtggtcttcgatcaggtcgcggtgcacccgccggtaaccataggtcccgtgcgaatcgccgtgagagcgttgggcggcccgggcaatctcctgccgccgctgcgccctcgccgacggcggacgccgacaccaggcataatagccgctccgcgagacctgcaagacccggcacaggaggttcagcggatagcagtcccgttgggtgtggatccaggcgtacctcacagggactccttggcgaagtacgccgccgctttttttaagatttcgttctccagacgcagttgggccaattcccgccgggccgctttgagttcttcggccaacgggaccatctgccctttgggcggcaggtggccgttagcgcggaaggccttgacccagcaccgcagggcccagtcgctgacgcccagttgctgcgaggcctggtggtaggtggtcccgccctcgacgatgagcttggcggcctggagccggaactcctcactgtagcgtttcggtcgtgtactcttgtctgccatagatagttcctttcgtgtctatggcagcccagtctatcaagctcgccccgcgcccaccatccgtagggcaggtcaacgctcgcgtttgctgcgggctgggcaacacctctaacggaaagtcaggcgttcgccaaacgcgtggagcaacatctcaagaacctggggcataatgcaaaggattccaagacaaagaaggaggtgaaagccgcgtggatcatcctcaactgcagactggccgagttgcagaaggcatgcagtgacaaactgcgaggaacacttgacgcaggcttaccaagagaacaactcgcggaatcgatagcgaacgcccttgatgatgtcttgaagacaaacgagaagatgttccaggacctcgttaagaagccgaacaaaaaggaagaagcggcaatcggacaagaagacctccggcagaagaagttctggggatcggatccccagcttctggtgtcgaagaatgaggcgcttgcgcttccccgcttggaagccgatgccgaagcgcacgccaggttctggaggtcggcgtttcgtgccgccgcaggaaagcagggacgcaagcgcattgcgataggccccgtggtcaaccagtttgtgtatcaagacgcaacgacgctttccattcccgatacgtctgccgagtcacaggtgcgtctttcaggcgatgttggcgacgaattgctagacctgttgaagcagctcacaccgaatcataaacgcgagcatcctgaaatccgcgctgccttggcgttgctcgcaccagaaacagaagaccgaatccgcgccatcttggacaaaagcaatgtcgcgggcgatgacagggacttcctccgctcaacgttcaagccggtcgtacagaagatcattgcgtccactgctcgcggttcttcgtttcagcgccgcgtggcgatgaccgaggcgtacgccgaacttgagaagctcatcaacaagaagacaagagcaaggaagtcaggcgcgtgtcgcaagaagggagctacgctatgaccccgaccattgaattcatcaacagactggagaatctcaaagaaggcgatcgttctcgcctgcgttggctggcgggccagccgctggacaagacgctttcgggatttgatctgttcaccggcctgtggtggccgctgcgtgcgacaaatgcgcgaactccgcggcgtgaaatctcatggctcatcgccaagctgtattgtgcatcctcggttccgtatgttcggcctgaatcggatgttggggtatcactcccggcggtgcttggcagatgcgaaccgtgcgatccgccggattaccgcgcccgcaatacctttcgccggcgattcgacgccgtgatttgctcaagcctttctgacatcgaaccacgactacagtggggcttgcgcgaggttgccaaggcagttgcgggtcgtgtggtccacgcggagactgtgaccggcatcgactgggcgctgctgctcgacgacctgtcgctctgggacagggagttcaacatggacgacacatggcagaagagccggttgaatgctcaccaacggctcgctcgttgccgtgaaactcaccgcacgccgcaggacctgtgggcgtgcgagtacctgaacgcaactgttcaaccacaaggaggcgactatgctgattgaaatccacatgattcagaaccacagtccgtcgaacctcaaccgggacgatctgggtgcccccaagacgtgcatcttcggcggcgtcacccgcgcgcgcatttccagccaatgcctcaaacgaagcatccgacgcagcccggaattcgcagcggcactggagaaagacggcggggttcgcacgcgccgactgattgaggagattgcgaaagcggccggccgtgatggcaacgagcccaaagaagaacacctcaaagccgtccgggaagtcttcaaagagggcggtgtcggcctgaaggatgagaacacttttgacatcctcttcttcctgcctcgatcagccatcaaagaaatgggggtcgccgtgagcgccggtaacggtgatttaggtaagaagttcgccgaagtcatcggcaagttcgtcaagacgccggacatcgccttgtgcggacgcatgacggagtttgatgcgaagggcccgttcgaaggtctgaagggcaaatttaccgtcgaagctgcactgtccgcagcacacgccatctccactcacgcggtcgtaaacgaggtggattacttcacggcagcagacgacattcccggccaggacgcgggggcgggacacgtcagcgaggcgatgttcaattcggcctgcttctacaagcatttctgcatcgactgggagcagctgctcaagaatcttggcggcgatgtggagcttgccacgacgaccgtcaggtgcttcctcgaaggcgccgcaaaggcgaacccctctggaaagcaacacgcatacggcgcgttcaactaccctgacggcatcttggttgaggtcaaggccgagaccgccacccctgtaagttatgcaaatgcctttgccgacccggttccggagaagtctgtgcgaggtctgatcggcgagagcatcgcgcgccttggccagtatgcacatgatctcatcgacggctatgccctctcggctgaacgcttctggttttccccgagctcacgccatcgcctgacatggatcgacaaaagcaagagggagcctgagcaagagcagtccgttgtggacgagaagaaggaattcggaaagttcccggacttcgtgaccgctatcatggaggaggtcggcaaaagaagcacggcgccggcgggagggagactatgacagactctcggacgatcttcctgcgtttcgaaggcccgctccaggcgtggggtgatacatccaagtttgtgattcgtcgaagcatggactcgccgacgaaatcgggtgtgctggggctgatttgctgcgccatgggtttatcgcgaccgggggcgcgcgagaagcttccagccttgaacacgcttacgatgggtgtacggatcgaccggcccggcgctcgctggtgggactatcacaccgttggggcgggtattggcttgacgacagcggcaggtgggctcaagaccggtgcgcagggtacggtcatcaaacgactggaatatctggctgatgccagttttctggtcgctttgcagggcgatgcgatattgatcgccacggtcgcagaagcgttgcgatccccgaagtggccgttgtacctcggtcgcaagtcgtgtccaccgtccatgccggtattcgcccagccgcgcaaggatgagacatggaccaacccaatggcggtcgatggtgatatcgaggctgcgctccagataatgccgtggcatccgcgatatgccgacgatgccccgcgcgatcagcatgggaaacgctacgagaacattgagttgccctgcctgatcgagtggcgcagaagaaatgacaaggatacagctccgcctgacgccgaggtctggtacgacacacccttttcgttcgacccgccggtgcatcatccgcgattggtaagacgaggtcaggtcacggtcacggtcggcgatgcgctccagcagcatacgccgccaccacctcgtccccgcgcggactacaataacgaccagtacaagaagcatcgtgctgagcgtctacaatccgatcagggcctctgcgtcttctgcaagtcgccggccacgactgtccagcacgtgacctatcgccgcgccgggggcaatgaggcacaggaagacctgcggtctctctgccggctctgccacgatgccgtgaccatgatcgagtacggcatgggcatgggcctggaccggattgacccgtgcgacgtgcggtggcgcgatgacattctccggacccgcgccgacattatccgtttccgcagcgaggaaacccggcggcgagcactgcgcagtgctcccgagaagattcgccgcgaggctttggaagaagaggatatctgaatcatgtaccactcccacctgctcatcaatgttggtgacaaccctgaccgcccggattggagcatcacccggcgctggctgcgaaatctgtatcgagttcaccagcgcttgtgtatggcctttccgtcgaaggtcccggtgtcacataaggaacgccttgcagcgtactgcgcaccctacagcggcacaggactggaccatctgcgtaacttgcccggggagccggatacagcggacgtgcaccattcccgtagcgatcaggccggattcctcttccgcatcgattaccctgtcgatcacagccggggcgtccgacgacccctcatcatcgtccagtcggcggggaacgagccgccggattggcactatgccttcgggttgaatgaagatgccgtggatgatggcggacgcccgattggcaatgccggattcttgttggccgcgccaccacagaccagaaggatcaccatgagccttgagaatgacgatgtgtttgtaattggcagcccaaaggagaatcatcgaatcgctcccggcgatctggtgcgtttccgcctgcgcgccaatccaacgcggaaagtgcaggacggatcgccgaacggcagccgcaaacgcatttgcccgacgctggtcgatcacgccgactggttgaaaggcaagttgggagatgcggcggattccccggtctgtttggagaacttcgtcaccggttgggcttacggatggcgttcaaagcacgaaccgcagcccagccagcgcatgcagtggtggtccgtactgtttgaggggagcttccgggtaggtaatctgaaggtgctgaagcagttgctcgaatgcggaatcggtccagccaaggcgttcggtttcgggctcttgtccatcgcgccggtcaggtagagtttcccggtcgaatagccgatgggtgtaatgcggatggcgtatctgcccatcgaatcgcgatctttgctgtccagtacgaagggattctggaaatgacggatacgcagaagttttttcagacgctctgctctggcattggcccggccaagggactggggatgggtctgctaagcattgcccgcgcttaggagaacctatggctgatctgcacgaactgccgaagttcgaggaccgctggacgcacctctacctggagcgcggcggcctggacaaggacaaagaaggcctggtctttcgtcagggcgaaggacgaacgctcattccgatagaccagttgtccctggtcatgctggggccgggcacgtcgatcacccagcaagcagccaaggcgctggcggccaacaactgcctgatgtgcttcgtcggtgaggagggcgtcaagatgtacgccttcggcacgggaggaacgcacagcgcccaccgactgctccggcaggccgaattgtatgcctctccgcagcagcgggaactcgtcgcacgccggatgtacctgaagcgattcccgtctccagtctcggcggatgtgaccatccagcagctcagggggatggaaggggcgcgggtccgcaagacctacgagcaaatggcggcaacctgcggcgtgaagtgggaagggcgcgactacgatcagagcagttggtacaccgccgacccgctgaatcgggcgctgtcgtctgccaattcttgcctctacagcttgtgccacgccgcgattctgtccgccggttacagccccgccatcggcttcatccacacaggcaaggtgctgagcttcgtctacgatgtggccgacctgtacaagacggagatcacgattccgctggcgttccagaccgtatccggctccaaggacgacgttgaaagacgaacccgactggcctgtcgagacatgttcaaacaggccaagctgatacggcgtatcttgcctgatattgcggaggtgctcgatgctcgtgatgatgttggagaacgtgccgatgagcttgaggggcgagctatctcgctggctgatcgagcccaaggctggggttttccttggaagtccgacggccagaatacgggataagctgtggcagaacgccctgaagaagcgcaagggcggctacgtccttcagatatggtctgattccagcccgcagggctacagcttccggtccgaaggcgaatcgtctcgccaactgcaagacttcgagggcattgccttggtggcttacaaagacaagcgtaggccgagccaggtatcaacatcttgaggtctgcccagtcccggcatacaatgccgtggtattgtccccacgcacgtgggggtgaaccgatatggcaatacttcttttaatgcagacacagattgtccccacgcacgtgggggtgaaccggcactgcaagcgatgtacacacggcgactgctattgtccccacgcacgtgggggtgaaccgtccacgactgttattacccgcccgatccacagattgtccccacgcacgtgggggtgaaccgacggtttctctgcctgtgggtgctccgtatctattgtccccacgcacgtgggggtgaaccgcgtgctgagtgtgctggatgggagttttcggtcattgtccccacgcacgtgggggtgaaccggtgtgggccgggcggccataaggggagatttgattgtccccacgcacgtgggggtgaaccgctcagccagcttctccaagcaatcaccacaaaattctccccacgcacgtgggggtgaaccggtgatcccggccgacgagaacgtcgcacacggattgtccccacgcacgtgggggtgaaccgaccgccgccgccgtgctcccggcggcgagacattgtccccacgcacgtgggggtgaaccgccagatgaacatggactgggagggctccgcggattgtccccacgcacgtgggggtgaaccggggagttgttcgtatcctcgcacagccgcaattcgacttcccactcggcctgcgtaaagcccgtcactccattctgcatgtcctcgaacggcacgtcgacacacaggttgcctctggatgctgtgagggatgaggattccctcatccggggcaatttggccatctgatctccgtggggcagcatttgtcaagacaccccgcgtcgtaggggacccgtccaccatacgccgctgggcgtcagcccgcctccgggccaaacggacggaatcaccacaggtcccggaccaagtatcggggcttctgcgtcagctcgatctcggccgccaccttcgccttgaagtgctcatcgtactcatcggtccgcagatcgagcacccaggtgctcacaaacatcacgctggcgagcaggtcctggcagccttgttcgacttcgagttccaggtggtcgatgtgctctccctgcggcggggacgccacccctttcagcccgcccgccagcaggaatagatcccgcccttcccccacgagcggctggcggcgccctttggccgccatcaatgcctccgctctgtccttgtcgaaactgacctcacgcatgaagccaccatcctttcgccggcgtcctggcccgaccgccgcctgtgaatcctaccttgccttgcccttcgcagaaccaacccgccccgtgcgaaacataccgtaccgcatgggacccgctccacagaggcccacagagctcgccacgggccttctgggcgttccaattcacagagacggcccttgggtcgggtccgggccagatcgtggctaattccgtcgcgaatcgcacacgtattcgagttggggcgacgctgtgagtcgtctcgacggccgtgggcgtcttgcgccccgtcagtctgtaggcgaacaaggggcagcccgtgtcggtgcagtcccgaaccgcgttcgccacgtaagccatgcactccagacacaacgaccggatggcagcactttggctgcgtccggtcatggccagccggtagagcctctgaaaacgtcttggcacatctctgtccgtcatgctgttggatctccttcggccgttccgtcaaaaggggccgatgccccatgtccgtcgtctttgctgatgtcactggctctcgtcggcggcatcgccggcctgattccacatctcgggcggccggacgtaccactgggggcgtttccctccctggcgccggacccggctaatcatgcctgcttcgctcagctttcgaagatggcgtttgatggcctttgtgcgtagcatcccttgctccggtggtgcgcagagccgagccagcctcatgatcggcgcttcacacggttgtcttccgccgtccgtccattcacagagccagccaaacacccgcagtgccccgattccgacgcatcggctggcggcctcgcgccacgccggcggaatcagaagctccgcgcgtgggaaggcccccggtctttggtcgggttggcttctgctcgcggcagcgtcctcgtggggcttggacgggggctcgggtacaggcctgtccagcgcagggtttcgcctgattctcgtagggaagctcaaacgccagtcttggccgctcggcttgtacacatcttcccggcgcccgtagtagcccttccggtaggtcgtcacacgagcatcgaactccacgcagtccccctggtgcagcacgcccagggcccggaaccccttcgtctccgtgaaccagagatgatcggtcacacggacgcccccatccacagggcacacctcacgaaacaaaagcgtcttgaggggcgctcctcgataggcactcttctggccataccgctcgaagatggcacggaacctcattcgttgaccgtccagattcttccattcgtctcttggcatgttggctcctctctgaggcccgatctcgggccgttcgtcaaccacagcgattcacaaaccgtccgcgcattaccagatccgcaccgcaagagcgagagatagtactgtggggccgggggtgccgggggggctccccccggtggggtccgggccgcaatcgtgaagcccgttgccgggccgggaccgaaacacgacaaaacgtgttgtcttttcccgttgcctcctcgcgcgcccgggcgcgagacttcttggctccgagagccagggaacggcacatccccgggataccttcttactcgcccgtcagtgcctccgccgccatccatgccccgagcatcatcctgctttcctcgtccagctccgcagcgccctgcttggccgcctccatcagggcctcgtggtacttgtcgagcacagcattgagcaagtccgggtcgccgtggtcgccgtccgacagggcccaggacaggctcacggccagcatcgtctccagcggccgctgctccagccacgtcgcgatcaggtctttcggctgcctctgcggggtcatcgtgtctcgttcactttccatcgctcagcctccgtcaaaaggggttccgcgccgccggctgctcgcacgagaggcccggccggcacagggttacgttctatgcaggcgcctcaggggtcggcctgtggctcctgaccaggtgcaggatcttccgcttcacatcctccggcaggtccggccaggccgccacgatctgagccaagtcggggtcacccgacgcaatctcgcgcaccaaatgcgcacctattctgtgttcgggagtatcatttcgctgttcgggaagtgcaagagtctgtccctcgaaatccccttcaaatggctttcggtcgcattctgtgcaggaattggagcggtcctgtggtgattctgttaccccacgaatcgggttcaaatcctgtctccccgatttcccctcttgttctgccgcttgccgcattcgatctcgtcgcaggggccagcggcagcttgccgatgggtcccacgtccaagtactcagaccagagccgtttatggaacttgcctcggccctggggcgacggtatagttagaggtcctcgcggctgctccgtgggagctatgtatgtaagtgggctcgccgcgcgggccgtgagagtgcggcgccgcctgggcgcgttggaacatggatgggaagaagggttctgggcaaggaaagctgtggtagattcgggtgcggcaagtctggactacgagcaatttgaagaacgcggattgcgtcttgtcctaaaggggacgttgaacgccgccgacgcacagcggttctggccccaggttatgcagaaggtggcgcagtgtgacccttccgccatcgaagtcgatgccggaggtgtggaaagcttggatacggcgggcatggcccttctgctcgaattgaaggctggacaggagcagcggcagcgaggttttcggattcagggcctgcgggacgatctgaccgaactgatgaggcggttcgatccgggcccgcccgcgccgcctaagccagcgccgccgtggctggtccgcgcgatccatcgtgtcggtgagatctcgcatggatcccttgtgggctttcacacgcaggtcgctttcctgggggagattttcgtccgcctgctgagtgttctggttcgcccgcgtcgtctgcgctgggccgatacattcctgatcgccgagaaggcgggagccaatgcggtcggaatcgtcgcattgatgggttttctgatcgggctgatcctggcctttcagtcggccatcggtatgcgcaagttcggcgccgagatctacgtggccgacctcgttgtgctggtgctgtttcgcgagctgggacctttaatcactgcgttcatcctgaccagccgcagcggatcagcctttgcggccgaattgggcacgatgaaggtcaacgaggaggtcgatgcgctggtgacgatgggcgtggaccccgttcagttcctggccttgccccggctggttgccgcgatctgcgtgatgccgctgctgacactgttcaacgagctgttcggtctgatcggctgcgggctggtcatgcgatcgttcggtttccctgtggcggcttacatcgaccagattcaggaggccgccagcctgggcgacctgttcggcgggctggtcaagacctttgtattcggcgctctgatcgccggcattgggtgtctgcgcggtttgcagacgggcaacagccccagcgccgtcggcgattcggcgacccgcgccgtcgtcagcggcatcgtcgccatcgtggttgctgacggcgtgttcgccgtgctgtactactacttgggggtatgacgatggggtccgacgcaccgccgatcattcaggtcagcgacgtgaccgtgggctacgatcatcacatcgtcctgaaggacgtgaccttcgaggtgggcgccggcgaggtcttctgtatcctgggcggttccggctgcggcaagagcacgctgctcaagcacatgatcggactgcatcggccgctgacggggcgcatcctcatcgacgggaccgatatcgtcaccgccgaaggcgaggagcggcgtgcgctgctgggccggatcggtgtggcgtaccagaacggcgcgctgttcggctccatgagcctgatcgagaacatctgcctggtcctggaagagttcacgagcctgccgcgacaggccatgcagacgatcgcccggatgaagatgaaggtggtcgggcttcaggacgccggcgatcgactgccctccgaactcagcggcggcatgcgcaagagggcggccattgcgcgggcgctggccctggacccgaagattctgtttctggacgaaccttcggccggactggacccgatcactgcggcgcagctcgacgacctgattgtcgaactgtcgcagaccctgaagatcacgttcgttatcgtgacgcatgagctggcgagcatcttcgcggtcgccgaccatgtaatcatgctcgacaaggaacggcagacgatcgttgccaggggctcgcccgaagagcttcgtgaccgcagcgacgatccgtgggtgcggcagttcttccatcgagagtcgtcggctgcaggaatcaggaggtaggcatgtttggaaccggtcaacagagagattgggacggatcggcctgatgggaaggaaaccaagctacttcaagatcggcgtctttgtgattctcgcaacggccttgctgctgacggccgtgatcctgttcggttccggcgtgtttgcgaaggacaagctgagattcgagacctatttcgacgagtccatcacagggctgacggtcgggtcaccggtagagtttcgtggtgtgcgcatcggtcaggtcgagaccatcacattcgccggcagtgtgtatgcgatcccgccggacagcggacgattgtccgtcttccagcctatcgtccgcgtcgtctacgcggtgccgcgagagacgatgcccgaactcggcgtcgaaaaggccggtgccatgcttcaaaagatgattgctcgcggcctgcgcgttcgcgtcaattcgaatatcctgacgggccagggctacctggaggccgactatctcgatccgaatcgcttcccgatcctcgaggtgccgtggacgccggtgtacacctacatgccgtcggcgcccagtgagatcacgacgttgaaagactcgctcgaaaagattttcacccggctggaggagattgatttcgaagggctggtggattctttcgagcggaccctggtggccgccgagagggcggtgggggatgcgaatctggcccggatcagcgaggaagccacgagcctgctggcggaaacacgggagaaggtccaggccctcgacgtagcgggcatcaacgacgcgacgcagcgtttgctggcctcgctggagcggaccgtcgcggatgccaacgtgccggaactgagcgccgaactgacgcggtttgttcaggaaatccgcatcacgaacgacggccttcggcgtctgctggcgtcgccgacggggaccgcgggcgggtccaaccttccggaggttgtcgcgcggctgaaccgggtgctgtcgagcatcgaccggctggtgacgaccgagaaaccagagattgaaatcatcatcggcaatttccgggagatttccgacaatctgcgcgacctgaccgacagtctcagggagcgtccttcggagctgatcttcagcaaacccccacgtgaatcggaggcatacaaatgatatgtaaggggacccggccggccctgtttctggccctgaccatgttcgcgcttgtcctgacgggttgcgcgaggccgcagtcggccaacagccgcttctacttgcttcagacgtctcgctcgttgtccccggccgttcgcgaaggcaaggctgttctggcggttccacggttcaccatcgatgcggcgtacgccggcagggggctggtctaccggctcgacgaacatcgatacgaatccgacgcttacaacgagtttcttgtttcaccgaccgtgatgatcacggagaggacacgcgactggttgacccagtcgggtctgttcgcgcaggttctcggctcgggcagcggcgccgagcccacgcatcgaatcgaagccaatattgccgctctctacggtgactttcgcgacaggcgcgcgccgaaggcggtcatggagattcgtttcttcctgctgcggaccgaaagcggcgtagacccggagatcatcctggccaagtcctacgccgcgacggccgacgtggcgaccgccgggccggaagggctggtcgccggtctcgaccgctgccttcagacgatcctgacccagttggagaacgatttggccggtgccgtctgacgctgaaccgttcgaatcagagtcgcacgatctgacaggcgatgtcacttcgcaccaccggcacggcgacactcaatcggtcctggtcgtgtcgaacgcggtgcgtcttgatgcaagtgccctgacttgtatcccaccactgaacggcgtactcgcccggcgaaaagtctgggatttcgagggtcgcaccttcgatctcttgaggtgtctgccccgcgacgaccttccaccacgtggcgtcccggctggacagccacagataggtgcgatccgttccctgatagcccagcacgcgtagacgcgcgtcggacacagttgcgcctgtcgctctcaatccctcgaaggagatgtcccgcaggtatgccgccagcggccgatagtgacggtaggcgtcctgctggtccaattgctcccaccaccagaacatggccgtgcccgacggtccggcgaaggtcgacgcccagagagcattatggaagtgcacgccatcggtgtcttgtctcatgtgctcgctcaggccccacttgtcggtggccaggccgaactcgccgatcagcgccggtttgttcggcgcgtgctctcgcagaaaggccgccttttcgaggatggcctggacttcgtctttgaagtctgcttcgccagggcgcaagtagtggtgcagttgggcgacgtcgagggctgcgaggccacagtcgcgcgccgacggatgccatgtgctggtggtccgcaggtggcggtagatgtcgatttcgtcgaggtagccgcccacctcctcatagaagtggtccgttggcttgcccgggtcgatctcgttgaagtactcccacgcgccgacgctggtcgagtagccccaccgggcgacggcatagcgcatgaactttctggcatccgcgatggctcggtcgtaaggcacattgttcggattgccaagctcattcatgtaaagatcccgcgtcagcaggcaaagcatcagatagatgccgtgtttctcggcggcctggacgatctgatcgaccatgaagcagtcgagcggattgtagtaaccccgcacgggacgattgacatccgcttcccatagcagctccgcgctgtcgtcgctttccttcagcgacagaccggtcagccacgcagtgccttcgcccgaaagtgcaactgtggtgtggcccagccagtactcatcggggccggtggtgaattcttctgcgaagtcctgccaggtggcggtgtgtgccggcacccgccaatcgtgtctgccgacctggattcgcaaaccgtccgctccgtcggccttgaaccttccgcggagtgtgtaccgcgtgtccggccgcagcgccacccggtgcgagggcgaaacctcgatcgaagcgccgtcctggccctgcagttgtacgcacttgccctcggcttcaggcaggggaaccacgggcgattgccggttccatgaacgggtccacgcgctcttgggagcctcgacggcgagggcccagtcatggcaacacgtccaaatgcgcgcgaagttcgcgccgtttcgcgccatctccgcgaagatcgcctcggccttcgggacgttgacatactggctctcgccgatgaaggcgaggttctggccgatggcgaagaagggctggccttcggcgaattcgagaaacctcgggtcctcgcggccgacgcgcaaaaatcccttatttgtggaagggacgcactcgatccggatggtctgcgacagcgattggccctcacggtcgttcaggcgagcccggatcgtgtatgtccccgtctccgtgggtgcgaaccgtgctttccacgtcccttgaccgatcgggtagcaccaggccacggttttgccatcgctggggaaatctcgccgttggtaatcctggccgaaaaaggccggcagaacgagcgcccgcccgctcgggcaatcgatcagcagatcgatcgcaacctcacatgggtcgaagggattgtcgtacgtccgctccggcgtcagtgtcagttcgagcttgtcatacttgccgacatgggccggacaaggcccgatggcgaccagccgcggtgcggcaaggaggctgccggacgccgccagacagcccgcgaacacgtgggtaaaaaccatcctgcatcgcatgcgatgttctccttatgacctgaccattcacgaggcacagcctaccatgccgcgtccgtgcgaggaagcgcccttgcatttgcccggcgaaggccgcatactcagcgtgcggggttcggaggggatggcacgcaggcggcaagccccgattggggcgacggaggtttgcactatggcagatcgattgacaacgcggcggacgtttcttgcggatgcggttctggcgacaggggcgatcgcactttcgccggctcaagttcgtccggcggcgggctccgagggtgagcggatgcacgtcgcctgcaactcgtactcctggaccgtgttctatcagcgtcaagggcgcaatttcgaccagtcgctcgatgaaggtctggccgaggtggctgccagcggtcttgacgggtttgagccgtcgttcggcgacgtcgcacaggtcgagcgtctggcgcctctgctgaagaagcaccgcctcgggatgcggtctttttacgtcaacagcctgctgcatgaggccggccgggccgatgagagcatccggcagatcctcacgattgctccgagggcccgggacgctggagcgcggatcgtcgtgaccaaccccaatccgctcgcctggggcggcgcgcaggacaagaacgacgaacagctcaaggtccaggcggccgcactgaaccggctcggggccgaactgcggaagctcggcctgacgctggcctaccacaatcacaacatggaactgcggcaggccgcacgcgagttccaccacatgatgctcggcaccgatccggccgatgtgacactctgcctcgacgcccactgggtctatcgcggcgcgggcaactcgcaggtcgccctgttcgacatcgtcaagctctacggcaagcgcatccgcgagctgcacctgcggcagtcccagggcggcgtctggaccgagacatttggcgagggcgatatcgattaccgcgccctggccgatgccctgcgccaggagggcgttcgcccgcacatcgtcctggaacaggcgatcgaaaacggctcgcccaacaccatgccgcccctggaagcgttcaccagaagcaccgagtacgtccgccggctctttgcgggcctgggcgaaaaagcttgaacccagacgcacgttccgataaaatggccgcagtgaatcaaggttcgaaggccggccggaattgaccatcatatccgtgcttgtcgctatcatattattgtcgcatatcatcgcaccggcaccttcggagaccttgcggagatagctcagcgtggcttgagggattttcggggcacgggcggcggttccacaaactatggcggcgaacgatgattcgcccgcactatcagccaaaggtacgccccctgtctggtcgaagagaaggcaggtgctggatttacggttattatccattcattcatcccaatctaaggagcggcacaatggcacggagaatcaggtttgcagggtttctggtcctggggctggtggcggcagtcgcccgggcggggaccgtcgatgtgatgatggtcgtccccaagacgttgtacagtggcgcctcgacctcggcgacgatcacggtggtcagcgcacgccagtcgtcggcagggatcggcgtgagtctgcgcctcaaggcccatgaagggaacgtagacctcgccgccgggcagaccgatgaggcagggcggttcgtcgcccgattcgacacgcccaacttggcggatggctcctatatcctggaggcacacgtcgatggcgccgaggagactctgacaactcagatcatgatccggcggatgcccgtggtgttgatcgaaacggacaagccaatctacaagccgggccagacgatccagggccgcgtgctggtgctgacgaacgagcttcgtccgagcgcctccgacgtgaccgtgcagatcaccgacggcaagggcgtcaaaatcttccgcaaggacctcacgacgaacgccttcggtgtcgcgccgttcaacctcgatctggccagcgagctgaactacggcacgtggaagatcaccgccgaatcgggggccggccggggaaccatcgacctgcgagtcgaggagtacgtgctgccgcgattcgaggtcaagctcgacacgccacgggattacttccgcaccgacgagagaatccccgggaccgtcacggcgacgtatttcttcggcaagcccgtcgacggcgaggttcagatcagcgccagtcgctacgtcggtgtctgggaggaatacgctcgctacacggcgccgctgacggaagggcgggcggagttctcgctgcccgaggtcaagtacgtcagcgggaccacgggagccggcggtgcgggcagcgtgcagctcgacgtgaccgtcaccgacacgtcggatcaccaggagaagacgaccaagctgctgaagatcgtctcgtcgggaatcgagcaccggctgatcgcctcgtctcggtcgttcacgcccgcgcaatcgtatgacgttttggtggtggccgagacgcccgacggtgtgcccgtctccgtgacaggacagttgatcggcgagtactacgccgaatcgggtgagatgatctccaaggaggcccattcgctggcgttcgaaggctcgacctcgatcaccctgagggcgccgcagaaggcttcctgggccacactgaagagcgaggttcgaggcgatggcgaaagcgggcaggcggagttgtacgtctatgcgacatactcgcccagcgacagcttccttcatctgagtcgcgaatccaccggcgccgtcggcatgggtgacacagtcacgatcgatgtgtttcgcacgcacgatgcaaccatctactacgatgtctttgcgaacggccataccgtctggtcggacgcggtgaccggctcggcgatccggttccaggcgacgcagcagatggtgccggccgcccgggtggtggcgtacgtgatcaacccgaacaacgagatttccgccgccacgatcgagttcgaggtgacgatggaccacgcagccagcctggccctgggagtcagtgccgaagaggtcgggccgggtgagccggttcgcgtctcggttcgttcggagggtcagtcgatggtcggcctggccatcgtcgacgagtcggtctatgcgctgaacgaaggccggctcaacatgcaggaggtgttcggcgagctggaacagcggttcatggagccgcaggcggaaacgcacgaccagccgtacagctatggcgcccgcaacatatttgaggacgccgggcttgccgtggtgacttcgcgcgggctggatgttcccgagggccggcgaatcaacgggctgtggtggattggtccggtcgtccgaaggggtggcgccgacgatgttgccgagaacgccggcaaaggagatgggttggcggaggtcgatcgggtccgccagttcttccctgagacgtgggtgtggatgccggatctgctcaccgagcccaatgggaccgcgatgctggacctgacggcgccggacagcatcacgacgtggcggcttcatgcggtgtccacgagcgacaacgggcttggcgtgacggagtcgtcagtccgcgtgttccaggagttctttggcgagcccgatctgccgtatgcggtgacgcggggcgagcaattcccggtccgggtccaggtgttcaactacctcgacgaacctcaggtggtctatgtggagatggcggacgccgactggttcaacctgctcgacatcagcgaacagcaggtgcaggtaaatgcaaattccgtgtcgtctgtttcgtttgtcattgagccgacgaagctcggacatcatccgctggaggtccgtctgcgttcggtccggcgggccgatgccgtgcgcaaggaagtgctcgtggagccggaaggcacccggcgtgagctggtcaccaacggcgcgatccgagcgggcgagacggtggtcctcgacgcgaatacgccggaattcgccgtgcccgattcgcagaagattctcctgagcatcacgcccagcctggttgcccagagcatcaacggtgtggatgacctgctcggaatgccctacggctgcggcgagcagaacatgatcttcttcgccccggacgtggagattctgcgctatctcaacgcgaccggccagctcacgcccgaggtgcgggccaaggccgagcacttcatcacggtgggctaccagcgagaactgacattccgccatcaggacggttcgttctccgccttcggccagagcgatgccgagggcagcctctggctgacggcattcgtgctcggcacgttcagcgccgcgcgtgaggtgacgacgatcgacgagacgattctggccgaggcggccgcgtggatcgcctcgcaccaggcatccgacggatcgtggccgccggtggggttcgtatgccacagtgaaatggtcggcggggtgcaggggacgtacgcgctgaccgcgttcgtgtcgattgcgatggcggattacggtatggccgatccgcacgtgcagggagcggcgacgcaatatctgcgtgacaacctcgcgtcggtccgggacgatgcgtatgccctagcaattgcggcgctggccttcgcgcgggtaggtgatccggccgccgacgcggcgctcgaacggctgctggcgatcgccgtcaccgatgccgacggtctgcactggcaacctcacccggtggagacaaccgcctacgcggcgctggcgatgatcgagaaggaatggccgcaggcgaacgaagcggtcaagtggctttcgctccagcgtaacagcctgggcggctacggcagtacgcaggatacggtcatggggctgaaggccctgatgatggcggcccgcagtcagagccgcaacgtggaccttacggtgaccgccaaggcgcggggcggggaaacgctggcgcagttcaccgtgaacagcaccaacttcgacgtccttcagacggcggagctgccgctcgaatcggccgtcgaaatcagcgctgtcggctcggggcaggtgcgattccaactggttcgacggttcaacgttctgctgcgtgacgatccggtccagaaggacatgaccctggaggtgatgtacgacgccgaccacgtggaggtcgatgatatcgtcaacgtcaccgcgacggtgcggtacctcgggccaaaggactcgacaggaatgatgatcgtggatgtcggtgtgcctacaggcttcgccgctgtcgccgagtcgctcgatgcgctgcttgccgacaatctcgtcacgcggtacgaggtggccggacgcaaggtgatcttctatctcgacggcctggaacgcggcgaacaacggaccctgcacttccaagtcaaggcccgcttcccggtgcgcgcgacaattcccgacagccaggcatactcctactacgaaccacaggtgcgtgccgaggctggcggcaatgagatcaccatcgagccggccccgcagcagtaagcgaggaccgtggcgtcaagtccaggcgtactgctgcgggttgctcgcggccctacccggcccgatgccgggcggacaatatcgcatcgcccctcatgtgccgagctttagagcgttcggcgtcggcgcagccagctcaccgcactgacaccgatgccggccaagagcagggctcccggcgccggaattggtggcgtcgtgctgcagatcttcgcccagagcgggagcggaggacaggtggtacggcattcttccgtgctaagcgacgagatgatgctgctggggcaactgccgaaacccagcacgcacaactcgtagtccgcgcccccgacctcaaacgcgatgggatcgaacgacgtcggcagcgtgatgacatccgcaggatggccacccgggccgaccgtttccgtaacgcccagcgtcagggacgtgttgaccggcgtcccctcaaagtccatcgccaggtccagatcgaccgccgtgatgccggtgccgacgactatgggcgtattgtaatggcgcagcgcgcccacgacaaagggcgtatcgagcaccacgtcggtgggcgtcgcgacgggtgtgaagcccaagctgctcttgagaccaaacagataggccggagtgccccaggatatgagctgttcgcccatcaaagaagaccagtaggcaggggcaggggccaaggactgaagtacaggatcgctccaggtgccgctggcgctggaaagcgtcagcgcaccactggcggtgccgacgacggcgagcagcgccagcgccggcagtattgcaggtaaccgtctcatcttgtgtctccttacactccgtgtgtgactctgtggaaaccgtcagcttaccttgtatccgtggaacccccaggcacctcctttctccgggtttctcccacccatccgtacatctcccctttactccgtccggacaaacctcgcccgcacggattttactcatccagacactctctatgtccacatagcgtctgcgtgtagctattccgcgtgagcagaaccacacgtgtattcatcaccgccccatccgggttaaatatacgcgcaatatgggacgccctgcaagcaattccacggaggaaaatgcttattttgatgtgggaagattgggggacatgggaagactgtcggtgacattggtttcttttcgagattccgtgtcccatcggatgatgaggcgccgcacaggatcgggtcagcgtcgggtggaccagcgggccgaccggctggccgatccggactcacagaggttgccgaccacggcgcgcacggtgttgcggagaattgagagaaacccagcgacttacgactgcatcgacgcgagcacgtcttcgagtgacaatgcggcgcagcagaccgttgtgtcggaggcgccatagtagaccttcaaagtcgtctgttcgacgagcaggccgcaggtgaagaccacggggccgaagaagccggagcactcgtattcggtctgcggctcgagaatcggccgcgctgagcgggcccgcaccatccagggctggcgggcgtcgagcaggacggcgccgaggcagtaacgatggttgcggtcggcgccgtggtaaatctccagccacccctcgtcgaggcggacgggcggtgcgccggccccgatgcgggcctcgtcccagaatccgtcgcgcagccccatcaagtggcgatggcggccccagcagagcaaatcgggcgattcggcgatccacatgttgttggtgtgacaaagcggcgagtgcggccgatgcaatgcgtagtatcgtccgtcgaccgtctcggggaagaggacgacgtccttgttttccgggccgaagataacgccgtgacgttcgaaggtcgcgaaatcacacgtcgacgccagcgccgtggtcacccccagcggcgagaccgcgacgtagctgatgtaatacgtctggccgatccgcgtgatgcgcgggtcctcgacaccgaagctctcccaggggtcggccggaccaagggtgggatgctcatcgatggtgaagcggataccgtctttgcttctcgccacgcgcagatgcgatattgaggtcaggtatgtcctgccccggcgcacgatcaaccgaggatcggagaaatcgttggccgggtcgggtcgagtgaacgccttggtgacgatccggccgcaggccgggtcgagaaacgcggtctgcaccacctccgggtcagtctggatcggacgctcggctacgcgcaccagcaggacgatttcctcgccaaggcgggccaccgcgggattgaagacgccgaggacctcgaaatcgccacgcgacggcgttacgtcctgtggggtgaggatcggattggctggatcgcgaaatgctgccatggcgacattctcccgaactctgtcggcggccttggcgtcaaggccacgattgcatagcgaatcgtaaccggtcggatcgtatccggcaaggcgtcggctcgatctcgacgaggtcggcggtgtagacttggcggcccggcggggcaaataacgttgattttcaggccgcgaatggtagaatacagtctgatgcgcatgtgcgaatatgccttcacggcgggcggagtcgcgaggtcattggggatcgacgacggtcccggattctggaacaccagcgtacttgcacgcctgtcaccgcttggattgtcgggagtgaggaatgagtgtgacgcgtgaatcccgtcgggccgctcgtcttgtgctggcttcgtttcttctgagtgtcggtcctgtctcggcgaccccggcaggccggggggcgggtctgccgctggcgatcaatgagctgatggcggccaacagcagtgtcaaggccgacccccaaggccagtacgacgactgggtcgagatccataattacagcgatgcgccgatcgacctggcccgcatgtacctgacggacgatccgggcgaaccgacaaaatggcagttcccaggcggtgcctcgcagccggccaccgttccggcggggggatatctcatcgtctggctcgacggccccacaagcgacagcgggctgcatgcgtcgtttgcgctcgattccgacggggacaccctggcactgtttgcccccgatgggaccacgctcatcgacagcgttgcattcgaagaacagaggaccgacatctcctatggccgctcgcccgacggcaccgggccgtacggcttcctgctgacgcccacgcccggctcgcgcaacagcggcctgtacgacggtctcgtcgccgatacgaagttcagccatgaccgcggtttctacgatatgccgtttgacgtgacgatcacgtgcgagacgcccggcgcgaccatctactacaccctcgacggcagcgcgccgtattcgcaggctcggcaggttcctgccggcagtgtctacaacggcccgatccggatcaccaggaccacgtgcctgcgggcccaggcggtcaagccgcagtgcgtacccagcaacgcggacacgcacacgtacatcttcctggccgatgcggcgaggcgctcgcagtccgaggtgctggcacgtggctatccgagcacgtggttcggctcctacccggccgactacgagatggaccccgagatctacaacagccccgcatatgccgacgtcatggacgatgcgctgctggcgattccgacgttgtctctggtgaccgacagggaccatttgttcagcaagaccaatgatgcgcagaccggcggcatctacatctacaccgggcacagcagcacgggcggccaggattgggaacggcccgtgtccgccgagctgttcagcatcgacggcgccaaggaatttcagatcgactgcggcctgcgcatccagggcggcgaaagccgcaacccgcccaagtgtcccaagcacagtttcagcctccgctttcgcgacgtctacggctcgtcgaagctccggttcccgttgttcgacggcagccccgtggaaacgttcgattcgcttcaactgcgcggcttctttaacaacgcctggacgcactgggatcccggccagcgccagcgggcgcagtacattcgcgaccagtggatgcgcgactcgttgctcgagatggggcaggccgacgccggacgcgggttctacgtgcacttgtacctcaacgggatttactggggcctgtatctggtccaggagcggccggtcgcctcgcactacgccgcctacaacggaggcgacccggatcgactcgattcgattaacggaggacgcgacgcccacgacgtcaccccccagacctggcaacaggccaggagcatcgccgccggcggcgattgggcccggatctgccaggtcatcgacatcgacaacttcatcgacttcacgctcctgaacctgttcgccggcaaccaggatctcaagaccgacggaaactggcgcgccgccggaggcggcgccgacaacaagccctggcgcttctatagctgggacggcgaacgagttcttgagaaggcgaccgagaccgtgataagggatacgttggacccgaccggcctgtatcgccccctttcgcaaatcgaggaattccgcgttcgcttcggtgatcgcgtgcacaagcatctgttcaacggcggcgccctgacgaccgagcgcaacatcgcgcgatggacccgacgggccgacgagatcgacgccgctgtcatcgccgagtcggcccgctggggcgactatcgccgggatgtgcattcctacagttcgggcccctattacctgtacacccgcaacgatttctggatcgtggaacgtcagaatctgctcgacaactatttccctcgccgcaacgaggtggcactgtcgcagttcaaagccctggggctctacccgagcgtggaggcgccggtcttccatatcgacggtgtctatcagcacggcggccacatcgccgagggctcacggctcacaatgacttccaacgccgcaacggtctggtacacgctcgacggcagcgatccgcggcgccccggcgtcagcggcagcacgggcgctgagctggtcctcgtgccggaagcggcggccaagcgcgcgttcgtccccaccacggatatcggcagcgcctggcgcagcgaggtggatttcgacgattccgcctggatcgccggctccggcggcgtcggctacgaacgcagcaccggctacgaggcgttcttcgacatcgacgtccaggcccagatgtacaaccgcaacgagagctgctacatccgcattccgttcgacgtcacacccgaggggttgcaatacgccggcggcctgacgctcaaggcgcggtacgacgacggtttcatcgcttacctcaacggcgtcgaagtccagcgcgtcatgttcgaggggacgcccgcctggaactccggcgccaccgacaaccactccgacctcgacgcggtcgagttcgagcggttcgacctctccggccatatcagccggcttcgcctgggacgcaacctcctggcgatccaggggctcaacgcaggtgccaacagttccgacttcctgatctcggttgagctggtcgcgtcgcaggggggcgcggacgttccagccggtgtcgcgccgacggcggtccgctacgccggcccgatccggctcgatgccagcgcgatggtccgcgcccgtgcccagagcggcagcacctggagcgcgctgaacgaggcggtctacgccgtcggtccggtggccgagagcctgcggatcagcgagatcatgtatcatcctgtcgatccgaacaccgaatacgtcgagttgctcaacatcggctctcagccggttaatctccatctggtgcgcttcacgaatgggatcgacttcaccttcggcgacgtcactctcgacccgggtgcatatgccctcgttgtcaaagacatcggggcgttcgaggcgcggtatggggaccagtcgcccgtcgtcggccagtacgccggcagcctgaacaatgcgggggaaagcatcgagttgcaggatgccgccggccagatgatcctcgccttccggtacaaggacggatggtacgacctcaccgatggggctggctactcgctgacggtgattgaccccctgaccgccgattcggccaccctcgacaagaagggcgcctggcgtgccagcgccgaggtcggcggctcgcccggctacaatgactgaacagagactcgaaacacgaaatccgaaacaagcccgaaatccgcaagctaaaatgaacgaaatgctgacgctgtgccgaaccccgtttcgaattcgcagtttggtgccttcggatctatttcggatttcgtgtttcggatttcggatttaacgcaacgccgtcacttcttcggataggcgtagtaaaacgtctcggcacgggagaaggcctcgacgtgcccgtcgaggaacgcgcagttgccgcgtccgcccagcttgtcgcccgaaggggcgtggtggaaacccgcgatcacatcccagaattgcccgaccccctcgggacccgggatgatgcgacgcaggtcgcctccggtctggctgaaccaactcttgaccatcgtatcgctgccgggggccatgaacgtgtcattgagcccggacatgttgtaggccgtatcgacgatcgcgctctcctctgcgaacgaaaacgtcgtcgcaggatgcttgacgtccgtgtccttgagaacgcgggtctcctgaacgtcactgcgggcgctgcccagataggcgttcatcgtgtagttgtaccagggttcgtagttcttgacgttcttgccataggcgaggaagaactggtcgtcgctgtggcgcactgcgaggttcttgaaggttgggcagatgaatgccctggcatcgccgaggtaccgggccatcatccctccgtactccgggtgactcttcaactcgatgtcgccgttgcaccagcgcagatgcaggtactcggaaatgcctgcctcgacggggtagggtgttagttggctgaagtagcatctctgtggttccgcgaacctgcggtcgttgtcgtcgaggtacatcgccatcgcgatggtatagttcttcaggttgcccttgcaggcggcgccctgggccagctcacgggccttgcctagcgccggtatcaggatccccatgagcacggcgatgacggcgatgacgaccagcagctcgatcagtgtgaatgccttcgacttccgcatgacatggtcctccacgttctcgggaagcgcttacccagacctatcgtctcggcccacccgtctccgggcgcacccggcagggcatgccagtcagggtgcctgatcgcgttgcatcgcggcatttaccattctatcgacagaggttgccgtctgcaagagatatcggtatccgccggccgcccatcatccgtctatggggcggggatcaggcggacgagggccacgccgtgacgcgatacgttggcggcgaagcggctgtcgtacgtgcccaggtccttctgccgccaaaggtcccgcacgaggcgcttgcccgacaggcccagtagcggccagtcgaccgacatctcgcgaggcaattcggccaggttgaacaggcccaccgccagcgagccgtcggccatcgccttggccataatcagagtctcgtcgtcctgcaccagcggcctggcctggatgcccagcgggtcctgatcgacgtcgatcacctcggcattgcatagtacgttgagggtgaattcgtcgagatagcgcatgtcgcccgagtagaacagcggggcggccatcaggcaccacatcgacatgtagctgtactgctcgcttggcgtcagtggggtgggtttgggcggctcatcatgctgataggcgttgccgatgtgcccgatcaggatgtagtcggggtcgttccactgtccgggccgggcgtactcaaagtgccgggcgttgctcaggccgatccggtagaagccgggcagcaggccgccttgttcgaggcccaggtcgcccgtggtgcgccagcagtgcccgccgacctcgccaccccaggtccagacgttgcccatgccgtactggcacaggttcaggatgatgtcccggtcgagactcttgaggatgtcgcccatcaactgatatgggcgcttcaggtgctccaggtctgtgccgccggcgacctcactgtacgagcaccagtcgtgcttgaggaaatcgaaaccccgctcggcgaacttctccgcgtccacccgttcgtgttcgtagctggcgacgtacccggcgcacgtccagggtcccggccctgtgtagaggcctgccttgagacctttgctgtggatgtgatcgaccatgcccttgatgtcggggaacttggcgttgggcaggatcgcgcctttcgcgtcgcggtagggctcatcgccgcgcctcttcatccagcagtcgtcgatgttgacgtagctgtacccgtagtcggccatgccggagctgatcatgacgtcggcggcgtttcgcatgtgctcttcggtgacgtgataatagtggatgtaccaactgttccagcccatcggcggcgtcagcgcgagcgtgtcgccgacgatgatcgcgaaggtgcggcggtcgctgccgtggtcgtttttcgcttcgagtgtcacgacgtactcgcctcgcggcgtgggcacggtccccgtgatgattcccgtgctcgcgtcgagccgcagcgtctcgggcagcccggcggcgccaaacgcgatcggccgcgtccccgtgcaggggatgcggtagaggaacggatgtcccggtcggcagccgtagaccttcggcccattgatctgcggcgccgggcccggcttgggcgtcagcagcaccttctcctcggcagggggccgtggtgcgtcgacggtcgtcggcttgtcaccccccacgatgaactcggcgcccgcccagttggcgtggtcgtaatcgatgccgtcgccgccggaactgaccagcaggatcatctgcgtcacgccagccagcgagacgtcgacacgcttggcttcgtcgttgccggtcatcaggccgctgtcgaacagcaccttgccgtcgccatagaccttgaaccggaccgagccgcgaggcccggtggcgtcgtcgacgcccacccaggcgctgaaccgctcggttttgccgtccagggcgatgtagcagatcgattcggcgtgtgtcgccacgcccgtttcgaacgagcgcccgccgatcgacagcgttcgggcggtgatgctcttgttgacctggggcttgccccacccggtggacatcttcgtcaggtccagctcgcccagcggcaccgttgcgcccgaggcgactaccgcgccgagacagatcagagaacacaccggaatccatcgctgccttacgctcgaacgcatgttcacctcccgttgcctgagccccgtgtttgccgcagccacgatcgggccgcccccgaatcctaccacgatcctgtcgcggcatcaatggcggggcgagcggttcgctcacgttttcgccggcgtctttgtgcttctgtgcgttgccatgtgagcgcacaacaaaggggccggcgtcactgggacgcaggcccctgatcatggacattcgactgtggcgaaccttggcaagggttcactacggcgcgacggtgccgaggaactccacttccgcgatctgcatgttgccatcgctgttggcccgaagggtcgggaacaggatctgatagtacctgtaggcaaccgtgttggcgaactcgatcggggtg

SEQ ID NO: 977 - DNA, 125695 bp, Artificial Sequence
  Synthetic Oligonucleotide
  misc_feature (1)..(93824): n is a, c, g, or t
nnnnnnnnnnnnnnnnnnnnnnnnnnnnnnnnnnnnnnnnnnnnnnnnnnnnnnnnnnnnnnnnnnnnnnnnnnnnnnnnnnnnnnnnnnnnnnnnnnnnnnnnnnnnnnnnnnnnnnnnnnnnnnnnnnnnnnnnnnnnnnnnnnnnnnnnnnnnnnnnnnnnnnnnnnnnnnnnnnnnnnnnnnnnnnnnnnnnnnnnnnnnnnnnnnnnnnnnnnnnnnnnnnnnnnnnnnnnnnnnnnnnnnnnnnnnnnnnnnnnnnnnnnnnnnnnnnnnnnnnnnnnnnnnnnnnnnnnnnnnnnnnnnnnnnnnnnnnnnnnnnnnnnnnnnnnnnnnnnnnnnnnnnnnnnnnnnnnnnnnnnnnnnnnnnnnnnnnnnnnnnnnnnnnnnnnnnnnnnnnnnnnnnnnnnnnnnnnnnnnnnnnnnnnnnnnnnnnnnnnnnnnnnnnnnnnnnnnnnnnnnnnnnnnnnnnnnnnnnnnnnnnnnnnnnnnnnnnnnnnnnnnnnnnnnnnnnnnnnnnnnnnnnnnnnnnnnnnnnnnnnnnnnnnnnnnnnnnnnnnnnnnnnnnnnnnnnnnnnnnnnnnnnnnnnnnnnnnnnnnnnnnnnnnnnnnnnnnnnnnnnnnnnnnnnnnnnnnnnnnnnnnnnnnnnnnnnnnnnnnnnnnnnnnnnnnnnnnnnnnnnnnnnnnnnnnnnnnnnnnnnnnnnnnnnnnnnnnnnnnnnnnnnnnnnnnnnnnnnnnnnnnnnnnnnnnnnnnnnnnnnnnnnnnnnnnnnnnnnnnnnnnnnnnnnnnnnnnnnnnnnnnnnnnnnnnnnnnnnnnnnnnnnnnnnnnnnnnnnnnnnnnnnnnnnnnnnnnnnnnnnnnnnnnnnnnnnnnnnnnnnnnnnnnnnnnnnnnnnnnnnnnnnnnnnnnnnnnnnnnnnnnnnnnnnnnnnnnnnnnnnnnnnnnnnnnnnnnnnnnnnnnnnnnnnnnnnnnnnnnnnnnnnnnnnnnnnnnnnnnnnnnnnnnnnnnnnnnnnnnnnnnnnnnnnnnnnnnnnnnnnnnnnnnnnnnnnnnnnnnnnnnnnnnnnnnnnnnnnnnnnnnnnnnnnnnnnnnnnnnnnnnnnnnnnnnnnnnnnnnnnnnnnnnnnnnnnnnnnnnnnnnnnnnnnnnnnnnnnnnnnnnnnnnnnnnnnnnnnnnnnnnnnnnnnnnnnnnnnnnnnnnnnnnnnnnnnnnnnnnnnnnnnnnnnnnnnnnnnnnnnnnnnnnnnnnnnnnnnnnnnnnnnnnnnnnnnnnnnnnnnnnnnnnnnnnnnnnnnnnnnnnnnnnnnnnnnnnnnnnnnnnnnnnnnnnnnnnnnnnnnnnnnnnnnnnnnnnnnnnnnnnnnnnnnnnnnnnnnnnnnnnnnnnnnnnnnnnnnnnnnnnnnnnnnnnnnnnnnnnnnnnnnnnnnnnnnnnnnnnnnnnnnnnnnnnnnnnnnnnnnnnnnnnnnnnnnnnnnnnnnnnnnnnnnnnnnnnnnnnnnnnnnnnnnnnnnnnnnnnnnnnnnnnnnnnnnnnnnnnnnnnnnnnnnnnnnnnnnnnnnnnnnnnnnnnnnnnnnnnnnnnnnnnnnnnnnnnnnnnnnnnnnnnnnnnnnnnnnnnnnnnnnnnnnnnnnnnnnnnnnnnnnnnnnnnnnnnnnnnnnnnnnnnnnnnnnnnnnnnnnnnnnnnnnnnnnnnnnnnnnnnnnnnnnnnnnnnnnnnnnnnnnnnnnnnnnnnnnnnnnnnnnnnnnnnnnnnnnnnnnnnnnnnnnnnnnnnnnnnnnnnnnnnnnnnnnnnnnnnnnnnnnnnnnnnnnnnnnnnnnnnnnnnnnnnnnnnnnnnnnnnnnnnnnnnnnnnnnnnnnnnnnnnnnnnnnnnnnnnnnnnnnnnnnnnnnnnnnnnnnnnnnnnnnnnnnnnnnnnnnnnnnnnnnnnnnnnnnnnnnnnnnnnnnnnnnnnnnnnnnnnnnnnnnnnnnnnnnnnnnnnnnnnnnnnnnnnnnnnnnnnnnnnnnnnnnnnnnnnnnnnnnnnnnnnnnnnnnnnnnnnnnnnnnnnnnnnnnnnnnnnnnnnnnnnnnnnnnnnnnnnnnnnnnnnnnnnnnnnnnnnnnnnnnnnnnnnnnnnnnnnnnnnnnnnnnnnnnnnnnnnnnnnnnnnnnnnnnnnnnnnnnnnnnnnnnnnnnnnnnnnnnnnnnnnnnnnnnnnnnnnnnnnnnnnnnnnnnnnnnnnnnnnnnnnnnnnnnnnnnnnnnnnnnnnnnnnnnnnnnnnnnnnnnnnnnnnnnnnnnnnnnnnnnnnnnnnnnnnnnnnnnnnnnnnnnnnnnnnnnnnnnnnnnnnnnnnnnnnnnnnnnnnnnnnnnnnnnnnnnnnnnnnnnnnnnnnnnnnnnnnnnnnnnnnnnnnnnnnnnnnnnnnnnnnnnnnnnnnnnnnnnnnnnnnnnnnnnnnnnnnnnnnnnnnnnnnnnnnnnnnnnnnnnnnnnnnnnnnnnnnnnnnnnnnnnnnnnnnnnnnnnnnnnnnnnnnnnnnnnnnnnnnnnnnnnnnnnnnnnnnnnnnnnnnnnnnnnnnnnnnnnnnnnnnnnnnnnnnnnnnnnnnnnnnnnnnnnnnnnnnnnnnnnnnnnnnnnnnnnnnnnnnnnnnnnnnnnnnnnnnnnnnnnnnnnnnnnnnnnnnnnnnnnnnnnnnnnnnnnnnnnnnnnnnnnnnnnnnnnnnnnnnnnnnnnnnnnnnnnnnnnnnnnnnnnnnnnnnnnnnnnnnnnnnnnnnnnnnnnnnnnnnnnnnnnnnnnnnnnnnnnnnnnnnnnnnnnnnnnnnnnnnnnnnnnnnnnnnnnnnnnnnnnnnnnnnnnnnnnnnnnnnnnnnnnnnnnnnnnnnnnnnnnnnnnnnnnnnnnnnnnnnnnnnnnnnnnnnnnnnnnnnnnnnnnnnnnnnnnnnnnnnnnnnnnnnnnnnnnnnnnnnnnnnnnnnnnnnnnnnnnnnnnnnnnnnnnnnnnnnnnnnnnnnnnnnnnnnnnnnnnnnnnnnnnnnnnnnnnnnnnnnnnnnnnnnnnnnnnnnnnnnnnnnnnnnnnnnnnnnnnnnnnnnnnnnnnnnnnnnnnnnnnnnnnnnnnnnnnnnnnnnnnnnnnnnnnnnnnnnnnnnnnnnnnnnnnnnnnnnnnnnnnnnnnnnnnnnnnnnnnnnnnnnnnnnnnnnnnnnnnnnnnnnnnnnnnnnnnnnnnnnnnnnnnnnnnnnnnnnnnnnnnnnnnnnnnnnnnnnnnnnnnnnnnnnnnnnnnnnnnnnnnnnnnnnnnnnnnnnnnnnnnnnnnnnnnnnnnnnnnnnnnnnnnnnnnnnnnnnnnnnnnnnnnnnnnnnnnnnnnnnnnnnnnnnnnnnnnnnnnnnnnnnnnnnnnnnnnnnnnnnnnnnnnnnnnnnnnnnnnnnnnnnnnnnnnnnnnnnnnnnnnnnnnnnnnnnnnnnnnnnnnnnnnnnnnnnnnnnnnnnnnnnnnnnnnnnnnnnnnnnnnnnnnnnnnnnnnnnnnnnnnnnnnnnnnnnnnnnnnnnnnnnnnnnnnnnnnnnnnnnnnnnnnnnnnnnnnnnnnnnnnnnnnnnnnnnnnnnnnnnnnnnnnnnnnnnnnnnnnnnnnnnnnnnnnnnnnnnnnnnnnnnnnnnnnnnnnnnnnnnnnnnnnnnnnnnnnnnnnnnnnnnnnnnnnnnnnnnnnnnnnnnnnnnnnnnnnnnnnnnnnnnnnnnnnnnnnnnnnnnnnnnnnnnnnnnnnnnnnnnnnnnnnnnnnnnnnnnnnnnnnnnnnnnnnnnnnnnnnnnnnnnnnnnnnnnnnnnnnnnnnnnnnnnnnnnnnnnnnnnnnnnnnnnnnnnnnnnnnnnnnnnnnnnnnnnnnnnnnnnnnnnnnnnnnnnnnnnnnnnnnnnnnnnnnnnnnnnnnnnnnnnnnnnnnnnnnnnnnnnnnnnnnnnnnnnnnnnnnnnnnnnnnnnnnnnnnnnnnnnnnnnnnnnnnnnnnnnnnnnnnnnnnnnnnnnnnnnnnnnnnnnnnnnnnnnnnnnnnnnnnnnnnnnnnnnnnnnnnnnnnnnnnnnnnnnnnnnnnnnnnnnnnnnnnnnnnnnnnnnnnnnnnnnnnnnnnnnnnnnnnnnnnnnnnnnnnnnnnnnnnnnnnnnnnnnnnnnnnnnnnnnnnnnnnnnnnnnnnnnnnnnnnnnnnnnnnnnnnnnnnnnnnnnnnnnnnnnnnnnnnnnnnnnnnnnnnnnnnnnnnnnnnnnnnnnnnnnnnnnnnnnnnnnnnnnnnnnnnnnnnnnnnnnnnnnnnnnnnnnnnnnnnnnnnnnnnnnnnnnnnnnnnnnnnnnnnnnnnnnnnnnnnnnnnnnnnnnnnnnnnnnnnnnnnnnnnnnnnnnnnnnnnnnnnnnnnnnnnnnnnnnnnnnnnnnnnnnnnnnnnnnnnnnnnnnnnnnnnnnnnnnnnnnnnnnnnnnnnnnnnnnnnnnnnnnnnnnnnnnnnnnnnnnnnnnnnnnnnnnnnnnnnnnnnnnnnnnnnnnnnnnnnnnnnnnnnnnnnnnnnnnnnnnnnnnnnnnnnnnnnnnnnnnnnnnnnnnnnnnnnnnnnnnnnnnnnnnnnnnnnnnnnnnnnnnnnnnnnnnnnnnnnnnnnnnnnnnnnnnnnnnnnnnnnnnnnnnnnnnnnnnnnnnnnnnnnnnnnnnnnnnnnnnnnnnnnnnnnnnnnnnnnnnnnnnnnnnnnnnnnnnnnnnnnnnnnnnnnnnnnnnnnnnnnnnnnnnnnnnnnnnnnnnnnnnnnnnnnnnnnnnnnnnnnnnnnnnnnnnnnnnnnnnnnnnnnnnnnnnnnnnnnnnnnnnnnnnnnnnnnnnnnnnnnnnnnnnnnnnnnnnnnnnnnnnnnnnnnnnnnnnnnnnnnnnnnnnnnnnnnnnnnnnnnnnnnnnnnnnnnnnnnnnnnnnnnnnnnnnnnnnnnnnnnnnnnnnnnnnnnnnnnnnnnnnnnnnnnnnnnnnnnnnnnnnnnnnnnnnnnnnnnnnnnnnnnnnnnnnnnnnnnnnnnnnnnnnnnnnnnnnnnnnnnnnnnnnnnnnnnnnnnnnnnnnnnnnnnnnnnnnnnnnnnnnnnnnnnnnnnnnnnnnnnnnnnnnnnnnnnnnnnnnnnnnnnnnnnnnnnnnnnnnnnnnnnnnnnnnnnnnnnnnnnnnnnnnnnnnnnnnnnnnnnnnnnnnnnnnnnnnnnnnnnnnnnnnnnnnnnnnnnnnnnnnnnnnnnnnnnnnnnnnnnnnnnnnnnnnnnnnnnnnnnnnnnnnnnnnnnnnnnnnnnnnnnnnnnnnnnnnnnnnnnnnnnnnnnnnnnnnnnnnnnnnnnnnnnnnnnnnnnnnnnnnnnnnnnnnnnnnnnnnnnnnnnnnnnnnnnnnnnnnnnnnnnnnnnnnnnnnnnnnnnnnnnnnnnnnnnnnnnnnnnnnnnnnnnnnnnnnnnnnnnnnnnnnnnnnnnnnnnnnnnnnnnnnnnnnnnnnnnnnnnnnnnnnnnnnnnnnnnnnnnnnnnnnnnnnnnnnnnnnnnnnnnnnnnnnnnnnnnnnnnnnnnnnnnnnnnnnnnnnnnnnnnnnnnnnnnnnnnnnnnnnnnnnnnnnnnnnnnnnnnnnnnnnnnnnnnnnnnnnnnnnnnnnnnnnnnnnnnnnnnnnnnnnnnnnnnnnnnnnnnnnnnnnnnnnnnnnnnnnnnnnnnnnnnnnnnnnnnnnnnnnnnnnnnnnnnnnnnnnnnnnnnnnnnnnnnnnnnnnnnnnnnnnnnnnnnnnnnnnnnnnnnnnnnnnnnnnnnnnnnnnnnnnnnnnnnnnnnnnnnnnnnnnnnnnnnnnnnnnnnnnnnnnnnnnnnnnnnnnnnnnnnnnnnnnnnnnnnnnnnnnnnnnnnnnnnnnnnnnnnnnnnnnnnnnnnnnnnnnnnnnnnnnnnnnnnnnnnnnnnnnnnnnnnnnnnnnnnnnnnnnnnnnnnnnnnnnnnnnnnnnnnnnnnnnnnnnnnnnnnnnnnnnnnnnnnnnnnnnnnnnnnnnnnnnnnnnnnnnnnnnnnnnnnnnnnnnnnnnnnnnnnnnnnnnnnnnnnnnnnnnnnnnnnnnnnnnnnnnnnnnnnnnnnnnnnnnnnnnnnnnnnnnnnnnnnnnnnnnnnnnnnnnnnnnnnnnnnnnnnnnnnnnnnnnnnnnnnnnnnnnnnnnnnnnnnnnnnnnnnnnnnnnnnnnnnnnnnnnnnnnnnnnnnnnnnnnnnnnnnnnnnnnnnnnnnnnnnnnnnnnnnnnnnnnnnnnnnnnnnnnnnnnnnnnnnnnnnnnnnnnnnnnnnnnnnnnnnnnnnnnnnnnnnnnnnnnnnnnnnnnnnnnnnnnnnnnnnnnnnnnnnnnnnnnnnnnnnnnnnnnnnnnnnnnnnnnnnnnnnnnnnnnnnnnnnnnnnnnnnnnnnnnnnnnnnnnnnnnnnnnnnnnnnnnnnnnnnnnnnnnnnnnnnnnnnnnnnnnnnnnnnnnnnnnnnnnnnnnnnnnnnnnnnnnnnnnnnnnnnnnnnnnnnnnnnnnnnnnnnnnnnnnnnnnnnnnnnnnnnnnnnnnnnnnnnnnnnnnnnnnnnnnnnnnnnnnnnnnnnnnnnnnnnnnnnnnnnnnnnnnnnnnnnnnnnnnnnnnnnnnnnnnnnnnnnnnnnnnnnnnnnnnnnnnnnnnnnnnnnnnnnnnnnnnnnnnnnnnnnnnnnnnnnnnnnnnnnnnnnnnnnnnnnnnnnnnnnnnnnnnnnnnnnnnnnnnnnnnnnnnnnnnnnnnnnnnnnnnnnnnnnnnnnnnnnnnnnnnnnnnnnnnnnnnnnnnnnnnnnnnnnnnnnnnnnnnnnnnnnnnnnnnnnnnnnnnnnnnnnnnnnnnnnnnnnnnnnnnnnnnnnnnnnnnnnnnnnnnnnnnnnnnnnnnnnnnnnnnnnnnnnnnnnnnnnnnnnnnnnnnnnnnnnnnnnnnnnnnnnnnnnnnnnnnnnnnnnnnnnnnnnnnnnnnnnnnnnnnnnnnnnnnnnnnnnnnnnnnnnnnnnnnnnnnnnnnnnnnnnnnnnnnnnnnnnnnnnnnnnnnnnnnnnnnnnnnnnnnnnnnnnnnnnnnnnnnnnnnnnnnnnnnnnnnnnnnnnnnnnnnnnnnnnnnnnnnnnnnnnnnnnnnnnnnnnnnnnnnnnnnnnnnnnnnnnnnnnnnnnnnnnnnnnnnnnnnnnnnnnnnnnnnnnnnnnnnnnnnnnnnnnnnnnnnnnnnnnnnnnnnnnnnnnnnnnnnnnnnnnnnnnnnnnnnnnnnnnnnnnnnnnnnnnnnnnnnnnnnnnnnnnnnnnnnnnnnnnnnnnnnnnnnnnnnnnnnnnnnnnnnnnnnnnnnnnnnnnnnnnnnnnnnnnnnnnnnnnnnnnnnnnnnnnnnnnnnnnnnnnnnnnnnnnnnnnnnnnnnnnnnnnnnnnnnnnnnnnnnnnnnnnnnnnnnnnnnnnnnnnnnnnnnnnnnnnnnnnnnnnnnnnnnnnnnnnnnnnnnnnnnnnnnnnnnnnnnnnnnnnnnnnnnnnnnnnnnnnnnnnnnnnnnnnnnnnnnnnnnnnnnnnnnnnnnnnnnnnnnnnnnnnnnnnnnnnnnnnnnnnnnnnnnnnnnnnnnnnnnnnnnnnnnnnnnnnnnnnnnnnnnnnnnnnnnnnnnnnnnnnnnnnnnnnnnnnnnnnnnnnnnnnnnnnnnnnnnnnnnnnnnnnnnnnnnnnnnnnnnnnnnnnnnnnnnnnnnnnnnnnnnnnnnnnnnnnnnnnnnnnnnnnnnnnnnnnnnnnnnnnnnnnnnnnnnnnnnnnnnnnnnnnnnnnnnnnnnnnnnnnnnnnnnnnnnnnnnnnnnnnnnnnnnnnnnnnnnnnnnnnnnnnnnnnnnnnnnnnnnnnnnnnnnnnnnnnnnnnnnnnnnnnnnnnnnnnnnnnnnnnnnnnnnnnnnnnnnnnnnnnnnnnnnnnnnnnnnnnnnnnnnnnnnnnnnnnnnnnnnnnnnnnnnnnnnnnnnnnnnnnnnnnnnnnnnnnnnnnnnnnnnnnnnnnnnnnnnnnnnnnnnnnnnnnnnnnnnnnnnnnnnnnnnnnnnnnnnnnnnnnnnnnnnnnnnnnnnnnnnnnnnnnnnnnnnnnnnnnnnnnnnnnnnnnnnnnnnnnnnnnnnnnnnnnnnnnnnnnnnnnnnnnnnnnnnnnnnnnnnnnnnnnnnnnnnnnnnnnnnnnnnnnnnnnnnnnnnnnnnnnnnnnnnnnnnnnnnnnnnnnnnnnnnnnnnnnnnnnnnnnnnnnnnnnnnnnnnnnnnnnnnnnnnnnnnnnnnnnnnnnnnnnnnnnnnnnnnnnnnnnnnnnnnnnnnnnnnnnnnnnnnnnnnnnnnnnnnnnnnnnnnnnnnnnnnnnnnnnnnnnnnnnnnnnnnnnnnnnnnnnnnnnnnnnnnnnnnnnnnnnnnnnnnnnnnnnnnnnnnnnnnnnnnnnnnnnnnnnnnnnnnnnnnnnnnnnnnnnnnnnnnnnnnnnnnnnnnnnnnnnnnnnnnnnnnnnnnnnnnnnnnnnnnnnnnnnnnnnnnnnnnnnnnnnnnnnnnnnnnnnnnnnnnnnnnnnnnnnnnnnnnnnnnnnnnnnnnnnnnnnnnnnnnnnnnnnnnnnnnnnnnnnnnnnnnnnnnnnnnnnnnnnnnnnnnnnnnnnnnnnnnnnnnnnnnnnnnnnnnnnnnnnnnnnnnnnnnnnnnnnnnnnnnnnnnnnnnnnnnnnnnnnnnnnnnnnnnnnnnnnnnnnnnnnnnnnnnnnnnnnnnnnnnnnnnnnnnnnnnnnnnnnnnnnnnnnnnnnnnnnnnnnnnnnnnnnnnnnnnnnnnnnnnnnnnnnnnnnnnnnnnnnnnnnnnnnnnnnnnnnnnnnnnnnnnnnnnnnnnnnnnnnnnnnnnnnnnnnnnnnnnnnnnnnnnnnnnnnnnnnnnnnnnnnnnnnnnnnnnnnnnnnnnnnnnnnnnnnnnnnnnnnnnnnnnnnnnnnnnnnnnnnnnnnnnnnnnnnnnnnnnnnnnnnnnnnnnnnnnnnnnnnnnnnnnnnnnnnnnnnnnnnnnnnnnnnnnnnnnnnnnnnnnnnnnnnnnnnnnnnnnnnnnnnnnnnnnnnnnnnnnnnnnnnnnnnnnnnnnnnnnnnnnnnnnnnnnnnnnnnnnnnnnnnnnnnnnnnnnnnnnnnnnnnnnnnnnnnnnnnnnnnnnnnnnnnnnnnnnnnnnnnnnnnnnnnnnnnnnnnnnnnnnnnnnnnnnnnnnnnnnnnnnnnnnnnnnnnnnnnnnnnnnnnnnnnnnnnnnnnnnnnnnnnnnnnnnnnnnnnnnnnnnnnnnnnnnnnnnnnnnnnnnnnnnnnnnnnnnnnnnnnnnnnnnnnnnnnnnnnnnnnnnnnnnnnnnnnnnnnnnnnnnnnnnnnnnnnnnnnnnnnnnnnnnnnnnnnnnnnnnnnnnnnnnnnnnnnnnnnnnnnnnnnnnnnnnnnnnnnnnnnnnnnnnnnnnnnnnnnnnnnnnnnnnnnnnnnnnnnnnnnnnnnnnnnnnnnnnnnnnnnnnnnnnnnnnnnnnnnnnnnnnnnnnnnnnnnnnnnnnnnnnnnnnnnnnnnnnnnnnnnnnnnnnnnnnnnnnnnnnnnnnnnnnnnnnnnnnnnnnnnnnnnnnnnnnnnnnnnnnnnnnnnnnnnnnnnnnnnnnnnnnnnnnnnnnnnnnnnnnnnnnnnnnnnnnnnnnnnnnnnnnnnnnnnnnnnnnnnnnnnnnnnnnnnnnnnnnnnnnnnnnnnnnnnnnnnnnnnnnnnnnnnnnnnnnnnnnnnnnnnnnnnnnnnnnnnnnnnnnnnnnnnnnnnnnnnnnnnnnnnnnnnnnnnnnnnnnnnnnnnnnnnnnnnnnnnnnnnnnnnnnnnnnnnnnnnnnnnnnnnnnnnnnnnnnnnnnnnnnnnnnnnnnnnnnnnnnnnnnnnnnnnnnnnnnnnnnnnnnnnnnnnnnnnnnnnnnnnnnnnnnnnnnnnnnnnnnnnnnnnnnnnnnnnnnnnnnnnnnnnnnnnnnnnnnnnnnnnnnnnnnnnnnnnnnnnnnnnnnnnnnnnnnnnnnnnnnnnnnnnnnnnnnnnnnnnnnnnnnnnnnnnnnnnnnnnnnnnnnnnnnnnnnnnnnnnnnnnnnnnnnnnnnnnnnnnnnnnnnnnnnnnnnnnnnnnnnnnnnnnnnnnnnnnnnnnnnnnnnnnnnnnnnnnnnnnnnnnnnnnnnnnnnnnnnnnnnnnnnnnnnnnnnnnnnnnnnnnnnnnnnnnnnnnnnnnnnnnnnnnnnnnnnnnnnnnnnnnnnnnnnnnnnnnnnnnnnnnnnnnnnnnnnnnnnnnnnnnnnnnnnnnnnnnnnnnnnnnnnnnnnnnnnnnnnnnnnnnnnnnnnnnnnnnnnnnnnnnnnnnnnnnnnnnnnnnnnnnnnnnnnnnnnnnnnnnnnnnnnnnnnnnnnnnnnnnnnnnnnnnnnnnnnnnnnnnnnnnnnnnnnnnnnnnnnnnnnnnnnnnnnnnnnnnnnnnnnnnnnnnnnnnnnnnnnnnnnnnnnnnnnnnnnnnnnnnnnnnnnnnnnnnnnnnnnnnnnnnnnnnnnnnnnnnnnnnnnnnnnnnnnnnnnnnnnnnnnnnnnnnnnnnnnnnnnnnnnnnnnnnnnnnnnnnnnnnnnnnnnnnnnnnnnnnnnnnnnnnnnnnnnnnnnnnnnnnnnnnnnnnnnnnnnnnnnnnnnnnnnnnnnnnnnnnnnnnnnnnnnnnnnnnnnnnnnnnnnnnnnnnnnnnnnnnnnnnnnnnnnnnnnnnnnnnnnnnnnnnnnnnnnnnnnnnnnnnnnnnnnnnnnnnnnnnnnnnnnnnnnnnnnnnnnnnnnnnnnnnnnnnnnnnnnnnnnnnnnnnnnnnnnnnnnnnnnnnnnnnnnnnnnnnnnnnnnnnnnnnnnnnnnnnnnnnnnnnnnnnnnnnnnnnnnnnnnnnnnnnnnnnnnnnnnnnnnnnnnnnnnnnnnnnnnnnnnnnnnnnnnnnnnnnnnnnnnnnnnnnnnnnnnnnnnnnnnnnnnnnnnnnnnnnnnnnnnnnnnnnnnnnnnnnnnnnnnnnnnnnnnnnnnnnnnnnnnnnnnnnnnnnnnnnnnnnnnnnnnnnnnnnnnnnnnnnnnnnnnnnnnnnnnnnnnnnnnnnnnnnnnnnnnnnnnnnnnnnnnnnnnnnnnnnnnnnnnnnnnnnnnnnnnnnnnnnnnnnnnnnnnnnnnnnnnnnnnnnnnnnnnnnnnnnnnnnnnnnnnnnnnnnnnnnnnnnnnnnnnnnnnnnnnnnnnnnnnnnnnnnnnnnnnnnnnnnnnnnnnnnnnnnnnnnnnnnnnnnnnnnnnnnnnnnnnnnnnnnnnnnnnnnnnnnnnnnnnnnnnnnnnnnnnnnnnnnnnnnnnnnnnnnnnnnnnnnnnnnnnnnnnnnnnnnnnnnnnnnnnnnnnnnnnnnnnnnnnnnnnnnnnnnnnnnnnnnnnnnnnnnnnnnnnnnnnnnnnnnnnnnnnnnnnnnnnnnnnnnnnnnnnnnnnnnnnnnnnnnnnnnnnnnnnnnnnnnnnnnnnnnnnnnnnnnnnnnnnnnnnnnnnnnnnnnnnnnnnnnnnnnnnnnnnnnnnnnnnnnnnnnnnnnnnnnnnnnnnnnnnnnnnnnnnnnnnnnnnnnnnnnnnnnnnnnnnnnnnnnnnnnnnnnnnnnnnnnnnnnnnnnnnnnnnnnnnnnnnnnnnnnnnnnnnnnnnnnnnnnnnnnnnnnnnnnnnnnnnnnnnnnnnnnnnnnnnnnnnnnnnnnnnnnnnnnnnnnnnnnnnnnnnnnnnnnnnnnnnnnnnnnnnnnnnnnnnnnnnnnnnnnnnnnnnnnnnnnnnnnnnnnnnnnnnnnnnnnnnnnnnnnnnnnnnnnnnnnnnnnnnnnnnnnnnnnnnnnnnnnnnnnnnnnnnnnnnnnnnnnnnnnnnnnnnnnnnnnnnnnnnnnnnnnnnnnnnnnnnnnnnnnnnnnnnnnnnnnnnnnnnnnnnnnnnnnnnnnnnnnnnnnnnnnnnnnnnnnnnnnnnnnnnnnnnnnnnnnnnnnnnnnnnnnnnnnnnnnnnnnnnnnnnnnnnnnnnnnnnnnnnnnnnnnnnnnnnnnnnnnnnnnnnnnnnnnnnnnnnnnnnnnnnnnnnnnnnnnnnnnnnnnnnnnnnnnnnnnnnnnnnnnnnnnnnnnnnnnnnnnnnnnnnnnnnnnnnnnnnnnnnnnnnnnnnnnnnnnnnnnnnnnnnnnnnnnnnnnnnnnnnnnnnnnnnnnnnnnnnnnnnnnnnnnnnnnnnnnnnnnnnnnnnnnnnnnnnnnnnnnnnnnnnnnnnnnnnnnnnnnnnnnnnnnnnnnnnnnnnnnnnnnnnnnnnnnnnnnnnnnnnnnnnnnnnnnnnnnnnnnnnnnnnnnnnnnnnnnnnnnnnnnnnnnnnnnnnnnnnnnnnnnnnnnnnnnnnnnnnnnnnnnnnnnnnnnnnnnnnnnnnnnnnnnnnnnnnnnnnnnnnnnnnnnnnnnnnnnnnnnnnnnnnnnnnnnnnnnnnnnnnnnnnnnnnnnnnnnnnnnnnnnnnnnnnnnnnnnnnnnnnnnnnnnnnnnnnnnnnnnnnnnnnnnnnnnnnnnnnnnnnnnnnnnnnnnnnnnnnnnnnnnnnnnnnnnnnnnnnnnnnnnnnnnnnnnnnnnnnnnnnnnnnnnnnnnnnnnnnnnnnnnnnnnnnnnnnnnnnnnnnnnnnnnnnnnnnnnnnnnnnnnnnnnnnnnnnnnnnnnnnnnnnnnnnnnnnnnnnnnnnnnnnnnnnnnnnnnnnnnnnnnnnnnnnnnnnnnnnnnnnnnnnnnnnnnnnnnnnnnnnnnnnnnnnnnnnnnnnnnnnnnnnnnnnnnnnnnnnnnnnnnnnnnnnnnnnnnnnnnnnnnnnnnnnnnnnnnnnnnnnnnnnnnnnnnnnnnnnnnnnnnnnnnnnnnnnnnnnnnnnnnnnnnnnnnnnnnnnnnnnnnnnnnnnnnnnnnnnnnnnnnnnnnnnnnnnnnnnnnnnnnnnnnnnnnnnnnnnnnnnnnnnnnnnnnnnnnnnnnnnnnnnnnnnnnnnnnnnnnnnnnnnnnnnnnnnnnnnnnnnnnnnnnnnnnnnnnnnnnnnnnnnnnnnnnnnnnnnnnnnnnnnnnnnnnnnnnnnnnnnnnnnnnnnnnnnnnnnnnnnnnnnnnnnnnnnnnnnnnnnnnnnnnnnnnnnnnnnnnnnnnnnnnnnnnnnnnnnnnnnnnnnnnnnnnnnnnnnnnnnnnnnnnnnnnnnnnnnnnnnnnnnnnnnnnnnnnnnnnnnnnnnnnnnnnnnnnnnnnnnnnnnnnnnnnnnnnnnnnnnnnnnnnnnnnnnnnnnnnnnnnnnnnnnnnnnnnnnnnnnnnnnnnnnnnnnnnnnnnnnnnnnnnnnnnnnnnnnnnnnnnnnnnnnnnnnnnnnnnnnnnnnnnnnnnnnnnnnnnnnnnnnnnnnnnnnnnnnnnnnnnnnnnnnnnnnnnnnnnnnnnnnnnnnnnnnnnnnnnnnnnnnnnnnnnnnnnnnnnnnnnnnnnnnnnnnnnnnnnnnnnnnnnnnnnnnnnnnnnnnnnnnnnnnnnnnnnnnnnnnnnnnnnnnnnnnnnnnnnnnnnnnnnnnnnnnnnnnnnnnnnnnnnnnnnnnnnnnnnnnnnnnnnnnnnnnnnnnnnnnnnnnnnnnnnnnnnnnnnnnnnnnnnnnnnnnnnnnnnnnnnnnnnnnnnnnnnnnnnnnnnnnnnnnnnnnnnnnnnnnnnnnnnnnnnnnnnnnnnnnnnnnnnnnnnnnnnnnnnnnnnnnnnnnnnnnnnnnnnnnnnnnnnnnnnnnnnnnnnnnnnnnnnnnnnnnnnnnnnnnnnnnnnnnnnnnnnnnnnnnnnnnnnnnnnnnnnnnnnnnnnnnnnnnnnnnnnnnnnnnnnnnnnnnnnnnnnnnnnnnnnnnnnnnnnnnnnnnnnnnnnnnnnnnnnnnnnnnnnnnnnnnnnnnnnnnnnnnnnnnnnnnnnnnnnnnnnnnnnnnnnnnnnnnnnnnnnnnnnnnnnnnnnnnnnnnnnnnnnnnnnnnnnnnnnnnnnnnnnnnnnnnnnnnnnnnnnnnnnnnnnnnnnnnnnnnnnnnnnnnnnnnnnnnnnnnnnnnnnnnnnnnnnnnnnnnnnnnnnnnnnnnnnnnnnnnnnnnnnnnnnnnnnnnnnnnnnnnnnnnnnnnnnnnnnnnnnnnnnnnnnnnnnnnnnnnnnnnnnnnnnnnnnnnnnnnnnnnnnnnnnnnnnnnnnnnnnnnnnnnnnnnnnnnnnnnnnnnnnnnnnnnnnnnnnnnnnnnnnnnnnnnnnnnnnnnnnnnnnnnnnnnnnnnnnnnnnnnnnnnnnnnnnnnnnnnnnnnnnnnnnnnnnnnnnnnnnnnnnnnnnnnnnnnnnnnnnnnnnnnnnnnnnnnnnnnnnnnnnnnnnnnnnnnnnnnnnnnnnnnnnnnnnnnnnnnnnnnnnnnnnnnnnnnnnnnnnnnnnnnnnnnnnnnnnnnnnnnnnnnnnnnnnnnnnnnnnnnnnnnnnnnnnnnnnnnnnnnnnnnnnnnnnnnnnnnnnnnnnnnnnnnnnnnnnnnnnnnnnnnnnnnnnnnnnnnnnnnnnnnnnnnnnnnnnnnnnnnnnnnnnnnnnnnnnnnnnnnnnnnnnnnnnnnnnnnnnnnnnnnnnnnnnnnnnnnnnnnnnnnnnnnnnnnnnnnnnnnnnnnnnnnnnnnnnnnnnnnnnnnnnnnnnnnnnnnnnnnnnnnnnnnnnnnnnnnnnnnnnnnnnnnnnnnnnnnnnnnnnnnnnnnnnnnnnnnnnnnnnnnnnnnnnnnnnnnnnnnnnnnnnnnnnnnnnnnnnnnnnnnnnnnnnnnnnnnnnnnnnnnnnnnnnnnnnnnnnnnnnnnnnnnnnnnnnnnnnnnnnnnnnnnnnnnnnnnnnnnnnnnnnnnnnnnnnnnnnnnnnnnnnnnnnnnnnnnnnnnnnnnnnnnnnnnnnnnnnnnnnnnnnnnnnnnnnnnnnnnnnnnnnnnnnnnnnnnnnnnnnnnnnnnnnnnnnnnnnnnnnnnnnnnnnnnnnnnnnnnnnnnnnnnnnnnnnnnnnnnnnnnnnnnnnnnnnnnnnnnnnnnnnnnnnnnnnnnnnnnnnnnnnnnnnnnnnnnnnnnnnnnnnnnnnnnnnnnnnnnnnnnnnnnnnnnnnnnnnnnnnnnnnnnnnnnnnnnnnnnnnnnnnnnnnnnnnnnnnnnnnnnnnnnnnnnnnnnnnnnnnnnnnnnnnnnnnnnnnnnnnnnnnnnnnnnnnnnnnnnnnnnnnnnnnnnnnnnnnnnnnnnnnnnnnnnnnnnnnnnnnnnnnnnnnnnnnnnnnnnnnnnnnnnnnnnnnnnnnnnnnnnnnnnnnnnnnnnnnnnnnnnnnnnnnnnnnnnnnnnnnnnnnnnnnnnnnnnnnnnnnnnnnnnnnnnnnnnnnnnnnnnnnnnnnnnnnnnnnnnnnnnnnnnnnnnnnnnnnnnnnnnnnnnnnnnnnnnnnnnnnnnnnnnnnnnnnnnnnnnnnnnnnnnnnnnnnnnnnnnnnnnnnnnnnnnnnnnnnnnnnnnnnnnnnnnnnnnnnnnnnnnnnnnnnnnnnnnnnnnnnnnnnnnnnnnnnnnnnnnnnnnnnnnnnnnnnnnnnnnnnnnnnnnnnnnnnnnnnnnnnnnnnnnnnnnnnnnnnnnnnnnnnnnnnnnnnnnnnnnnnnnnnnnnnnnnnnnnnnnnnnnnnnnnnnnnnnnnnnnnnnnnnnnnnnnnnnnnnnnnnnnnnnnnnnnnnnnnnnnnnnnnnnnnnnnnnnnnnnnnnnnnnnnnnnnnnnnnnnnnnnnnnnnnnnnnnnnnnnnnnnnnnnnnnnnnnnnnnnnnnnnnnnnnnnnnnnnnnnnnnnnnnnnnnnnnnnnnnnnnnnnnnnnnnnnnnnnnnnnnnnnnnnnnnnnnnnnnnnnnnnnnnnnnnnnnnnnnnnnnnnnnnnnnnnnnnnnnnnnnnnnnnnnnnnnnnnnnnnnnnnnnnnnnnnnnnnnnnnnnnnnnnnnnnnnnnnnnnnnnnnnnnnnnnnnnnnnnnnnnnnnnnnnnnnnnnnnnnnnnnnnnnnnnnnnnnnnnnnnnnnnnnnnnnnnnnnnnnnnnnnnnnnnnnnnnnnnnnnnnnnnnnnnnnnnnnnnnnnnnnnnnnnnnnnnnnnnnnnnnnnnnnnnnnnnnnnnnnnnnnnnnnnnnnnnnnnnnnnnnnnnnnnnnnnnnnnnnnnnnnnnnnnnnnnnnnnnnnnnnnnnnnnnnnnnnnnnnnnnnnnnnnnnnnnnnnnnnnnnnnnnnnnnnnnnnnnnnnnnnnnnnnnnnnnnnnnnnnnnnnnnnnnnnnnnnnnnnnnnnnnnnnnnnnnnnnnnnnnnnnnnnnnnnnnnnnnnnnnnnnnnnnnnnnnnnnnnnnnnnnnnnnnnnnnnnnnnnnnnnnnnnnnnnnnnnnnnnnnnnnnnnnnnnnnnnnnnnnnnnnnnnnnnnnnnnnnnnnnnnnnnnnnnnnnnnnnnnnnnnnnnnnnnnnnnnnnnnnnnnnnnnnnnnnnnnnnnnnnnnnnnnnnnnnnnnnnnnnnnnnnnnnnnnnnnnnnnnnnnnnnnnnnnnnnnnnnnnnnnnnnnnnnnnnnnnnnnnnnnnnnnnnnnnnnnnnnnnnnnnnnnnnnnnnnnnnnnnnnnnnnnnnnnnnnnnnnnnnnnnnnnnnnnnnnnnnnnnnnnnnnnnnnnnnnnnnnnnnnnnnnnnnnnnnnnnnnnnnnnnnnnnnnnnnnnnnnnnnnnnnnnnnnnnnnnnnnnnnnnnnnnnnnnnnnnnnnnnnnnnnnnnnnnnnnnnnnnnnnnnnnnnnnnnnnnnnnnnnnnnnnnnnnnnnnnnnnnnnnnnnnnnnnnnnnnnnnnnnnnnnnnnnnnnnnnnnnnnnnnnnnnnnnnnnnnnnnnnnnnnnnnnnnnnnnnnnnnnnnnnnnnnnnnnnnnnnnnnnnnnnnnnnnnnnnnnnnnnnnnnnnnnnnnnnnnnnnnnnnnnnnnnnnnnnnnnnnnnnnnnnnnnnnnnnnnnnnnnnnnnnnnnnnnnnnnnnnnnnnnnnnnnnnnnnnnnnnnnnnnnnnnnnnnnnnnnnnnnnnnnnnnnnnnnnnnnnnnnnnnnnnnnnnnnnnnnnnnnnnnnnnnnnnnnnnnnnnnnnnnnnnnnnnnnnnnnnnnnnnnnnnnnnnnnnnnnnnnnnnnnnnnnnnnnnnnnnnnnnnnnnnnnnnnnnnnnnnnnnnnnnnnnnnnnnnnnnnnnnnnnnnnnnnnnnnnnnnnnnnnnnnnnnnnnnnnnnnnnnnnnnnnnnnnnnnnnnnnnnnnnnnnnnnnnnnnnnnnnnnnnnnnnnnnnnnnnnnnnnnnnnnnnnnnnnnnnnnnnnnnnnnnnnnnnnnnnnnnnnnnnnnnnnnnnnnnnnnnnnnnnnnnnnnnnnnnnnnnnnnnnnnnnnnnnnnnnnnnnnnnnnnnnnnnnnnnnnnnnnnnnnnnnnnnnnnnnnnnnnnnnnnnnnnnnnnnnnnnnnnnnnnnnnnnnnnnnnnnnnnnnnnnnnnnnnnnnnnnnnnnnnnnnnnnnnnnnnnnnnnnnnnnnnnnnnnnnnnnnnnnnnnnnnnnnnnnnnnnnnnnnnnnnnnnnnnnnnnnnnnnnnnnnnnnnnnnnnnnnnnnnnnnnnnnnnnnnnnnnnnnnnnnnnnnnnnnnnnnnnnnnnnnnnnnnnnnnnnnnnnnnnnnnnnnnnnnnnnnnnnnnnnnnnnnnnnnnnnnnnnnnnnnnnnnnnnnnnnnnnnnnnnnnnnnnnnnnnnnnnnnnnnnnnnnnnnnnnnnnnnnnnnnnnnnnnnnnnnnnnnnnnnnnnnnnnnnnnnnnnnnnnnnnnnnnnnnnnnnnnnnnnnnnnnnnnnnnnnnnnnnnnnnnnnnnnnnnnnnnnnnnnnnnnnnnnnnnnnnnnnnnnnnnnnnnnnnnnnnnnnnnnnnnnnnnnnnnnnnnnnnnnnnnnnnnnnnnnnnnnnnnnnnnnnnnnnnnnnnnnnnnnnnnnnnnnnnnnnnnnnnnnnnnnnnnnnnnnnnnnnnnnnnnnnnnnnnnnnnnnnnnnnnnnnnnnnnnnnnnnnnnnnnnnnnnnnnnnnnnnnnnnnnnnnnnnnnnnnnnnnnnnnnnnnnnnnnnnnnnnnnnnnnnnnnnnnnnnnnnnnnnnnnnnnnnnnnnnnnnnnnnnnnnnnnnnnnnnnnnnnnnnnnnnnnnnnnnnnnnnnnnnnnnnnnnnnnnnnnnnnnnnnnnnnnnnnnnnnnnnnnnnnnnnnnnnnnnnnnnnnnnnnnnnnnnnnnnnnnnnnnnnnnnnnnnnnnnnnnnnnnnnnnnnnnnnnnnnnnnnnnnnnnnnnnnnnnnnnnnnnnnnnnnnnnnnnnnnnnnnnnnnnnnnnnnnnnnnnnnnnnnnnnnnnnnnnnnnnnnnnnnnnnnnnnnnnnnnnnnnnnnnnnnnnnnnnnnnnnnnnnnnnnnnnnnnnnnnnnnnnnnnnnnnnnnnnnnnnnnnnnnnnnnnnnnnnnnnnnnnnnnnnnnnnnnnnnnnnnnnnnnnnnnnnnnnnnnnnnnnnnnnnnnnnnnnnnnnnnnnnnnnnnnnnnnnnnnnnnnnnnnnnnnnnnnnnnnnnnnnnnnnnnnnnnnnnnnnnnnnnnnnnnnnnnnnnnnnnnnnnnnnnnnnnnnnnnnnnnnnnnnnnnnnnnnnnnnnnnnnnnnnnnnnnnnnnnnnnnnnnnnnnnnnnnnnnnnnnnnnnnnnnnnnnnnnnnnnnnnnnnnnnnnnnnnnnnnnnnnnnnnnnnnnnnnnnnnnnnnnnnnnnnnnnnnnnnnnnnnnnnnnnnnnnnnnnnnnnnnnnnnnnnnnnnnnnnnnnnnnnnnnnnnnnnnnnnnnnnnnnnnnnnnnnnnnnnnnnnnnnnnnnnnnnnnnnnnnnnnnnnnnnnnnnnnnnnnnnnnnnnnnnnnnnnnnnnnnnnnnnnnnnnnnnnnnnnnnnnnnnnnnnnnnnnnnnnnnnnnnnnnnnnnnnnnnnnnnnnnnnnnnnnnnnnnnnnnnnnnnnnnnnnnnnnnnnnnnnnnnnnnnnnnnnnnnnnnnnnnnnnnnnnnnnnnnnnnnnnnnnnnnnnnnnnnnnnnnnnnnnnnnnnnnnnnnnnnnnnnnnnnnnnnnnnnnnnnnnnnnnnnnnnnnnnnnnnnnnnnnnnnnnnnnnnnnnnnnnnnnnnnnnnnnnnnnnnnnnnnnnnnnnnnnnnnnnnnnnnnnnnnnnnnnnnnnnnnnnnnnnnnnnnnnnnnnnnnnnnnnnnnnnnnnnnnnnnnnnnnnnnnnnnnnnnnnnnnnnnnnnnnnnnnnnnnnnnnnnnnnnnnnnnnnnnnnnnnnnnnnnnnnnnnnnnnnnnnnnnnnnnnnnnnnnnnnnnnnnnnnnnnnnnnnnnnnnnnnnnnnnnnnnnnnnnnnnnnnnnnnnnnnnnnnnnnnnnnnnnnnnnnnnnnnnnnnnnnnnnnnnnnnnnnnnnnnnnnnnnnnnnnnnnnnnnnnnnnnnnnnnnnnnnnnnnnnnnnnnnnnnnnnnnnnnnnnnnnnnnnnnnnnnnnnnnnnnnnnnnnnnnnnnnnnnnnnnnnnnnnnnnnnnnnnnnnnnnnnnnnnnnnnnnnnnnnnnnnnnnnnnnnnnnnnnnnnnnnnnnnnnnnnnnnnnnnnnnnnnnnnnnnnnnnnnnnnnnnnnnnnnnnnnnnnnnnnnnnnnnnnnnnnnnnnnnnnnnnnnnnnnnnnnnnnnnnnnnnnnnnnnnnnnnnnnnnnnnnnnnnnnnnnnnnnnnnnnnnnnnnnnnnnnnnnnnnnnnnnnnnnnnnnnnnnnnnnnnnnnnnnnnnnnnnnnnnnnnnnnnnnnnnnnnnnnnnnnnnnnnnnnnnnnnnnnnnnnnnnnnnnnnnnnnnnnnnnnnnnnnnnnnnnnnnnnnnnnnnnnnnnnnnnnnnnnnnnnnnnnnnnnnnnnnnnnnnnnnnnnnnnnnnnnnnnnnnnnnnnnnnnnnnnnnnnnnnnnnnnnnnnnnnnnnnnnnnnnnnnnnnnnnnnnnnnnnnnnnnnnnnnnnnnnnnnnnnnnnnnnnnnnnnnnnnnnnnnnnnnnnnnnnnnnnnnnnnnnnnnnnnnnnnnnnnnnnnnnnnnnnnnnnnnnnnnnnnnnnnnnnnnnnnnnnnnnnnnnnnnnnnnnnnnnnnnnnnnnnnnnnnnnnnnnnnnnnnnnnnnnnnnnnnnnnnnnnnnnnnnnnnnnnnnnnnnnnnnnnnnnnnnnnnnnnnnnnnnnnnnnnnnnnnnnnnnnnnnnnnnnnnnnnnnnnnnnnnnnnnnnnnnnnnnnnnnnnnnnnnnnnnnnnnnnnnnnnnnnnnnnnnnnnnnnnnnnnnnnnnnnnnnnnnnnnnnnnnnnnnnnnnnnnnnnnnnnnnnnnnnnnnnnnnnnnnnnnnnnnnnnnnnnnnnnnnnnnnnnnnnnnnnnnnnnnnnnnnnnnnnnnnnnnnnnnnnnnnnnnnnnnnnnnnnnnnnnnnnnnnnnnnnnnnnnnnnnnnnnnnnnnnnnnnnnnnnnnnnnnnnnnnnnnnnnnnnnnnnnnnnnnnnnnnnnnnnnnnnnnnnnnnnnnnnnnnnnnnnnnnnnnnnnnnnnnnnnnnnnnnnnnnnnnnnnnnnnnnnnnnnnnnnnnnnnnnnnnnnnnnnnnnnnnnnnnnnnnnnnnnnnnnnnnnnnnnnnnnnnnnnnnnnnnnnnnnnnnnnnnnnnnnnnnnnnnnnnnnnnnnnnnnnnnnnnnnnnnnnnnnnnnnnnnnnnnnnnnnnnnnnnnnnnnnnnnnnnnnnnnnnnnnnnnnnnnnnnnnnnnnnnnnnnnnnnnnnnnnnnnnnnnnnnnnnnnnnnnnnnnnnnnnnnnnnnnnnnnnnnnnnnnnnnnnnnnnnnnnnnnnnnnnnnnnnnnnnnnnnnnnnnnnnnnnnnnnnnnnnnnnnnnnnnnnnnnnnnnnnnnnnnnnnnnnnnnnnnnnnnnnnnnnnnnnnnnnnnnnnnnnnnnnnnnnnnnnnnnnnnnnnnnnnnnnnnnnnnnnnnnnnnnnnnnnnnnnnnnnnnnnnnnnnnnnnnnnnnnnnnnnnnnnnnnnnnnnnnnnnnnnnnnnnnnnnnnnnnnnnnnnnnnnnnnnnnnnnnnnnnnnnnnnnnnnnnnnnnnnnnnnnnnnnnnnnnnnnnnnnnnnnnnnnnnnnnnnnnnnnnnnnnnnnnnnnnnnnnnnnnnnnnnnnnnnnnnnnnnnnnnnnnnnnnnnnnnnnnnnnnnnnnnnnnnnnnnnnnnnnnnnnnnnnnnnnnnnnnnnnnnnnnnnnnnnnnnnnnnnnnnnnnnnnnnnnnnnnnnnnnnnnnnnnnnnnnnnnnnnnnnnnnnnnnnnnnnnnnnnnnnnnnnnnnnnnnnnnnnnnnnnnnnnnnnnnnnnnnnnnnnnnnnnnnnnnnnnnnnnnnnnnnnnnnnnnnnnnnnnnnnnnnnnnnnnnnnnnnnnnnnnnnnnnnnnnnnnnnnnnnnnnnnnnnnnnnnnnnnnnnnnnnnnnnnnnnnnnnnnnnnnnnnnnnnnnnnnnnnnnnnnnnnnnnnnnnnnnnnnnnnnnnnnnnnnnnnnnnnnnnnnnnnnnnnnnnnnnnnnnnnnnnnnnnnnnnnnnnnnnnnnnnnnnnnnnnnnnnnnnnnnnnnnnnnnnnnnnnnnnnnnnnnnnnnnnnnnnnnnnnnnnnnnnnnnnnnnnnnnnnnnnnnnnnnnnnnnnnnnnnnnnnnnnnnnnnnnnnnnnnnnnnnnnnnnnnnnnnnnnnnnnnnnnnnnnnnnnnnnnnnnnnnnnnnnnnnnnnnnnnnnnnnnnnnnnnnnnnnnnnnnnnnnnnnnnnnnnnnnnnnnnnnnnnnnnnnnnnnnnnnnnnnnnnnnnnnnnnnnnnnnnnnnnnnnnnnnnnnnnnnnnnnnnnnnnnnnnnnnnnnnnnnnnnnnnnnnnnnnnnnnnnnnnnnnnnnnnnnnnnnnnnnnnnnnnnnnnnnnnnnnnnnnnnnnnnnnnnnnnnnnnnnnnnnnnnnnnnnnnnnnnnnnnnnnnnnnnnnnnnnnnnnnnnnnnnnnnnnnnnnnnnnnnnnnnnnnnnnnnnnnnnnnnnnnnnnnnnnnnnnnnnnnnnnnnnnnnnnnnnnnnnnnnnnnnnnnnnnnnnnnnnnnnnnnnnnnnnnnnnnnnnnnnnnnnnnnnnnnnnnnnnnnnnnnnnnnnnnnnnnnnnnnnnnnnnnnnnnnnnnnnnnnnnnnnnnnnnnnnnnnnnnnnnnnnnnnnnnnnnnnnnnnnnnnnnnnnnnnnnnnnnnnnnnnnnnnnnnnnnnnnnnnnnnnnnnnnnnnnnnnnnnnnnnnnnnnnnnnnnnnnnnnnnnnnnnnnnnnnnnnnnnnnnnnnnnnnnnnnnnnnnnnnnnnnnnnnnnnnnnnnnnnnnnnnnnnnnnnnnnnnnnnnnnnnnnnnnnnnnnnnnnnnnnnnnnnnnnnnnnnnnnnnnnnnnnnnnnnnnnnnnnnnnnnnnnnnnnnnnnnnnnnnnnnnnnnnnnnnnnnnnnnnnnnnnnnnnnnnnnnnnnnnnnnnnnnnnnnnnnnnnnnnnnnnnnnnnnnnnnnnnnnnnnnnnnnnnnnnnnnnnnnnnnnnnnnnnnnnnnnnnnnnnnnnnnnnnnnnnnnnnnnnnnnnnnnnnnnnnnnnnnnnnnnnnnnnnnnnnnnnnnnnnnnnnnnnnnnnnnnnnnnnnnnnnnnnnnnnnnnnnnnnnnnnnnnnnnnnnnnnnnnnnnnnnnnnnnnnnnnnnnnnnnnnnnnnnnnnnnnnnnnnnnnnnnnnnnnnnnnnnnnnnnnnnnnnnnnnnnnnnnnnnnnnnnnnnnnnnnnnnnnnnnnnnnnnnnnnnnnnnnnnnnnnnnnnnnnnnnnnnnnnnnnnnnnnnnnnnnnnnnnnnnnnnnnnnnnnnnnnnnnnnnnnnnnnnnnnnnnnnnnnnnnnnnnnnnnnnnnnnnnnnnnnnnnnnnnnnnnnnnnnnnnnnnnnnnnnnnnnnnnnnnnnnnnnnnnnnnnnnnnnnnnnnnnnnnnnnnnnnnnnnnnnnnnnnnnnnnnnnnnnnnnnnnnnnnnnnnnnnnnnnnnnnnnnnnnnnnnnnnnnnnnnnnnnnnnnnnnnnnnnnnnnnnnnnnnnnnnnnnnnnnnnnnnnnnnnnnnnnnnnnnnnnnnnnnnnnnnnnnnnnnnnnnnnnnnnnnnnnnnnnnnnnnnnnnnnnnnnnnnnnnnnnnnnnnnnnnnnnnnnnnnnnnnnnnnnnnnnnnnnnnnnnnnnnnnnnnnnnnnnnnnnnnnnnnnnnnnnnnnnnnnnnnnnnnnnnnnnnnnnnnnnnnnnnnnnnnnnnnnnnnnnnnnnnnnnnnnnnnnnnnnnnnnnnnnnnnnnnnnnnnnnnnnnnnnnnnnnnnnnnnnnnnnnnnnnnnnnnnnnnnnnnnnnnnnnnnnnnnnnnnnnnnnnnnnnnnnnnnnnnnnnnnnnnnnnnnnnnnnnnnnnnnnnnnnnnnnnnnnnnnnnnnnnnnnnnnnnnnnnnnnnnnnnnnnnnnnnnnnnnnnnnnnnnnnnnnnnnnnnnnnnnnnnnnnnnnnnnnnnnnnnnnnnnnnnnnnnnnnnnnnnnnnnnnnnnnnnnnnnnnnnnnnnnnnnnnnnnnnnnnnnnnnnnnnnnnnnnnnnnnnnnnnnnnnnnnnnnnnnnnnnnnnnnnnnnnnnnnnnnnnnnnnnnnnnnnnnnnnnnnnnnnnnnnnnnnnnnnnnnnnnnnnnnnnnnnnnnnnnnnnnnnnnnnnnnnnnnnnnnnnnnnnnnnnnnnnnnnnnnnnnnnnnnnnnnnnnnnnnnnnnnnnnnnnnnnnnnnnnnnnnnnnnnnnnnnnnnnnnnnnnnnnnnnnnnnnnnnnnnnnnnnnnnnnnnnnnnnnnnnnnnnnnnnnnnnnnnnnnnnnnnnnnnnnnnnnnnnnnnnnnnnnnnnnnnnnnnnnnnnnnnnnnnnnnnnnnnnnnnnnnnnnnnnnnnnnnnnnnnnnnnnnnnnnnnnnnnnnnnnnnnnnnnnnnnnnnnnnnnnnnnnnnnnnnnnnnnnnnnnnnnnnnnnnnnnnnnnnnnnnnnnnnnnnnnnnnnnnnnnnnnnnnnnnnnnnnnnnnnnnnnnnnnnnnnnnnnnnnnnnnnnnnnnnnnnnnnnnnnnnnnnnnnnnnnnnnnnnnnnnnnnnnnnnnnnnnnnnnnnnnnnnnnnnnnnnnnnnnnnnnnnnnnnnnnnnnnnnnnnnnnnnnnnnnnnnnnnnnnnnnnnnnnnnnnnnnnnnnnnnnnnnnnnnnnnnnnnnnnnnnnnnnnnnnnnnnnnnnnnnnnnnnnnnnnnnnnnnnnnnnnnnnnnnnnnnnnnnnnnnnnnnnnnnnnnnnnnnnnnnnnnnnnnnnnnnnnnnnnnnnnnnnnnnnnnnnnnnnnnnnnnnnnnnnnnnnnnnnnnnnnnnnnnnnnnnnnnnnnnnnnnnnnnnnnnnnnnnnnnnnnnnnnnnnnnnnnnnnnnnnnnnnnnnnnnnnnnnnnnnnnnnnnnnnnnnnnnnnnnnnnnnnnnnnnnnnnnnnnnnnnnnnnnnnnnnnnnnnnnnnnnnnnnnnnnnnnnnnnnnnnnnnnnnnnnnnnnnnnnnnnnnnnnnnnnnnnnnnnnnnnnnnnnnnnnnnnnnnnnnnnnnnnnnnnnnnnnnnnnnnnnnnnnnnnnnnnnnnnnnnnnnnnnnnnnnnnnnnnnnnnnnnnnnnnnnnnnnnnnnnnnnnnnnnnnnnnnnnnnnnnnnnnnnnnnnnnnnnnnnnnnnnnnnnnnnnnnnnnnnnnnnnnnnnnnnnnnnnnnnnnnnnnnnnnnnnnnnnnnnnnnnnnnnnnnnnnnnnnnnnnnnnnnnnnnnnnnnnnnnnnnnnnnnnnnnnnnnnnnnnnnnnnnnnnnnnnnnnnnnnnnnnnnnnnnnnnnnnnnnnnnnnnnnnnnnnnnnnnnnnnnnnnnnnnnnnnnnnnnnnnnnnnnnnnnnnnnnnnnnnnnnnnnnnnnnnnnnnnnnnnnnnnnnnnnnnnnnnnnnnnnnnnnnnnnnnnnnnnnnnnnnnnnnnnnnnnnnnnnnnnnnnnnnnnnnnnnnnnnnnnnnnnnnnnnnnnnnnnnnnnnnnnnnnnnnnnnnnnnnnnnnnnnnnnnnnnnnnnnnnnnnnnnnnnnnnnnnnnnnnnnnnnnnnnnnnnnnnnnnnnnnnnnnnnnnnnnnnnnnnnnnnnnnnnnnnnnnnnnnnnnnnnnnnnnnnnnnnnnnnnnnnnnnnnnnnnnnnnnnnnnnnnnnnnnnnnnnnnnnnnnnnnnnnnnnnnnnnnnnnnnnnnnnnnnnnnnnnnnnnnnnnnnnnnnnnnnnnnnnnnnnnnnnnnnnnnnnnnnnnnnnnnnnnnnnnnnnnnnnnnnnnnnnnnnnnnnnnnnnnnnnnnnnnnnnnnnnnnnnnnnnnnnnnnnnnnnnnnnnnnnnnnnnnnnnnnnnnnnnnnnnnnnnnnnnnnnnnnnnnnnnnnnnnnnnnnnnnnnnnnnnnnnnnnnnnnnnnnnnnnnnnnnnnnnnnnnnnnnnnnnnnnnnnnnnnnnnnnnnnnnnnnnnnnnnnnnnnnnnnnnnnnnnnnnnnnnnnnnnnnnnnnnnnnnnnnnnnnnnnnnnnnnnnnnnnnnnnnnnnnnnnnnnnnnnnnnnnnnnnnnnnnnnnnnnnnnnnnnnnnnnnnnnnnnnnnnnnnnnnnnnnnnnnnnnnnnnnnnnnnnnnnnnnnnnnnnnnnnnnnnnnnnnnnnnnnnnnnnnnnnnnnnnnnnnnnnnnnnnnnnnnnnnnnnnnnnnnnnnnnnnnnnnnnnnnnnnnnnnnnnnnnnnnnnnnnnnnnnnnnnnnnnnnnnnnnnnnnnnnnnnnnnnnnnnnnnnnnnnnnnnnnnnnnnnnnnnnnnnnnnnnnnnnnnnnnnnnnnnnnnnnnnnnnnnnnnnnnnnnnnnnnnnnnnnnnnnnnnnnnnnnnnnnnnnnnnnnnnnnnnnnnnnnnnnnnnnnnnnnnnnnnnnnnnnnnnnnnnnnnnnnnnnnnnnnnnnnnnnnnnnnnnnnnnnnnnnnnnnnnnnnnnnnnnnnnnnnnnnnnnnnnnnnnnnnnnnnnnnnnnnnnnnnnnnnnnnnnnnnnnnnnnnnnnnnnnnnnnnnnnnnnnnnnnnnnnnnnnnnnnnnnnnnnnnnnnnnnnnnnnnnnnnnnnnnnnnnnnnnnnnnnnnnnnnnnnnnnnnnnnnnnnnnnnnnnnnnnnnnnnnnnnnnnnnnnnnnnnnnnnnnnnnnnnnnnnnnnnnnnnnnnnnnnnnnnnnnnnnnnnnnnnnnnnnnnnnnnnnnnnnnnnnnnnnnnnnnnnnnnnnnnnnnnnnnnnnnnnnnnnnnnnnnnnnnnnnnnnnnnnnnnnnnnnnnnnnnnnnnnnnnnnnnnnnnnnnnnnnnnnnnnnnnnnnnnnnnnnnnnnnnnnnnnnnnnnnnnnnnnnnnnnnnnnnnnnnnnnnnnnnnnnnnnnnnnnnnnnnnnnnnnnnnnnnnnnnnnnnnnnnnnnnnnnnnnnnnnnnnnnnnnnnnnnnnnnnnnnnnnnnnnnnnnnnnnnnnnnnnnnnnnnnnnnnnnnnnnnnnnnnnnnnnnnnnnnnnnnnnnnnnnnnnnnnnnnnnnnnnnnnnnnnnnnnnnnnnnnnnnnnnnnnnnnnnnnnnnnnnnnnnnnnnnnnnnnnnnnnnnnnnnnnnnnnnnnnnnnnnnnnnnnnnnnnnnnnnnnnnnnnnnnnnnnnnnnnnnnnnnnnnnnnnnnnnnnnnnnnnnnnnnnnnnnnnnnnnnnnnnnnnnnnnnnnnnnnnnnnnnnnnnnnnnnnnnnnnnnnnnnnnnnnnnnnnnnnnnnnnnnnnnnnnnnnnnnnnnnnnnnnnnnnnnnnnnnnnnnnnnnnnnnnnnnnnnnnnnnnnnnnnnnnnnnnnnnnnnnnnnnnnnnnnnnnnnnnnnnnnnnnnnnnnnnnnnnnnnnnnnnnnnnnnnnnnnnnnnnnnnnnnnnnnnnnnnnnnnnnnnnnnnnnnnnnnnnnnnnnnnnnnnnnnnnnnnnnnnnnnnnnnnnnnnnnnnnnnnnnnnnnnnnnnnnnnnnnnnnnnnnnnnnnnnnnnnnnnnnnnnnnnnnnnnnnnnnnnnnnnnnnnnnnnnnnnnnnnnnnnnnnnnnnnnnnnnnnnnnnnnnnnnnnnnnnnnnnnnnnnnnnnnnnnnnnnnnnnnnnnnnnnnnnnnnnnnnnnnnnnnnnnnnnnnnnnnnnnnnnnnnnnnnnnnnnnnnnnnnnnnnnnnnnnnnnnnnnnnnnnnnnnnnnnnnnnnnnnnnnnnnnnnnnnnnnnnnnnnnnnnnnnnnnnnnnnnnnnnnnnnnnnnnnnnnnnnnnnnnnnnnnnnnnnnnnnnnnnnnnnnnnnnnnnnnnnnnnnnnnnnnnnnnnnnnnnnnnnnnnnnnnnnnnnnnnnnnnnnnnnnnnnnnnnnnnnnnnnnnnnnnnnnnnnnnnnnnnnnnnnnnnnnnnnnnnnnnnnnnnnnnnnnnnnnnnnnnnnnnnnnnnnnnnnnnnnnnnnnnnnnnnnnnnnnnnnnnnnnnnnnnnnnnnnnnnnnnnnnnnnnnnnnnnnnnnnnnnnnnnnnnnnnnnnnnnnnnnnnnnnnnnnnnnnnnnnnnnnnnnnnnnnnnnnnnnnnnnnnnnnnnnnnnnnnnnnnnnnnnnnnnnnnnnnnnnnnnnnnnnnnnnnnnnnnnnnnnnnnnnnnnnnnnnnnnnnnnnnnnnnnnnnnnnnnnnnnnnnnnnnnnnnnnnnnnnnnnnnnnnnnnnnnnnnnnnnnnnnnnnnnnnnnnnnnnnnnnnnnnnnnnnnnnnnnnnnnnnnnnnnnnnnnnnnnnnnnnnnnnnnnnnnnnnnnnnnnnnnnnnnnnnnnnnnnnnnnnnnnnnnnnnnnnnnnnnnnnnnnnnnnnnnnnnnnnnnnnnnnnnnnnnnnnnnnnnnnnnnnnnnnnnnnnnnnnnnnnnnnnnnnnnnnnnnnnnnnnnnnnnnnnnnnnnnnnnnnnnnnnnnnnnnnnnnnnnnnnnnnnnnnnnnnnnnnnnnnnnnnnnnnnnnnnnnnnnnnnnnnnnnnnnnnnnnnnnnnnnnnnnnnnnnnnnnnnnnnnnnnnnnnnnnnnnnnnnnnnnnnnnnnnnnnnnnnnnnnnnnnnnnnnnnnnnnnnnnnnnnnnnnnnnnnnnnnnnnnnnnnnnnnnnnnnnnnnnnnnnnnnnnnnnnnnnnnnnnnnnnnnnnnnnnnnnnnnnnnnnnnnnnnnnnnnnnnnnnnnnnnnnnnnnnnnnnnnnnnnnnnnnnnnnnnnnnnnnnnnnnnnnnnnnnnnnnnnnnnnnnnnnnnnnnnnnnnnnnnnnnnnnnnnnnnnnnnnnnnnnnnnnnnnnnnnnnnnnnnnnnnnnnnnnnnnnnnnnnnnnnnnnnnnnnnnnnnnnnnnnnnnnnnnnnnnnnnnnnnnnnnnnnnnnnnnnnnnnnnnnnnnnnnnnnnnnnnnnnnnnnnnnnnnnnnnnnnnnnnnnnnnnnnnnnnnnnnnnnnnnnnnnnnnnnnnnnnnnnnnnnnnnnnnnnnnnnnnnnnnnnnnnnnnnnnnnnnnnnnnnnnnnnnnnnnnnnnnnnnnnnnnnnnnnnnnnnnnnnnnnnnnnnnnnnnnnnnnnnnnnnnnnnnnnnnnnnnnnnnnnnnnnnnnnnnnnnnnnnnnnnnnnnnnnnnnnnnnnnnnnnnnnnnnnnnnnnnnnnnnnnnnnnnnnnnnnnnnnnnnnnnnnnnnnnnnnnnnnnnnnnnnnnnnnnnnnnnnnnnnnnnnnnnnnnnnnnnnnnnnnnnnnnnnnnnnnnnnnnnnnnnnnnnnnnnnnnnnnnnnnnnnnnnnnnnnnnnnnnnnnnnnnnnnnnnnnnnnnnnnnnnnnnnnnnnnnnnnnnnnnnnnnnnnnnnnnnnnnnnnnnnnnnnnnnnnnnnnnnnnnnnnnnnnnnnnnnnnnnnnnnnnnnnnnnnnnnnnnnnnnnnnnnnnnnnnnnnnnnnnnnnnnnnnnnnnnnnnnnnnnnnnnnnnnnnnnnnnnnnnnnnnnnnnnnnnnnnnnnnnnnnnnnnnnnnnnnnnnnnnnnnnnnnnnnnnnnnnnnnnnnnnnnnnnnnnnnnnnnnnnnnnnnnnnnnnnnnnnnnnnnnnnnnnnnnnnnnnnnnnnnnnnnnnnnnnnnnnnnnnnnnnnnnnnnnnnnnnnnnnnnnnnnnnnnnnnnnnnnnnnnnnnnnnnnnnnnnnnnnnnnnnnnnnnnnnnnnnnnnnnnnnnnnnnnnnnnnnnnnnnnnnnnnnnnnnnnnnnnnnnnnnnnnnnnnnnnnnnnnnnnnnnnnnnnnnnnnnnnnnnnnnnnnnnnnnnnnnnnnnnnnnnnnnnnnnnnnnnnnnnnnnnnnnnnnnnnnnnnnnnnnnnnnnnnnnnnnnnnnnnnnnnnnnnnnnnnnnnnnnnnnnnnnnnnnnnnnnnnnnnnnnnnnnnnnnnnnnnnnnnnnnnnnnnnnnnnnnnnnnnnnnnnnnnnnnnnnnnnnnnnnnnnnnnnnnnnnnnnnnnnnnnnnnnnnnnnnnnnnnnnnnnnnnnnnnnnnnnnnnnnnnnnnnnnnnnnnnnnnnnnnnnnnnnnnnnnnnnnnnnnnnnnnnnnnnnnnnnnnnnnnnnnnnnnnnnnnnnnnnnnnnnnnnnnnnnnnnnnnnnnnnnnnnnnnnnnnnnnnnnnnnnnnnnnnnnnnnnnnnnnnnnnnnnnnnnnnnnnnnnnnnnnnnnnnnnnnnnnnnnnnnnnnnnnnnnnnnnnnnnnnnnnnnnnnnnnnnnnnnnnnnnnnnnnnnnnnnnnnnnnnnnnnnnnnnnnnnnnnnnnnnnnnnnnnnnnnnnnnnnnnnnnnnnnnnnnnnnnnnnnnnnnnnnnnnnnnnnnnnnnnnnnnnnnnnnnnnnnnnnnnnnnnnnnnnnnnnnnnnnnnnnnnnnnnnnnnnnnnnnnnnnnnnnnnnnnnnnnnnnnnnnnnnnnnnnnnnnnnnnnnnnnnnnnnnnnnnnnnnnnnnnnnnnnnnnnnnnnnnnnnnnnnnnnnnnnnnnnnnnnnnnnnnnnnnnnnnnnnnnnnnnnnnnnnnnnnnnnnnnnnnnnnnnnnnnnnnnnnnnnnnnnnnnnnnnnnnnnnnnnnnnnnnnnnnnnnnnnnnnnnnnnnnnnnnnnnnnnnnnnnnnnnnnnnnnnnnnnnnnnnnnnnnnnnnnnnnnnnnnnnnnnnnnnnnnnnnnnnnnnnnnnnnnnnnnnnnnnnnnnnnnnnnnnnnnnnnnnnnnnnnnnnnnnnnnnnnnnnnnnnnnnnnnnnnnnnnnnnnnnnnnnnnnnnnnnnnnnnnnnnnnnnnnnnnnnnnnnnnnnnnnnnnnnnnnnnnnnnnnnnnnnnnnnnnnnnnnnnnnnnnnnnnnnnnnnnnnnnnnnnnnnnnnnnnnnnnnnnnnnnnnnnnnnnnnnnnnnnnnnnnnnnnnnnnnnnnnnnnnnnnnnnnnnnnnnnnnnnnnnnnnnnnnnnnnnnnnnnnnnnnnnnnnnnnnnnnnnnnnnnnnnnnnnnnnnnnnnnnnnnnnnnnnnnnnnnnnnnnnnnnnnnnnnnnnnnnnnnnnnnnnnnnnnnnnnnnnnnnnnnnnnnnnnnnnnnnnnnnnnnnnnnnnnnnnnnnnnnnnnnnnnnnnnnnnnnnnnnnnnnnnnnnnnnnnnnnnnnnnnnnnnnnnnnnnnnnnnnnnnnnnnnnnnnnnnnnnnnnnnnnnnnnnnnnnnnnnnnnnnnnnnnnnnnnnnnnnnnnnnnnnnnnnnnnnnnnnnnnnnnnnnnnnnnnnnnnnnnnnnnnnnnnnnnnnnnnnnnnnnnnnnnnnnnnnnnnnnnnnnnnnnnnnnnnnnnnnnnnnnnnnnnnnnnnnnnnnnnnnnnnnnnnnnnnnnnnnnnnnnnnnnnnnnnnnnnnnnnnnnnnnnnnnnnnnnnnnnnnnnnnnnnnnnnnnnnnnnnnnnnnnnnnnnnnnnnnnnnnnnnnnnnnnnnnnnnnnnnnnnnnnnnnnnnnnnnnnnnnnnnnnnnnnnnnnnnnnnnnnnnnnnnnnnnnnnnnnnnnnnnnnnnnnnnnnnnnnnnnnnnnnnnnnnnnnnnnnnnnnnnnnnnnnnnnnnnnnnnnnnnnnnnnnnnnnnnnnnnnnnnnnnnnnnnnnnnnnnnnnnnnnnnnnnnnnnnnnnnnnnnnnnnnnnnnnnnnnnnnnnnnnnnnnnnnnnnnnnnnnnnnnnnnnnnnnnnnnnnnnnnnnnnnnnnnnnnnnnnnnnnnnnnnnnnnnnnnnnnnnnnnnnnnnnnnnnnnnnnnnnnnnnnnnnnnnnnnnnnnnnnnnnnnnnnnnnnnnnnnnnnnnnnnnnnnnnnnnnnnnnnnnnnnnnnnnnnnnnnnnnnnnnnnnnnnnnnnnnnnnnnnnnnnnnnnnnnnnnnnnnnnnnnnnnnnnnnnnnnnnnnnnnnnnnnnnnnnnnnnnnnnnnnnnnnnnnnnnnnnnnnnnnnnnnnnnnnnnnnnnnnnnnnnnnnnnnnnnnnnnnnnnnnnnnnnnnnnnnnnnnnnnnnnnnnnnnnnnnnnnnnnnnnnnnnnnnnnnnnnnnnnnnnnnnnnnnnnnnnnnnnnnnnnnnnnnnnnnnnnnnnnnnnnnnnnnnnnnnnnnnnnnnnnnnnnnnnnnnnnnnnnnnnnnnnnnnnnnnnnnnnnnnnnnnnnnnnnnnnnnnnnnnnnnnnnnnnnnnnnnnnnnnnnnnnnnnnnnnnnnnnnnnnnnnnnnnnnnnnnnnnnnnnnnnnnnnnnnnnnnnnnnnnnnnnnnnnnnnnnnnnnnnnnnnnnnnnnnnnnnnnnnnnnnnnnnnnnnnnnnnnnnnnnnnnnnnnnnnnnnnnnnnnnnnnnnnnnnnnnnnnnnnnnnnnnnnnnnnnnnnnnnnnnnnnnnnnnnnnnnnnnnnnnnnnnnnnnnnnnnnnnnnnnnnnnnnnnnnnnnnnnnnnnnnnnnnnnnnnnnnnnnnnnnnnnnnnnnnnnnnnnnnnnnnnnnnnnnnnnnnnnnnnnnnnnnnnnnnnnnnnnnnnnnnnnnnnnnnnnnnnnnnnnnnnnnnnnnnnnnnnnnnnnnnnnnnnnnnnnnnnnnnnnnnnnnnnnnnnnnnnnnnnnnnnnnnnnnnnnnnnnnnnnnnnnnnnnnnnnnnnnnnnnnnnnnnnnnnnnnnnnnnnnnnnnnnnnnnnnnnnnnnnnnnnnnnnnnnnnnnnnnnnnnnnnnnnnnnnnnnnnnnnnnnnnnnnnnnnnnnnnnnnnnnnnnnnnnnnnnnnnnnnnnnnnnnnnnnnnnnnnnnnnnnnnnnnnnnnnnnnnnnnnnnnnnnnnnnnnnnnnnnnnnnnnnnnnnnnnnnnnnnnnnnnnnnnnnnnnnnnnnnnnnnnnnnnnnnnnnnnnnnnnnnnnnnnnnnnnnnnnnnnnnnnnnnnnnnnnnnnnnnnnnnnnnnnnnnnnnnnnnnnnnnnnnnnnnnnnnnnnnnnnnnnnnnnnnnnnnnnnnnnnnnnnnnnnnnnnnnnnnnnnnnnnnnnnnnnnnnnnnnnnnnnnnnnnnnnnnnnnnnnnnnnnnnnnnnnnnnnnnnnnnnnnnnnnnnnnnnnnnnnnnnnnnnnnnnnnnnnnnnnnnnnnnnnnnnnnnnnnnnnnnnnnnnnnnnnnnnnnnnnnnnnnnnnnnnnnnnnnnnnnnnnnnnnnnnnnnnnnnnnnnnnnnnnnnnnnnnnnnnnnnnnnnnnnnnnnnnnnnnnnnnnnnnnnnnnnnnnnnnnnnnnnnnnnnnnnnnnnnnnnnnnnnnnnnnnnnnnnnnnnnnnnnnnnnnnnnnnnnnnnnnnnnnnnnnnnnnnnnnnnnnnnnnnnnnnnnnnnnnnnnnnnnnnnnnnnnnnnnnnnnnnnnnnnnnnnnnnnnnnnnnnnnnnnnnnnnnnnnnnnnnnnnnnnnnnnnnnnnnnnnnnnnnnnnnnnnnnnnnnnnnnnnnnnnnnnnnnnnnnnnnnnnnnnnnnnnnnnnnnnnnnnnnnnnnnnnnnnnnnnnnnnnnnnnnnnnnnnnnnnnnnnnnnnnnnnnnnnnnnnnnnnnnnnnnnnnnnnnnnnnnnnnnnnnnnnnnnnnnnnnnnnnnnnnnnnnnnnnnnnnnnnnnnnnnnnnnnnnnnnnnnnnnnnnnnnnnnnnnnnnnnnnnnnnnnnnnnnnnnnnnnnnnnnnnnnnnnnnnnnnnnnnnnnnnnnnnnnnnnnnnnnnnnnnnnnnnnnnnnnnnnnnnnnnnnnnnnnnnnnnnnnnnnnnnnnnnnnnnnnnnnnnnnnnnnnnnnnnnnnnnnnnnnnnnnnnnnnnnnnnnnnnnnnnnnnnnnnnnnnnnnnnnnnnnnnnnnnnnnnnnnnnnnnnnnnnnnnnnnnnnnnnnnnnnnnnnnnnnnnnnnnnnnnnnnnnnnnnnnnnnnnnnnnnnnnnnnnnnnnnnnnnnnnnnnnnnnnnnnnnnnnnnnnnnnnnnnnnnnnnnnnnnnnnnnnnnnnnnnnnnnnnnnnnnnnnnnnnnnnnnnnnnnnnnnnnnnnnnnnnnnnnnnnnnnnnnnnnnnnnnnnnnnnnnnnnnnnnnnnnnnnnnnnnnnnnnnnnnnnnnnnnnnnnnnnnnnnnnnnnnnnnnnnnnnnnnnnnnnnnnnnnnnnnnnnnnnnnnnnnnnnnnnnnnnnnnnnnnnnnnnnnnnnnnnnnnnnnnnnnnnnnnnnnnnnnnnnnnnnnnnnnnnnnnnnnnnnnnnnnnnnnnnnnnnnnnnnnnnnnnnnnnnnnnnnnnnnnnnnnnnnnnnnnnnnnnnnnnnnnnnnnnnnnnnnnnnnnnnnnnnnnnnnnnnnnnnnnnnnnnnnnnnnnnnnnnnnnnnnnnnnnnnnnnnnnnnnnnnnnnnnnnnnnnnnnnnnnnnnnnnnnnnnnnnnnnnnnnnnnnnnnnnnnnnnnnnnnnnnnnnnnnnnnnnnnnnnnnnnnnnnnnnnnnnnnnnnnnnnnnnnnnnnnnnnnnnnnnnnnnnnnnnnnnnnnnnnnnnnnnnnnnnnnnnnnnnnnnnnnnnnnnnnnnnnnnnnnnnnnnnnnnnnnnnnnnnnnnnnnnnnnnnnnnnnnnnnnnnnnnnnnnnnnnnnnnnnnnnnnnnnnnnnnnnnnnnnnnnnnnnnnnnnnnnnnnnnnnnnnnnnnnnnnnnnnnnnnnnnnnnnnnnnnnnnnnnnnnnnnnnnnnnnnnnnnnnnnnnnnnnnnnnnnnnnnnnnnnnnnnnnnnnnnnnnnnnnnnnnnnnnnnnnnnnnnnnnnnnnnnnnnnnnnnnnnnnnnnnnnnnnnnnnnnnnnnnnnnnnnnnnnnnnnnnnnnnnnnnnnnnnnnnnnnnnnnnnnnnnnnnnnnnnnnnnnnnnnnnnnnnnnnnnnnnnnnnnnnnnnnnnnnnnnnnnnnnnnnnnnnnnnnnnnnnnnnnnnnnnnnnnnnnnnnnnnnnnnnnnnnnnnnnnnnnnnnnnnnnnnnnnnnnnnnnnnnnnnnnnnnnnnnnnnnnnnnnnnnnnnnnnnnnnnnnnnnnnnnnnnnnnnnnnnnnnnnnnnnnnnnnnnnnnnnnnnnnnnnnnnnnnnnnnnnnnnnnnnnnnnnnnnnnnnnnnnnnnnnnnnnnnnnnnnnnnnnnnnnnnnnnnnnnnnnnnnnnnnnnnnnnnnnnnnnnnnnnnnnnnnnnnnnnnnnnnnnnnnnnnnnnnnnnnnnnnnnnnnnnnnnnnnnnnnnnnnnnnnnnnnnnnnnnnnnnnnnnnnnnnnnnnnnnnnnnnnnnnnnnnnnnnnnnnnnnnnnnnnnnnnnnnnnnnnnnnnnnnnnnnnnnnnnnnnnnnnnnnnnnnnnnnnnnnnnnnnnnnnnnnnnnnnnnnnnnnnnnnnnnnnnnnnnnnnnnnnnnnnnnnnnnnnnnnnnnnnnnnnnnnnnnnnnnnnnnnnnnnnnnnnnnnnnnnnnnnnnnnnnnnnnnnnnnnnnnnnnnnnnnnnnnnnnnnnnnnnnnnnnnnnnnnnnnnnnnnnnnnnnnnnnnnnnnnnnnnnnnnnnnnnnnnnnnnnnnnnnnnnnnnnnnnnnnnnnnnnnnnnnnnnnnnnnnnnnnnnnnnnnnnnnnnnnnnnnnnnnnnnnnnnnnnnnnnnnnnnnnnnnnnnnnnnnnnnnnnnnnnnnnnnnnnnnnnnnnnnnnnnnnnnnnnnnnnnnnnnnnnnnnnnnnnnnnnnnnnnnnnnnnnnnnnnnnnnnnnnnnnnnnnnnnnnnnnnnnnnnnnnnnnnnnnnnnnnnnnnnnnnnnnnnnnnnnnnnnnnnnnnnnnnnnnnnnnnnnnnnnnnnnnnnnnnnnnnnnnnnnnnnnnnnnnnnnnnnnnnnnnnnnnnnnnnnnnnnnnnnnnnnnnnnnnnnnnnnnnnnnnnnnnnnnnnnnnnnnnnnnnnnnnnnnnnnnnnnnnnnnnnnnnnnnnnnnnnnnnnnnnnnnnnnnnnnnnnnnnnnnnnnnnnnnnnnnnnnnnnnnnnnnnnnnnnnnnnnnnnnnnnnnnnnnnnnnnnnnnnnnnnnnnnnnnnnnnnnnnnnnnnnnnnnnnnnnnnnnnnnnnnnnnnnnnnnnnnnnnnnnnnnnnnnnnnnnnnnnnnnnnnnnnnnnnnnnnnnnnnnnnnnnnnnnnnnnnnnnnnnnnnnnnnnnnnnnnnnnnnnnnnnnnnnnnnnnnnnnnnnnnnnnnnnnnnnnnnnnnnnnnnnnnnnnnnnnnnnnnnnnnnnnnnnnnnnnnnnnnnnnnnnnnnnnnnnnnnnnnnnnnnnnnnnnnnnnnnnnnnnnnnnnnnnnnnnnnnnnnnnnnnnnnnnnnnnnnnnnnnnnnnnnnnnnnnnnnnnnnnnnnnnnnnnnnnnnnnnnnnnnnnnnnnnnnnnnnnnnnnnnnnnnnnnnnnnnnnnnnnnnnnnnnnnnnnnnnnnnnnnnnnnnnnnnnnnnnnnnnnnnnnnnnnnnnnnnnnnnnnnnnnnnnnnnnnnnnnnnnnnnnnnnnnnnnnnnnnnnnnnnnnnnnnnnnnnnnnnnnnnnnnnnnnnnnnnnnnnnnnnnnnnnnnnnnnnnnnnnnnnnnnnnnnnnnnnnnnnnnnnnnnnnnnnnnnnnnnnnnnnnnnnnnnnnnnnnnnnnnnnnnnnnnnnnnnnnnnnnnnnnnnnnnnnnnnnnnnnnnnnnnnnnnnnnnnnnnnnnnnnnnnnnnnnnnnnnnnnnnnnnnnnnnnnnnnnnnnnnnnnnnnnnnnnnnnnnnnnnnnnnnnnnnnnnnnnnnnnnnnnnnnnnnnnnnnnnnnnnnnnnnnnnnnnnnnnnnnnnnnnnnnnnnnnnnnnnnnnnnnnnnnnnnnnnnnnnnnnnnnnnnnnnnnnnnnnnnnnnnnnnnnnnnnnnnnnnnnnnnnnnnnnnnnnnnnnnnnnnnnnnnnnnnnnnnnnnnnnnnnnnnnnnnnnnnnnnnnnnnnnnnnnnnnnnnnnnnnnnnnnnnnnnnnnnnnnnnnnnnnnnnnnnnnnnnnnnnnnnnnnnnnnnnnnnnnnnnnnnnnnnnnnnnnnnnnnnnnnnnnnnnnnnnnnnnnnnnnnnnnnnnnnnnnnnnnnnnnnnnnnnnnnnnnnnnnnnnnnnnnnnnnnnnnnnnnnnnnnnnnnnnnnnnnnnnnnnnnnnnnnnnnnnnnnnnnnnnnnnnnnnnnnnnnnnnnnnnnnnnnnnnnnnnnnnnnnnnnnnnnnnnnnnnnnnnnnnnnnnnnnnnnnnnnnnnnnnnnnnnnnnnnnnnnnnnnnnnnnnnnnnnnnnnnnnnnnnnnnnnnnnnnnnnnnnnnnnnnnnnnnnnnnnnnnnnnnnnnnnnnnnnnnnnnnnnnnnnnnnnnnnnnnnnnnnnnnnnnnnnnnnnnnnnnnnnnnnnnnnnnnnnnnnnnnnnnnnnnnnnnnnnnnnnnnnnnnnnnnnnnnnnnnnnnnnnnnnnnnnnnnnnnnnnnnnnnnnnnnnnnnnnnnnnnnnnnnnnnnnnnnnnnnnnnnnnnnnnnnnnnnnnnnnnnnnnnnnnnnnnnnnnnnnnnnnnnnnnnnnnnnnnnnnnnnnnnnnnnnnnnnnnnnnnnnnnnnnnnnnnnnnnnnnnnnnnnnnnnnnnnnnnnnnnnnnnnnnnnnnnnnnnnnnnnnnnnnnnnnnnnnnnnnnnnnnnnnnnnnnnnnnnnnnnnnnnnnnnnnnnnnnnnnnnnnnnnnnnnnnnnnnnnnnnnnnnnnnnnnnnnnnnnnnnnnnnnnnnnnnnnnnnnnnnnnnnnnnnnnnnnnnnnnnnnnnnnnnnnnnnnnnnnnnnnnnnnnnnnnnnnnnnnnnnnnnnnnnnnnnnnnnnnnnnnnnnnnnnnnnnnnnnnnnnnnnnnnnnnnnnnnnnnnnnnnnnnnnnnnnnnnnnnnnnnnnnnnnnnnnnnnnnnnnnnnnnnnnnnnnnnnnnnnnnnnnnnnnnnnnnnnnnnnnnnnnnnnnnnnnnnnnnnnnnnnnnnnnnnnnnnnnnnnnnnnnnnnnnnnnnnnnnnnnnnnnnnnnnnnnnnnnnnnnnnnnnnnnnnnnnnnnnnnnnnnnnnnnnnnnnnnnnnnnnnnnnnnnnnnnnnnnnnnnnnnnnnnnnnnnnnnnnnnnnnnnnnnnnnnnnnnnnnnnnnnnnnnnnnnnnnnnnnnnnnnnnnnnnnnnnnnnnnnnnnnnnnnnnnnnnnnnnnnnnnnnnnnnnnnnnnnnnnnnnnnnnnnnnnnnnnnnnnnnnnnnnnnnnnnnnnnnnnnnnnnnnnnnnnnnnnnnnnnnnnnnnnnnnnnnnnnnnnnnnnnnnnnnnnnnnnnnnnnnnnnnnnnnnnnnnnnnnnnnnnnnnnnnnnnnnnnnnnnnnnnnnnnnnnnnnnnnnnnnnnnnnnnnnnnnnnnnnnnnnnnnnnnnnnnnnnnnnnnnnnnnnnnnnnnnnnnnnnnnnnnnnnnnnnnnnnnnnnnnnnnnnnnnnnnnnnnnnnnnnnnnnnnnnnnnnnnnnnnnnnnnnnnnnnnnnnnnnnnnnnnnnnnnnnnnnnnnnnnnnnnnnnnnnnnnnnnnnnnnnnnnnnnnnnnnnnnnnnnnnnnnnnnnnnnnnnnnnnnnnnnnnnnnnnnnnnnnnnnnnnnnnnnnnnnnnnnnnnnnnnnnnnnnnnnnnnnnnnnnnnnnnnnnnnnnnnnnnnnnnnnnnnnnnnnnnnnnnnnnnnnnnnnnnnnnnnnnnnnnnnnnnnnnnnnnnnnnnnnnnnnnnnnnnnnnnnnnnnnnnnnnnnnnnnnnnnnnnnnnnnnnnnnnnnnnnnnnnnnnnnnnnnnnnnnnnnnnnnnnnnnnnnnnnnnnnnnnnnnnnnnnnnnnnnnnnnnnnnnnnnnnnnnnnnnnnnnnnnnnnnnnnnnnnnnnnnnnnnnnnnnnnnnnnnnnnnnnnnnnnnnnnnnnnnnnnnnnnnnnnnnnnnnnnnnnnnnnnnnnnnnnnnnnnnnnnnnnnnnnnnnnnnnnnnnnnnnnnnnnnnnnnnnnnnnnnnnnnnnnnnnnnnnnnnnnnnnnnnnnnnnnnnnnnnnnnnnnnnnnnnnnnnnnnnnnnnnnnnnnnnnnnnnnnnnnnnnnnnnnnnnnnnnnnnnnnnnnnnnnnnnnnnnnnnnnnnnnnnnnnnnnnnnnnnnnnnnnnnnnnnnnnnnnnnnnnnnnnnnnnnnnnnnnnnnnnnnnnnnnnnnnnnnnnnnnnnnnnnnnnnnnnnnnnnnnnnnnnnnnnnnnnnnnnnnnnnnnnnnnnnnnnnnnnnnnnnnnnnnnnnnnnnnnnnnnnnnnnnnnnnnnnnnnnnnnnnnnnnnnnnnnnnnnnnnnnnnnnnnnnnnnnnnnnnnnnnnnnnnnnnnnnnnnnnnnnnnnnnnnnnnnnnnnnnnnnnnnnnnnnnnnnnnnnnnnnnnnnnnnnnnnnnnnnnnnnnnnnnnnnnnnnnnnnnnnnnnnnnnnnnnnnnnnnnnnnnnnnnnnnnnnnnnnnnnnnnnnnnnnnnnnnnnnnnnnnnnnnnnnnnnnnnnnnnnnnnnnnnnnnnnnnnnnnnnnnnnnnnnnnnnnnnnnnnnnnnnnnnnnnnnnnnnnnnnnnnnnnnnnnnnnnnnnnnnnnnnnnnnnnnnnnnnnnnnnnnnnnnnnnnnnnnnnnnnnnnnnnnnnnnnnnnnnnnnnnnnnnnnnnnnnnnnnnnnnnnnnnnnnnnnnnnnnnnnnnnnnnnnnnnnnnnnnnnnnnnnnnnnnnnnnnnnnnnnnnnnnnnnnnnnnnnnnnnnnnnnnnnnnnnnnnnnnnnnnnnnnnnnnnnnnnnnnnnnnnnnnnnnnnnnnnnnnnnnnnnnnnnnnnnnnnnnnnnnnnnnnnnnnnnnnnnnnnnnnnnnnnnnnnnnnnnnnnnnnnnnnnnnnnnnnnnnnnnnnnnnnnnnnnnnnnnnnnnnnnnnnnnnnnnnnnnnnnnnnnnnnnnnnnnnnnnnnnnnnnnnnnnnnnnnnnnnnnnnnnnnnnnnnnnnnnnnnnnnnnnnnnnnnnnnnnnnnnnnnnnnnnnnnnnnnnnnnnnnnnnnnnnnnnnnnnnnnnnnnnnnnnnnnnnnnnnnnnnnnnnnnnnnnnnnnnnnnnnnnnnnnnnnnnnnnnnnnnnnnnnnnnnnnnnnnnnnnnnnnnnnnnnnnnnnnnnnnnnnnnnnnnnnnnnnnnnnnnnnnnnnnnnnnnnnnnnnnnnnnnnnnnnnnnnnnnnnnnnnnnnnnnnnnnnnnnnnnnnnnnnnnnnnnnnnnnnnnnnnnnnnnnnnnnnnnnnnnnnnnnnnnnnnnnnnnnnnnnnnnnnnnnnnnnnnnnnnnnnnnnnnnnnnnnnnnnnnnnnnnnnnnnnnnnnnnnnnnnnnnnnnnnnnnnnnnnnnnnnnnnnnnnnnnnnnnnnnnnnnnnnnnnnnnnnnnnnnnnnnnnnnnnnnnnnnnnnnnnnnnnnnnnnnnnnnnnnnnnnnnnnnnnnnnnnnnnnnnnnnnnnnnnnnnnnnnnnnnnnnnnnnnnnnnnnnnnnnnnnnnnnnnnnnnnnnnnnnnnnnnnnnnnnnnnnnnnnnnnnnnnnnnnnnnnnnnnnnnnnnnnnnnnnnnnnnnnnnnnnnnnnnnnnnnnnnnnnnnnnnnnnnnnnnnnnnnnnnnnnnnnnnnnnnnnnnnnnnnnnnnnnnnnnnnnnnnnnnnnnnnnnnnnnnnnnnnnnnnnnnnnnnnnnnnnnnnnnnnnnnnnnnnnnnnnnnnnnnnnnnnnnnnnnnnnnnnnnnnnnnnnnnnnnnnnnnnnnnnnnnnnnnnnnnnnnnnnnnnnnnnnnnnnnnnnnnnnnnnnnnnnnnnnnnnnnnnnnnnnnnnnnnnnnnnnnnnnnnnnnnnnnnnnnnnnnnnnnnnnnnnnnnnnnnnnnnnnnnnnnnnnnnnnnnnnnnnnnnnnnnnnnnnnnnnnnnnnnnnnnnnnnnnnnnnnnnnnnnnnnnnnnnnnnnnnnnnnnnnnnnnnnnnnnnnnnnnnnnnnnnnnnnnnnnnnnnnnnnnnnnnnnnnnnnnnnnnnnnnnnnnnnnnnnnnnnnnnnnnnnnnnnnnnnnnnnnnnnnnnnnnnnnnnnnnnnnnnnnnnnnnnnnnnnnnnnnnnnnnnnnnnnnnnnnnnnnnnnnnnnnnnnnnnnnnnnnnnnnnnnnnnnnnnnnnnnnnnnnnnnnnnnnnnnnnnnnnnnnnnnnnnnnnnnnnnnnnnnnnnnnnnnnnnnnnnnnnnnnnnnnnnnnnnnnnnnnnnnnnnnnnnnnnnnnnnnnnnnnnnnnnnnnnnnnnnnnnnnnnnnnnnnnnnnnnnnnnnnnnnnnnnnnnnnnnnnnnnnnnnnnnnnnnnnnnnnnnnnnnnnnnnnnnnnnnnnnnnnnnnnnnnnnnnnnnnnnnnnnnnnnnnnnnnnnnnnnnnnnnnnnnnnnnnnnnnnnnnnnnnnnnnnnnnnnnnnnnnnnnnnnnnnnnnnnnnnnnnnnnnnnnnnnnnnnnnnnnnnnnnnnnnnnnnnnnnnnnnnnnnnnnnnnnnnnnnnnnnnnnnnnnnnnnnnnnnnnnnnnnnnnnnnnnnnnnnnnnnnnnnnnnnnnnnnnnnnnnnnnnnnnnnnnnnnnnnnnnnnnnnnnnnnnnnnnnnnnnnnnnnnnnnnnnnnnnnnnnnnnnnnnnnnnnnnnnnnnnnnnnnnnnnnnnnnnnnnnnnnnnnnnnnnnnnnnnnnnnnnnnnnnnnnnnnnnnnnnnnnnnnnnnnnnnnnnnnnnnnnnnnnnnnnnnnnnnnnnnnnnnnnnnnnnnnnnnnnnnnnnnnnnnnnnnnnnnnnnnnnnnnnnnnnnnnnnnnnnnnnnnnnnnnnnnnnnnnnnnnnnnnnnnnnnnnnnnnnnnnnnnnnnnnnnnnnnnnnnnnnnnnnnnnnnnnnnnnnnnnnnnnnnnnnnnnnnnnnnnnnnnnnnnnnnnnnnnnnnnnnnnnnnnnnnnnnnnnnnnnnnnnnnnnnnnnnnnnnnnnnnnnnnnnnnnnnnnnnnnnnnnnnnnnnnnnnnnnnnnnnnnnnnnnnnnnnnnnnnnnnnnnnnnnnnnnnnnnnnnnnnnnnnnnnnnnnnnnnnnnnnnnnnnnnnnnnnnnnnnnnnnnnnnnnnnnnnnnnnnnnnnnnnnnnnnnnnnnnnnnnnnnnnnnnnnnnnnnnnnnnnnnnnnnnnnnnnnnnnnnnnnnnnnnnnnnnnnnnnnnnnnnnnnnnnnnnnnnnnnnnnnnnnnnnnnnnnnnnnnnnnnnnnnnnnnnnnnnnnnnnnnnnnnnnnnnnnnnnnnnnnnnnnnnnnnnnnnnnnnnnnnnnnnnnnnnnnnnnnnnnnnnnnnnnnnnnnnnnnnnnnnnnnnnnnnnnnnnnnnnnnnnnnnnnnnnnnnnnnnnnnnnnnnnnnnnnnnnnnnnnnnnnnnnnnnnnnnnnnnnnnnnnnnnnnnnnnnnnnnnnnnnnnnnnnnnnnnnnnnnnnnnnnnnnnnnnnnnnnnnnnnnnnnnnnnnnnnnnnnnnnnnnnnnnnnnnnnnnnnnnnnnnnnnnnnnnnnnnnnnnnnnnnnnnnnnnnnnnnnnnnnnnnnnnnnnnnnnnnnnnnnnnnnnnnnnnnnnnnnnnnnnnnnnnnnnnnnnnnnnnnnnnnnnnnnnnnnnnnnnnnnnnnnnnnnnnnnnnnnnnnnnnnnnnnnnnnnnnnnnnnnnnnnnnnnnnnnnnnnnnnnnnnnnnnnnnnnnnnnnnnnnnnnnnnnnnnnnnnnnnnnnnnnnnnnnnnnnnnnnnnnnnnnnnnnnnnnnnnnnnnnnnnnnnnnnnnnnnnnnnnnnnnnnnnnnnnnnnnnnnnnnnnnnnnnnnnnnnnnnnnnnnnnnnnnnnnnnnnnnnnnnnnnnnnnnnnnnnnnnnnnnnnnnnnnnnnnnnnnnnnnnnnnnnnnnnnnnnnnnnnnnnnnnnnnnnnnnnnnnnnnnnnnnnnnnnnnnnnnnnnnnnnnnnnnnnnnnnnnnnnnnnnnnnnnnnnnnnnnnnnnnnnnnnnnnnnnnnnnnnnnnnnnnnnnnnnnnnnnnnnnnnnnnnnnnnnnnnnnnnnnnnnnnnnnnnnnnnnnnnnnnnnnnnnnnnnnnnnnnnnnnnnnnnnnnnnnnnnnnnnnnnnnnnnnnnnnnnnnnnnnnnnnnnnnnnnnnnnnnnnnnnnnnnnnnnnnnnnnnnnnnnnnnnnnnnnnnnnnnnnnnnnnnnnnnnnnnnnnnnnnnnnnnnnnnnnnnnnnnnnnnnnnnnnnnnnnnnnnnnnnnnnnnnnnnnnnnnnnnnnnnnnnnnnnnnnnnnnnnnnnnnnnnnnnnnnnnnnnnnnnnnnnnnnnnnnnnnnnnnnnnnnnnnnnnnnnnnnnnnnnnnnnnnnnnnnnnnnnnnnnnnnnnnnnnnnnnnnnnnnnnnnnnnnnnnnnnnnnnnnnnnnnnnnnnnnnnnnnnnnnnnnnnnnnnnnnnnnnnnnnnnnnnnnnnnnnnnnnnnnnnnnnnnnnnnnnnnnnnnnnnnnnnnnnnnnnnnnnnnnnnnnnnnnnnnnnnnnnnnnnnnnnnnnnnnnnnnnnnnnnnnnnnnnnnnnnnnnnnnnnnnnnnnnnnnnnnnnnnnnnnnnnnnnnnnnnnnnnnnnnnnnnnnnnnnnnnnnnnnnnnnnnnnnnnnnnnnnnnnnnnnnnnnnnnnnnnnnnnnnnnnnnnnnnnnnnnnnnnnnnnnnnnnnnnnnnnnnnnnnnnnnnnnnnnnnnnnnnnnnnnnnnnnnnnnnnnnnnnnnnnnnnnnnnnnnnnnnnnnnnnnnnnnnnnnnnnnnnnnnnnnnnnnnnnnnnnnnnnnnnnnnnnnnnnnnnnnnnnnnnnnnnnnnnnnnnnnnnnnnnnnnnnnnnnnnnnnnnnnnnnnnnnnnnnnnnnnnnnnnnnnnnnnnnnnnnnnnnnnnnnnnnnnnnnnnnnnnnnnnnnnnnnnnnnnnnnnnnnnnnnnnnnnnnnnnnnnnnnnnnnnnnnnnnnnnnnnnnnnnnnnnnnnnnnnnnnnnnnnnnnnnnnnnnnnnnnnnnnnnnnnnnnnnnnnnnnnnnnnnnnnnnnnnnnnnnnnnnnnnnnnnnnnnnnnnnnnnnnnnnnnnnnnnnnnnnnnnnnnnnnnnnnnnnnnnnnnnnnnnnnnnnnnnnnnnnnnnnnnnnnnnnnnnnnnnnnnnnnnnnnnnnnnnnnnnnnnnnnnnnnnnnnnnnnnnnnnnnnnnnnnnnnnnnnnnnnnnnnnnnnnnnnnnnnnnnnnnnnnnnnnnnnnnnnnnnnnnnnnnnnnnnnnnnnnnnnnnnnnnnnnnnnnnnnnnnnnnnnnnnnnnnnnnnnnnnnnnnnnnnnnnnnnnnnnnnnnnnnnnnnnnnnnnnnnnnnnnnnnnnnnnnnnnnnnnnnnnnnnnnnnnnnnnnnnnnnnnnnnnnnnnnnnnnnnnnnnnnnnnnnnnnnnnnnnnnnnnnnnnnnnnnnnnnnnnnnnnnnnnnnnnnnnnnnnnnnnnnnnnnnnnnnnnnnnnnnnnnnnnnnnnnnnnnnnnnnnnnnnnnnnnnnnnnnnnnnnnnnnnnnnnnnnnnnnnnnnnnnnnnnnnnnnnnnnnnnnnnnnnnnnnnnnnnnnnnnnnnnnnnnnnnnnnnnnnnnnnnnnnnnnnnnnnnnnnnnnnnnnnnnnnnnnnnnnnnnnnnnnnnnnnnnnnnnnnnnnnnnnnnnnnnnnnnnnnnnnnnnnnnnnnnnnnnnnnnnnnnnnnnnnnnnnnnnnnnnnnnnnnnnnnnnnnnnnnnnnnnnnnnnnnnnnnnnnnnnnnnnnnnnnnnnnnnnnnnnnnnnnnnnnnnnnnnnnnnnnnnnnnnnnnnnnnnnnnnnnnnnnnnnnnnnnnnnnnnnnnnnnnnnnnnnnnnnnnnnnnnnnnnnnnnnnnnnnnnnnnnnnnnnnnnnnnnnnnnnnnnnnnnnnnnnnnnnnnnnnnnnnnnnnnnnnnnnnnnnnnnnnnnnnnnnnnnnnnnnnnnnnnnnnnnnnnnnnnnnnnnnnnnnnnnnnnnnnnnnnnnnnnnnnnnnnnnnnnnnnnnnnnnnnnnnnnnnnnnnnnnnnnnnnnnnnnnnnnnnnnnnnnnnnnnnnnnnnnnnnnnnnnnnnnnnnnnnnnnnnnnnnnnnnnnnnnnnnnnnnnnnnnnnnnnnnnnnnnnnnnnnnnnnnnnnnnnnnnnnnnnnnnnnnnnnnnnnnnnnnnnnnnnnnnnnnnnnnnnnnnnnnnnnnnnnnnnnnnnnnnnnnnnnnnnnnnnnnnnnnnnnnnnnnnnnnnnnnnnnnnnnnnnnnnnnnnnnnnnnnnnnnnnnnnnnnnnnnnnnnnnnnnnnnnnnnnnnnnnnnnnnnnnnnnnnnnnnnnnnnnnnnnnnnnnnnnnnnnnnnnnnnnnnnnnnnnnnnnnnnnnnnnnnnnnnnnnnnnnnnnnnnnnnnnnnnnnnnnnnnnnnnnnnnnnnnnnnnnnnnnnnnnnnnnnnnnnnnnnnnnnnnnnnnnnnnnnnnnnnnnnnnnnnnnnnnnnnnnnnnnnnnnnnnnnnnnnnnnnnnnnnnnnnnnnnnnnnnnnnnnnnnnnnnnnnnnnnnnnnnnnnnnnnnnnnnnnnnnnnnnnnnnnnnnnnnnnnnnnnnnnnnnnnnnnnnnnnnnnnnnnnnnnnnnnnnnnnnnnnnnnnnnnnnnnnnnnnnnnnnnnnnnnnnnnnnnnnnnnnnnnnnnnnnnnnnnnnnnnnnnnnnnnnnnnnnnnnnnnnnnnnnnnnnnnnnnnnnnnnnnnnnnnnnnnnnnnnnnnnnnnnnnnnnnnnnnnnnnnnnnnnnnnnnnnnnnnnnnnnnnnnnnnnnnnnnnnnnnnnnnnnnnnnnnnnnnnnnnnnnnnnnnnnnnnnnnnnnnnnnnnnnnnnnnnnnnnnnnnnnnnnnnnnnnnnnnnnnnnnnnnnnnnnnnnnnnnnnnnnnnnnnnnnnnnnnnnnnnnnnnnnnnnnnnnnnnnnnnnnnnnnnnnnnnnnnnnnnnnnnnnnnnnnnnnnnnnnnnnnnnnnnnnnnnnnnnnnnnnnnnnnnnnnnnnnnnnnnnnnnnnnnnnnnnnnnnnnnnnnnnnnnnnnnnnnnnnnnnnnnnnnnnnnnnnnnnnnnnnnnnnnnnnnnnnnnnnnnnnnnnnnnnnnnnnnnnnnnnnnnnnnnnnnnnnnnnnnnnnnnnnnnnnnnnnnnnnnnnnnnnnnnnnnnnnnnnnnnnnnnnnnnnnnnnnnnnnnnnnnnnnnnnnnnnnnnnnnnnnnnnnnnnnnnnnnnnnnnnnnnnnnnnnnnnnnnnnnnnnnnnnnnnnnnnnnnnnnnnnnnnnnnnnnnnnnnnnnnnnnnnnnnnnnnnnnnnnnnnnnnnnnnnnnnnnnnnnnnnnnnnnnnnnnnnnnnnnnnnnnnnnnnnnnnnnnnnnnnnnnnnnnnnnnnnnnnnnnnnnnnnnnnnnnnnnnnnnnnnnnnnnnnnnnnnnnnnnnnnnnnnnnnnnnnnnnnnnnnnnnnnnnnnnnnnnnnnnnnnnnnnnnnnnnnnnnnnnnnnnnnnnnnnnnnnnnnnnnnnnnnnnnnnnnnnnnnnnnnnnnnnnnnnnnnnnnnnnnnnnnnnnnnnnnnnnnnnnnnnnnnnnnnnnnnnnnnnnnnnnnnnnnnnnnnnnnnnnnnnnnnnnnnnnnnnnnnnnnnnnnnnnnnnnnnnnnnnnnnnnnnnnnnnnnnnnnnnnnnnnnnnnnnnnnnnnnnnnnnnnnnnnnnnnnnnnnnnnnnnnnnnnnnnnnnnnnnnnnnnnnnnnnnnnnnnnnnnnnnnnnnnnnnnnnnnnnnnnnnnnnnnnnnnnnnnnnnnnnnnnnnnnnnnnnnnnnnnnnnnnnnnnnnnnnnnnnnnnnnnnnnnnnnnnnnnnnnnnnnnnnnnnnnnnnnnnnnnnnnnnnnnnnnnnnnnnnnnnnnnnnnnnnnnnnnnnnnnnnnnnnnnnnnnnnnnnnnnnnnnnnnnnnnnnnnnnnnnnnnnnnnnnnnnnnnnnnnnnnnnnnnnnnnnnnnnnnnnnnnnnnnnnnnnnnnnnnnnnnnnnnnnnnnnnnnnnnnnnnnnnnnnnnnnnnnnnnnnnnnnnnnnnnnnnnnnnnnnnnnnnnnnnnnnnnnnnnnnnnnnnnnnnnnnnnnnnnnnnnnnnnnnnnnnnnnnnnnnnnnnnnnnnnnnnnnnnnnnnnnnnnnnnnnnnnnnnnnnnnnnnnnnnnnnnnnnnnnnnnnnnnnnnnnnnnnnnnnnnnnnnnnnnnnnnnnnnnnnnnnnnnnnnnnnnnnnnnnnnnnnnnnnnnnnnnnnnnnnnnnnnnnnnnnnnnnnnnnnnnnnnnnnnnnnnnnnnnnnnnnnnnnnnnnnnnnnnnnnnnnnnnnnnnnnnnnnnnnnnnnnnnnnnnnnnnnnnnnnnnnnnnnnnnnnnnnnnnnnnnnnnnnnnnnnnnnnnnnnnnnnnnnnnnnnnnnnnnnnnnnnnnnnnnnnnnnnnnnnnnnnnnnnnnnnnnnnnnnnnnnnnnnnnnnnnnnnnnnnnnnnnnnnnnnnnnnnnnnnnnnnnnnnnnnnnnnnnnnnnnnnnnnnnnnnnnnnnnnnnnnnnnnnnnnnnnnnnnnnnnnnnnnnnnnnnnnnnnnnnnnnnnnnnnnnnnnnnnnnnnnnnnnnnnnnnnnnnnnnnnnnnnnnnnnnnnnnnnnnnnnnnnnnnnnnnnnnnnnnnnnnnnnnnnnnnnnnnnnnnnnnnnnnnnnnnnnnnnnnnnnnnnnnnnnnnnnnnnnnnnnnnnnnnnnnnnnnnnnnnnnnnnnnnnnnnnnnnnnnnnnnnnnnnnnnnnnnnnnnnnnnnnnnnnnnnnnnnnnnnnnnnnnnnnnnnnnnnnnnnnnnnnnnnnnnnnnnnnnnnnnnnnnnnnnnnnnnnnnnnnnnnnnnnnnnnnnnnnnnnnnnnnnnnnnnnnnnnnnnnnnnnnnnnnnnnnnnnnnnnnnnnnnnnnnnnnnnnnnnnnnnnnnnnnnnnnnnnnnnnnnnnnnnnnnnnnnnnnnnnnnnnnnnnnnnnnnnnnnnnnnnnnnnnnnnnnnnnnnnnnnnnnnnnnnnnnnnnnnnnnnnnnnnnnnnnnnnnnnnnnnnnnnnnnnnnnnnnnnnnnnnnnnnnnnnnnnnnnnnnnnnnnnnnnnnnnnnnnnnnnnnnnnnnnnnnnnnnnnnnnnnnnnnnnnnnnnnnnnnnnnnnnnnnnnnnnnnnnnnnnnnnnnnnnnnnnnnnnnnnnnnnnnnnnnnnnnnnnnnnnnnnnnnnnnnnnnnnnnnnnnnnnnnnnnnnnnnnnnnnnnnnnnnnnnnnnnnnnnnnnnnnnnnnnnnnnnnnnnnnnnnnnnnnnnnnnnnnnnnnnnnnnnnnnnnnnnnnnnnnnnnnnnnnnnnnnnnnnnnnnnnnnnnnnnnnnnnnnnnnnnnnnnnnnnnnnnnnnnnnnnnnnnnnnnnnnnnnnnnnnnnnnnnnnnnnnnnnnnnnnnnnnnnnnnnnnnnnnnnnnnnnnnnnnnnnnnnnnnnnnnnnnnnnnnnnnnnnnnnnnnnnnnnnnnnnnnnnnnnnnnnnnnnnnnnnnnnnnnnnnnnnnnnnnnnnnnnnnnnnnnnnnnnnnnnnnnnnnnnnnnnnnnnnnnnnnnnnnnnnnnnnnnnnnnnnnnnnnnnnnnnnnnnnnnnnnnnnnnnnnnnnnnnnnnnnnnnnnnnnnnnnnnnnnnnnnnnnnnnnnnnnnnnnnnnnnnnnnnnnnnnnnnnnnnnnnnnnnnnnnnnnnnnnnnnnnnnnnnnnnnnnnnnnnnnnnnnnnnnnnnnnnnnnnnnnnnnnnnnnnnnnnnnnnnnnnnnnnnnnnnnnnnnnnnnnnnnnnnnnnnnnnnnnnnnnnnnnnnnnnnnnnnnnnnnnnnnnnnnnnnnnnnnnnnnnnnnnnnnnnnnnnnnnnnnnnnnnnnnnnnnnnnnnnnnnnnnnnnnnnnnnnnnnnnnnnnnnnnnnnnnnnnnnnnnnnnnnnnnnnnnnnnnnnnnnnnnnnnnnnnnnnnnnnnnnnnnnnnnnnnnnnnnnnnnnnnnnnnnnnnnnnnnnnnnnnnnnnnnnnnnnnnnnnnnnnnnnnnnnnnnnnnnnnnnnnnnnnnnnnnnnnnnnnnnnnnnnnnnnnnnnnnnnnnnnnnnnnnnnnnnnnnnnnnnnnnnnnnnnnnnnnnnnnnnnnnnnnnnnnnnnnnnnnnnnnnnnnnnnnnnnnnnnnnnnnnnnnnnnnnnnnnnnnnnnnnnnnnnnnnnnnnnnnnnnnnnnnnnnnnnnnnnnnnnnnnnnnnnnnnnnnnnnnnnnnnnnnnnnnnnnnnnnnnnnnnnnnnnnnnnnnnnnnnnnnnnnnnnnnnnnnnnnnnnnnnnnnnnnnnnnnnnnnnnnnnnnnnnnnnnnnnnnnnnnnnnnnnnnnnnnnnnnnnnnnnnnnnnnnnnnnnnnnnnnnnnnnnnnnnnnnnnnnnnnnnnnnnnnnnnnnnnnnnnnnnnnnnnnnnnnnnnnnnnnnnnnnnnnnnnnnnnnnnnnnnnnnnnnnnnnnnnnnnnnnnnnnnnnnnnnnnnnnnnnnnnnnnnnnnnnnnnnnnnnnnnnnnnnnnnnnnnnnnnnnnnnnnnnnnnnnnnnnnnnnnnnnnnnnnnnnnnnnnnnnnnnnnnnnnnnnnnnnnnnnnnnnnnnnnnnnnnnnnnnnnnnnnnnnnnnnnnnnnnnnnnnnnnnnnnnnnnnnnnnnnnnnnnnnnnnnnnnnnnnnnnnnnnnnnnnnnnnnnnnnnnnnnnnnnnnnnnnnnnnnnnnnnnnnnnnnnnnnnnnnnnnnnnnnnnnnnnnnnnnnnnnnnnnnnnnnnnnnnnnnnnnnnnnnnnnnnnnnnnnnnnnnnnnnnnnnnnnnnnnnnnnnnnnnnnnnnnnnnnnnnnnnnnnnnnnnnnnnnnnnnnnnnnnnnnnnnnnnnnnnnnnnnnnnnnnnnnnnnnnnnnnnnnnnnnnnnnnnnnnnnnnnnnnnnnnnnnnnnnnnnnnnnnnnnnnnnnnnnnnnnnnnnnnnnnnnnnnnnnnnnnnnnnnnnnnnnnnnnnnnnnnnnnnnnnnnnnnnnnnnnnnnnnnnnnnnnnnnnnnnnnnnnnnnnnnnnnnnnnnnnnnnnnnnnnnnnnnnnnnnnnnnnnnnnnnnnnnnnnnnnnnnnnnnnnnnnnnnnnnnnnnnnnnnnnnnnnnnnnnnnnnnnnnnnnnnnnnnnnnnnnnnnnnnnnnnnnnnnnnnnnnnnnnnnnnnnnnnnnnnnnnnnnnnnnnnnnnnnnnnnnnnnnnnnnnnnnnnnnnnnnnnnnnnnnnnnnnnnnnnnnnnnnnnnnnnnnnnnnnnnnnnnnnnnnnnnnnnnnnnnnnnnnnnnnnnnnnnnnnnnnnnnnnnnnnnnnnnnnnnnnnnnnnnnnnnnnnnnnnnnnnnnnnnnnnnnnnnnnnnnnnnnnnnnnnnnnnnnnnnnnnnnnnnnnnnnnnnnnnnnnnnnnnnnnnnnnnnnnnnnnnnnnnnnnnnnnnnnnnnnnnnnnnnnnnnnnnnnnnnnnnnnnnnnnnnnnnnnnnnnnnnnnnnnnnnnnnnnnnnnnnnnnnnnnnnnnnnnnnnnnnnnnnnnnnnnnnnnnnnnnnnnnnnnnnnnnnnnnnnnnnnnnnnnnnnnnnnnnnnnnnnnnnnnnnnnnnnnnnnnnnnnnnnnnnnnnnnnnnnnnnnnnnnnnnnnnnnnnnnnnnnnnnnnnnnnnnnnnnnnnnnnnnnnnnnnnnnnnnnnnnnnnnnnnnnnnnnnnnnnnnnnnnnnnnnnnnnnnnnnnnnnnnnnnnnnnnnnnnnnnnnnnnnnnnnnnnnnnnnnnnnnnnnnnnnnnnnnnnnnnnnnnnnnnnnnnnnnnnnnnnnnnnnnnnnnnnnnnnnnnnnnnnnnnnnnnnnnnnnnnnnnnnnnnnnnnnnnnnnnnnnnnnnnnnnnnnnnnnnnnnnnnnnnnnnnnnnnnnnnnnnnnnnnnnnnnnnnnnnnnnnnnnnnnnnnnnnnnnnnnnnnnnnnnnnnnnnnnnnnnnnnnnnnnnnnnnnnnnnnnnnnnnnnnnnnnnnnnnnnnnnnnnnnnnnnnnnnnnnnnnnnnnnnnnnnnnnnnnnnnnnnnnnnnnnnnnnnnnnnnnnnnnnnnnnnnnnnnnnnnnnnnnnnnnnnnnnnnnnnnnnnnnnnnnnnnnnnnnnnnnnnnnnnnnnnnnnnnnnnnnnnnnnnnnnnnnnnnnnnnnnnnnnnnnnnnnnnnnnnnnnnnnnnnnnnnnnnnnnnnnnnnnnnnnnnnnnnnnnnnnnnnnnnnnnnnnnnnnnnnnnnnnnnnnnnnnnnnnnnnnnnnnnnnnnnnnnnnnnnnnnnnnnnnnnnnnnnnnnnnnnnnnnnnnnnnnnnnnnnnnnnnnnnnnnnnnnnnnnnnnnnnnnnnnnnnnnnnnnnnnnnnnnnnnnnnnnnnnnnnnnnnnnnnnnnnnnnnnnnnnnnnnnnnnnnnnnnnnnnnnnnnnnnnnnnnnnnnnnnnnnnnnnnnnnnnnnnnnnnnnnnnnnnnnnnnnnnnnnnnnnnnnnnnnnnnnnnnnnnnnnnnnnnnnnnnnnnnnnnnnnnnnnnnnnnnnnnnnnnnnnnnnnnnnnnnnnnnnnnnnnnnnnnnnnnnnnnnnnnnnnnnnnnnnnnnnnnnnnnnnnnnnnnnnnnnnnnnnnnnnnnnnnnnnnnnnnnnnnnnnnnnnnnnnnnnnnnnnnnnnnnnnnnnnnnnnnnnnnnnnnnnnnnnnnnnnnnnnnnnnnnnnnnnnnnnnnnnnnnnnnnnnnnnnnnnnnnnnnnnnnnnnnnnnnnnnnnnnnnnnnnnnnnnnnnnnnnnnnnnnnnnnnnnnnnnnnnnnnnnnnnnnnnnnnnnnnnnnnnnnnnnnnnnnnnnnnnnnnnnnnnnnnnnnnnnnnnnnnnnnnnnnnnnnnnnnnnnnnnnnnnnnnnnnnnnnnnnnnnnnnnnnnnnnnnnnnnnnnnnnnnnnnnnnnnnnnnnnnnnnnnnnnnnnnnnnnnnnnnnnnnnnnnnnnnnnnnnnnnnnnnnnnnnnnnnnnnnnnnnnnnnnnnnnnnnnnnnnnnnnnnnnnnnnnnnnnnnnnnnnnnnnnnnnnnnnnnnnnnnnnnnnnnnnnnnnnnnnnnnnnnnnnnnnnnnnnnnnnnnnnnnnnnnnnnnnnnnnnnnnnnnnnnnnnnnnnnnnnnnnnnnnnnnnnnnnnnnnnnnnnnnnnnnnnnnnnnnnnnnnnnnnnnnnnnnnnnnnnnnnnnnnnnnnnnnnnnnnnnnnnnnnnnnnnnnnnnnnnnnnnnnnnnnnnnnnnnnnnnnnnnnnnnnnnnnnnnnnnnnnnnnnnnnnnnnnnnnnnnnnnnnnnnnnnnnnnnnnnnnnnnnnnnnnnnnnnnnnnnnnnnnnnnnnnnnnnnnnnnnnnnnnnnnnnnnnnnnnnnnnnnnnnnnnnnnnnnnnnnnnnnnnnnnnnnnnnnnnnnnnnnnnnnnnnnnnnnnnnnnnnnnnnnnnnnnnnnnnnnnnnnnnnnnnnnnnnnnnnnnnnnnnnnnnnnnnnnnnnnnnnnnnnnnnnnnnnnnnnnnnnnnnnnnnnnnnnnnnnnnnnnnnnnnnnnnnnnnnnnnnnnnnnnnnnnnnnnnnnnnnnnnnnnnnnnnnnnnnnnnnnnnnnnnnnnnnnnnnnnnnnnnnnnnnnnnnnnnnnnnnnnnnnnnnnnnnnnnnnnnnnnnnnnnnnnnnnnnnnnnnnnnnnnnnnnnnnnnnnnnnnnnnnnnnnnnnnnnnnnnnnnnnnnnnnnnnnnnnnnnnnnnnnnnnnnnnnnnnnnnnnnnnnnnnnnnnnnnnnnnnnnnnnnnnnnnnnnnnnnnnnnnnnnnnnnnnnnnnnnnnnnnnnnnnnnnnnnnnnnnnnnnnnnnnnnnnnnnnnnnnnnnnnnnnnnnnnnnnnnnnnnnnnnnnnnnnnnnnnnnnnnnnnnnnnnnnnnnnnnnnnnnnnnnnnnnnnnnnnnnnnnnnnnnnnnnnnnnnnnnnnnnnnnnnnnnnnnnnnnnnnnnnnnnnnnnnnnnnnnnnnnnnnnnnnnnnnnnnnnnnnnnnnnnnnnnnnnnnnnnnnnnnnnnnnnnnnnnnnnnnnnnnnnnnnnnnnnnnnnnnnnnnnnnnnnnnnnnnnnnnnnnnnnnnnnnnnnnnnnnnnnnnnnnnnnnnnnnnnnnnnnnnnnnnnnnnnnnnnnnnnnnnnnnnnnnnnnnnnnnnnnnnnnnnnnnnnnnnnnnnnnnnnnnnnnnnnnnnnnnnnnnnnnnnnnnnnnnnnnnnnnnnnnnnnnnnnnnnnnnnnnnnnnnnnnnnnnnnnnnnnnnnnnnnnnnnnnnnnnnnnnnnnnnnnnnnnnnnnnnnnnnnnnnnnnnnnnnnnnnnnnnnnnnnnnnnnnnnnnnnnnnnnnnnnnnnnnnnnnnnnnnnnnnnnnnnnnnnnnnnnnnnnnnnnnnnnnnnnnnnnnnnnnnnnnnnnnnnnnnnnnnnnnnnnnnnnnnnnnnnnnnnnnnnnnnnnnnnnnnnnnnnnnnnnnnnnnnnnnnnnnnnnnnnnnnnnnnnnnnnnnnnnnnnnnnnnnnnnnnnnnnnnnnnnnnnnnnnnnnnnnnnnnnnnnnnnnnnnnnnnnnnnnnnnnnnnnnnnnnnnnnnnnnnnnnnnnnnnnnnnnnnnnnnnnnnnnnnnnnnnnnnnnnnnnnnnnnnnnnnnnnnnnnnnnnnnnnnnnnnnnnnnnnnnnnnnnnnnnnnnnnnnnnnnnnnnnnnnnnnnnnnnnnnnnnnnnnnnnnnnnnnnnnnnnnnnnnnnnnnnnnnnnnnnnnnnnnnnnnnnnnnnnnnnnnnnnnnnnnnnnnnnnnnnnnnnnnnnnnnnnnnnnnnnnnnnnnnnnnnnnnnnnnnnnnnnnnnnnnnnnnnnnnnnnnnnnnnnnnnnnnnnnnnnnnnnnnnnnnnnnnnnnnnnnnnnnnnnnnnnnnnnnnnnnnnnnnnnnnnnnnnnnnnnnnnnnnnnnnnnnnnnnnnnnnnnnnnnnnnnnnnnnnnnnnnnnnnnnnnnnnnnnnnnnnnnnnnnnnnnnnnnnnnnnnnnnnnnnnnnnnnnnnnnnnnnnnnnnnnnnnnnnnnnnnnnnnnnnnnnnnnnnnnnnnnnnnnnnnnnnnnnnnnnnnnnnnnnnnnnnnnnnnnnnnnnnnnnnnnnnnnnnnnnnnnnnnnnnnnnnnnnnnnnnnnnnnnnnnnnnnnnnnnnnnnnnnnnnnnnnnnnnnnnnnnnnnnnnnnnnnnnnnnnnnnnnnnnnnnnnnnnnnnnnnnnnnnnnnnnnnnnnnnnnnnnnnnnnnnnnnnnnnnnnnnnnnnnnnnnnnnnnnnnnnnnnnnnnnnnnnnnnnnnnnnnnnnnnnnnnnnnnnnnnnnnnnnnnnnnnnnnnnnnnnnnnnnnnnnnnnnnnnnnnnnnnnnnnnnnnnnnnnnnnnnnnnnnnnnnnnnnnnnnnnnnnnnnnnnnnnnnnnnnnnnnnnnnnnnnnnnnnnnnnnnnnnnnnnnnnnnnnnnnnnnnnnnnnnnnnnnnnnnnnnnnnnnnnnnnnnnnnnnnnnnnnnnnnnnnnnnnnnnnnnnnnnnnnnnnnnnnnnnnnnnnnnnnnnnnnnnnnnnnnnnnnnnnnnnnnnnnnnnnnnnnnnnnnnnnnnnnnnnnnnnnnnnnnnnnnnnnnnnnnnnnnnnnnnnnnnnnnnnnnnnnnnnnnnnnnnnnnnnnnnnnnnnnnnnnnnnnnnnnnnnnnnnnnnnnnnnnnnnnnnnnnnnnnnnnnnnnnnnnnnnnnnnnnnnnnnnnnnnnnnnnnnnnnnnnnnnnnnnnnnnnnnnnnnnnnnnnnnnnnnnnnnnnnnnnnnnnnnnnnnnnnnnnnnnnnnnnnnnnnnnnnnnnnnnnnnnnnnnnnnnnnnnnnnnnnnnnnnnnnnnnnnnnnnnnnnnnnnnnnnnnnnnnnnnnnnnnnnnnnnnnnnnnnnnnnnnnnnnnnnnnnnnnnnnnnnnnnnnnnnnnnnnnnnnnnnnnnnnnnnnnnnnnnnnnnnnnnnnnnnnnnnnnnnnnnnnnnnnnnnnnnnnnnnnnnnnnnnnnnnnnnnnnnnnnnnnnnnnnnnnnnnnnnnnnnnnnnnnnnnnnnnnnnnnnnnnnnnnnnnnnnnnnnnnnnnnnnnnnnnnnnnnnnnnnnnnnnnnnnnnnnnnnnnnnnnnnnnnnnnnnnnnnnnnnnnnnnnnnnnnnnnnnnnnnnnnnnnnnnnnnnnnnnnnnnnnnnnnnnnnnnnnnnnnnnnnnnnnnnnnnnnnnnnnnnnnnnnnnnnnnnnnnnnnnnnnnnnnnnnnnnnnnnnnnnnnnnnnnnnnnnnnnnnnnnnnnnnnnnnnnnnnnnnnnnnnnnnnnnnnnnnnnnnnnnnnnnnnnnnnnnnnnnnnnnnnnnnnnnnnnnnnnnnnnnnnnnnnnnnnnnnnnnnnnnnnnnnnnnnnnnnnnnnnnnnnnnnnnnnnnnnnnnnnnnnnnnnnnnnnnnnnnnnnnnnnnnnnnnnnnnnnnnnnnnnnnnnnnnnnnnnnnnnnnnnnnnnnnnnnnnnnnnnnnnnnnnnnnnnnnnnnnnnnnnnnnnnnnnnnnnnnnnnnnnnnnnnnnnnnnnnnnnnnnnnnnnnnnnnnnnnnnnnnnnnnnnnnnnnnnnnnnnnnnnnnnnnnnnnnnnnnnnnnnnnnnnnnnnnnnnnnnnnnnnnnnnnnnnnnnnnnnnnnnnnnnnnnnnnnnnnnnnnnnnnnnnnnnnnnnnnnnnnnnnnnnnnnnnnnnnnnnnnnnnnnnnnnnnnnnnnnnnnnnnnnnnnnnnnnnnnnnnnnnnnnnnnnnnnnnnnnnnnnnnnnnnnnnnnnnnnnnnnnnnnnnnnnnnnnnnnnnnnnnnnnnnnnnnnnnnnnnnnnnnnnnnnnnnnnnnnnnnnnnnnnnnnnnnnnnnnnnnnnnnnnnnnnnnnnnnnnnnnnnnnnnnnnnnnnnnnnnnnnnnnnnnnnnnnnnnnnnnnnnnnnnnnnnnnnnnnnnnnnnnnnnnnnnnnnnnnnnnnnnnnnnnnnnnnnnnnnnnnnnnnnnnnnnnnnnnnnnnnnnnnnnnnnnnnnnnnnnnnnnnnnnnnnnnnnnnnnnnnnnnnnnnnnnnnnnnnnnnnnnnnnnnnnnnnnnnnnnnnnnnnnnnnnnnnnnnnnnnnnnnnnnnnnnnnnnnnnnnnnnnnnnnnnnnnnnnnnnnnnnnnnnnnnnnnnnnnnnnnnnnnnnnnnnnnnnnnnnnnnnnnnnnnnnnnnnnnnnnnnnnnnnnnnnnnnnnnnnnnnnnnnnnnnnnnnnnnnnnnnnnnnnnnnnnnnnnnnnnnnnnnnnnnnnnnnnnnnnnnnnnnnnnnnnnnnnnnnnnnnnnnnnnnnnnnnnnnnnnnnnnnnnnnnnnnnnnnnnnnnnnnnnnnnnnnnnnnnnnnnnnnnnnnnnnnnnnnnnnnnnnnnnnnnnnnnnnnnnnnnnnnnnnnnnnnnnnnnnnnnnnnnnnnnnnnnnnnnnnnnnnnnnnnnnnnnnnnnnnnnnnnnnnnnnnnnnnnnnnnnnnnnnnnnnnnnnnnnnnnnnnnnnnnnnnnnnnnnnnnnnnnnnnnnnnnnnnnnnnnnnnnnnnnnnnnnnnnnnnnnnnnnnnnnnnnnnnnnnnnnnnnnnnnnnnnnnnnnnnnnnnnnnnnnnnnnnnnnnnnnnnnnnnnnnnnnnnnnnnnnnnnnnnnnnnnnnnnnnnnnnnnnnnnnnnnnnnnnnnnnnnnnnnnnnnnnnnnnnnnnnnnnnnnnnnnnnnnnnnnnnnnnnnnnnnnnnnnnnnnnnnnnnnnnnnnnnnnnnnnnnnnnnnnnnnnnnnnnnnnnnnnnnnnnnnnnnnnnnnnnnnnnnnnnnnnnnnnnnnnnnnnnnnnnnnnnnnnnnnnnnnnnnnnnnnnnnnnnnnnnnnnnnnnnnnnnnnnnnnnnnnnnnnnnnnnnnnnnnnnnnnnnnnnnnnnnnnnnnnnnnnnnnnnnnnnnnnnnnnnnnnnnnnnnnnnnnnnnnnnnnnnnnnnnnnnnnnnnnnnnnnnnnnnnnnnnnnnnnnnnnnnnnnnnnnnnnnnnnnnnnnnnnnnnnnnnnnnnnnnnnnnnnnnnnnnnnnnnnnnnnnnnnnnnnnnnnnnnnnnnnnnnnnnnnnnnnnnnnnnnnnnnnnnnnnnnnnnnnnnnnnnnnnnnnnnnnnnnnnnnnnnnnnnnnnnnnnnnnnnnnnnnnnnnnnnnnnnnnnnnnnnnnnnnnnnnnnnnnnnnnnnnnnnnnnnnnnnnnnnnnnnnnnnnnnnnnnnnnnnnnnnnnnnnnnnnnnnnnnnnnnnnnnnnnnnnnnnnnnnnnnnnnnnnnnnnnnnnnnnnnnnnnnnnnnnnnnnnnnnnnnnnnnnnnnnnnnnnnnnnnnnnnnnnnnnnnnnnnnnnnnnnnnnnnnnnnnnnnnnnnnnnnnnnnnnnnnnnnnnnnnnnnnnnnnnnnnnnnnnnnnnnnnnnnnnnnnnnnnnnnnnnnnnnnnnnnnnnnnnnnnnnnnnnnnnnnnnnnnnnnnnnnnnnnnnnnnnnnnnnnnnnnnnnnnnnnnnnnnnnnnnnnnnnnnnnnnnnnnnnnnnnnnnnnnnnnnnnnnnnnnnnnnnnnnnnnnnnnnnnnnnnnnnnnnnnnnnnnnnnnnnnnnnnnnnnnnnnnnnnnnnnnnnnnnnnnnnnnnnnnnnnnnnnnnnnnnnnnnnnnnnnnnnnnnnnnnnnnnnnnnnnnnnnnnnnnnnnnnnnnnnnnnnnnnnnnnnnnnnnnnnnnnnnnnnnnnnnnnnnnnnnnnnnnnnnnnnnnnnnnnnnnnnnnnnnnnnnnnnnnnnnnnnnnnnnnnnnnnnnnnnnnnnnnnnnnnnnnnnnnnnnnnnnnnnnnnnnnnnnnnnnnnnnnnnnnnnnnnnnnnnnnnnnnnnnnnnnnnnnnnnnnnnnnnnnnnnnnnnnnnnnnnnnnnnnnnnnnnnnnnnnnnnnnnnnnnnnnnnnnnnnnnnnnnnnnnnnnnnnnnnnnnnnnnnnnnnnnnnnnnnnnnnnnnnnnnnnnnnnnnnnnnnnnnnnnnnnnnnnnnnnnnnnnnnnnnnnnnnnnnnnnnnnnnnnnnnnnnnnnnnnnnnnnnnnnnnnnnnnnnnnnnnnnnnnnnnnnnnnnnnnnnnnnnnnnnnnnnnnnnnnnnnnnnnnnnnnnnnnnnnnnnnnnnnnnnnnnnnnnnnnnnnnnnnnnnnnnnnnnnnnnnnnnnnnnnnnnnnnnnnnnnnnnnnnnnnnnnnnnnnnnnnnnnnnnnnnnnnnnnnnnnnnnnnnnnnnnnnnnnnnnnnnnnnnnnnnnnnnnnnnnnnnnnnnnnnnnnnnnnnnnnnnnnnnnnnnnnnnnnnnnnnnnnnnnnnnnnnnnnnnnnnnnnnnnnnnnnnnnnnnnnnnnnnnnnnnnnnnnnnnnnnnnnnnnnnnnnnnnnnnnnnnnnnnnnnnnnnnnnnnnnnnnnnnnnnnnnnnnnnnnnnnnnnnnnnnnnnnnnnnnnnnnnnnnnnnnnnnnnnnnnnnnnnnnnnnnnnnnnnnnnnnnnnnnnnnnnnnnnnnnnnnnnnnnnnnnnnnnnnnnnnnnnnnnnnnnnnnnnnnnnnnnnnnnnnnnnnnnnnnnnnnnnnnnnnnnnnnnnnnnnnnnnnnnnnnnnnnnnnnnnnnnnnnnnnnnnnnnnnnnnnnnnnnnnnnnnnnnnnnnnnnnnnnnnnnnnnnnnnnnnnnnnnnnnnnnnnnnnnnnnnnnnnnnnnnnnnnnnnnnnnnnnnnnnnnnnnnnnnnnnnnnnnnnnnnnnnnnnnnnnnnnnnnnnnnnnnnnnnnnnnnnnnnnnnnnnnnnnnnnnnnnnnnnnnnnnnnnnnnnnnnnnnnnnnnnnnnnnnnnnnnnnnnnnnnnnnnnnnnnnnnnnnnnnnnnnnnnnnnnnnnnnnnnnnnnnnnnnnnnnnnnnnnnnnnnnnnnnnnnnnnnnnnnnnnnnnnnnnnnnnnnnnnnnnnnnnnnnnnnnnnnnnnnnnnnnnnnnnnnnnnnnnnnnnnnnnnnnnnnnnnnnnnnnnnnnnnnnnnnnnnnnnnnnnnnnnnnnnnnnnnnnnnnnnnnnnnnnnnnnnnnnnnnnnnnnnnnnnnnnnnnnnnnnnnnnnnnnnnnnnnnnnnnnnnnnnnnnnnnnnnnnnnnnnnnnnnnnnnnnnnnnnnnnnnnnnnnnnnnnnnnnnnnnnnnnnnnnnnnnnnnnnnnnnnnnnnnnnnnnnnnnnnnnnnnnnnnnnnnnnnnnnnnnnnnnnnnnnnnnnnnnnnnnnnnnnnnnnnnnnnnnnnnnnnnnnnnnnnnnnnnnnnnnnnnnnnnnnnnnnnnnnnnnnnnnnnnnnnnnnnnnnnnnnnnnnnnnnnnnnnnnnnnnnnnnnnnnnnnnnnnnnnnnnnnnnnnnnnnnnnnnnnnnnnnnnnnnnnnnnnnnnnnnnnnnnnnnnnnnnnnnnnnnnnnnnnnnnnnnnnnnnnnnnnnnnnnnnnnnnnnnnnnnnnnnnnnnnnnnnnnnnnnnnnnnnnnnnnnnnnnnnnnnnnnnnnnnnnnnnnnnnnnnnnnnnnnnnnnnnnnnnnnnnnnnnnnnnnnnnnnnnnnnnnnnnnnnnnnnnnnnnnnnnnnnnnnnnnnnnnnnnnnnnnnnnnnnnnnnnnnnnnnnnnnnnnnnnnnnnnnnnnnnnnnnnnnnnnnnnnnnnnnnnnnnnnnnnnnnnnnnnnnnnnnnnnnnnnnnnnnnnnnnnnnnnnnnnnnnnnnnnnnnnnnnnnnnnnnnnnnnnnnnnnnnnnnnnnnnnnnnnnnnnnnnnnnnnnnnnnnnnnnnnnnnnnnnnnnnnnnnnnnnnnnnnnnnnnnnnnnnnnnnnnnnnnnnnnnnnnnnnnnnnnnnnnnnnnnnnnnnnnnnnnnnnnnnnnnnnnnnnnnnnnnnnnnnnnnnnnnnnnnnnnnnnnnnnnnnnnnnnnnnnnnnnnnnnnnnnnnnnnnnnnnnnnnnnnnnnnnnnnnnnnnnnnnnnnnnnnnnnnnnnnnnnnnnnnnnnnnnnnnnnnnnnnnnnnnnnnnnnnnnnnnnnnnnnnnnnnnnnnnnnnnnnnnnnnnnnnnnnnnnnnnnnnnnnnnnnnnnnnnnnnnnnnnnnnnnnnnnnnnnnnnnnnnnnnnnnnnnnnnnnnnnnnnnnnnnnnnnnnnnnnnnnnnnnnnnnnnnnnnnnnnnnnnnnnnnnnnnnnnnnnnnnnnnnnnnnnnnnnnnnnnnnnnnnnnnnnnnnnnnnnnnnnnnnnnnnnnnnnnnnnnnnnnnnnnnnnnnnnnnnnnnnnnnnnnnnnnnnnnnnnnnnnnnnnnnnnnnnnnnnnnnnnnnnnnnnnnnnnnnnnnnnnnnnnnnnnnnnnnnnnnnnnnnnnnnnnnnnnnnnnnnnnnnnnnnnnnnnnnnnnnnnnnnnnnnnnnnnnnnnnnnnnnnnnnnnnnnnnnnnnnnnnnnnnnnnnnnnnnnnnnnnnnnnnnnnnnnnnnnnnnnnnnnnnnnnnnnnnnnnnnnnnnnnnnnnnnnnnnnnnnnnnnnnnnnnnnnnnnnnnnnnnnnnnnnnnnnnnnnnnnnnnnnnnnnnnnnnnnnnnnnnnnnnnnnnnnnnnnnnnnnnnnnnnnnnnnnnnnnnnnnnnnnnnnnnnnnnnnnnnnnnnnnnnnnnnnnnnnnnnnnnnnnnnnnnnnnnnnnnnnnnnnnnnnnnnnnnnnnnnnnnnnnnnnnnnnnnnnnnnnnnnnnnnnnnnnnnnnnnnnnnnnnnnnnnnnnnnnnnnnnnnnnnnnnnnnnnnnnnnnnnnnnnnnnnnnnnnnnnnnnnnnnnnnnnnnnnnnnnnnnnnnnnnnnnnnnnnnnnnnnnnnnnnnnnnnnnnnnnnnnnnnnnnnnnnnnnnnnnnnnnnnnnnnnnnnnnnnnnnnnnnnnnnnnnnnnnnnnnnnnnnnnnnnnnnnnnnnnnnnnnnnnnnnnnnnnnnnnnnnnnnnnnnnnnnnnnnnnnnnnnnnnnnnnnnnnnnnnnnnnnnnnnnnnnnnnnnnnnnnnnnnnnnnnnnnnnnnnnnnnnnnnnnnnnnnnnnnnnnnnnnnnnnnnnnnnnnnnnnnnnnnnnnnnnnnnnnnnnnnnnnnnnnnnnnnnnnnnnnnnnnnnnnnnnnnnnnnnnnnnnnnnnnnnnnnnnnnnnnnnnnnnnnnnnnnnnnnnnnnnnnnnnnnnnnnnnnnnnnnnnnnnnnnnnnnnnnnnnnnnnnnnnnnnnnnnnnnnnnnnnnnnnnnnnnnnnnnnnnnnnnnnnnnnnnnnnnnnnnnnnnnnnnnnnnnnnnnnnnnnnnnnnnnnnnnnnnnnnnnnnnnnnnnnnnnnnnnnnnnnnnnnnnnnnnnnnnnnnnnnnnnnnnnnnnnnnnnnnnnnnnnnnnnnnnnnnnnnnnnnnnnnnnnnnnnnnnnnnnnnnnnnnnnnnnnnnnnnnnnnnnnnnnnnnnnnnnnnnnnnnnnnnnnnnnnnnnnnnnnnnnnnnnnnnnnnnnnnnnnnnnnnnnnnnnnnnnnnnnnnnnnnnnnnnnnnnnnnnnnnnnnnnnnnnnnnnnnnnnnnnnnnnnnnnnnnnnnnnnnnnnnnnnnnnnnnnnnnnnnnnnnnnnnnnnnnnnnnnnnnnnnnnnnnnnnnnnnnnnnnnnnnnnnnnnnnnnnnnnnnnnnnnnnnnnnnnnnnnnnnnnnnnnnnnnnnnnnnnnnnnnnnnnnnnnnnnnnnnnnnnnnnnnnnnnnnnnnnnnnnnnnnnnnnnnnnnnnnnnnnnnnnnnnnnnnnnnnnnnnnnnnnnnnnnnnnnnnnnnnnnnnnnnnnnnnnnnnnnnnnnnnnnnnnnnnnnnnnnnnnnnnnnnnnnnnnnnnnnnnnnnnnnnnnnnnnnnnnnnnnnnnnnnnnnnnnnnnnnnnnnnnnnnnnnnnnnnnnnnnnnnnnnnnnnnnnnnnnnnnnnnnnnnnnnnnnnnnnnnnnnnnnnnnnnnnnnnnnnnnnnnnnnnnnnnnnnnnnnnnnnnnnnnnnnnnnnnnnnnnnnnnnnnnnnnnnnnnnnnnnnnnnnnnnnnnnnnnnnnnnnnnnnnnnnnnnnnnnnnnnnnnnnnnnnnnnnnnnnnnnnnnnnnnnnnnnnnnnnnnnnnnnnnnnnnnnnnnnnnnnnnnnnnnnnnnnnnnnnnnnnnnnnnnnnnnnnnnnnnnnnnnnnnnnnnnnnnnnnnnnnnnnnnnnnnnnnnnnnnnnnnnnnnnnnnnnnnnnnnnnnnnnnnnnnnnnnnnnnnnnnnnnnnnnnnnnnnnnnnnnnnnnnnnnnnnnnnnnnnnnnnnnnnnnnnnnnnnnnnnnnnnnnnnnnnnnnnnnnnnnnnnnnnnnnnnnnnnnnnnnnnnnnnnnnnnnnnnnnnnnnnnnnnnnnnnnnnnnnnnnnnnnnnnnnnnnnnnnnnnnnnnnnnnnnnnnnnnnnnnnnnnnnnnnnnnnnnnnnnnnnnnnnnnnnnnnnnnnnnnnnnnnnnnnnnnnnnnnnnnnnnnnnnnnnnnnnnnnnnnnnnnnnnnnnnnnnnnnnnnnnnnnnnnnnnnnnnnnnnnnnnnnnnnnnnnnnnnnnnnnnnnnnnnnnnnnnnnnnnnnnnnnnnnnnnnnnnnnnnnnnnnnnnnnnnnnnnnnnnnnnnnnnnnnnnnnnnnnnnnnnnnnnnnnnnnnnnnnnnnnnnnnnnnnnnnnnnnnnnnnnnnnnnnnnnnnnnnnnnnnnnnnnnnnnnnnnnnnnnnnnnnnnnnnnnnnnnnnnnnnnnnnnnnnnnnnnnnnnnnnnnnnnnnnnnnnnnnnnnnnnnnnnnnnnnnnnnnnnnnnnnnnnnnnnnnnnnnnnnnnnnnnnnnnnnnnnnnnnnnnnnnnnnnnnnnnnnnnnnnnnnnnnnnnnnnnnnnnnnnnnnnnnnnnnnnnnnnnnnnnnnnnnnnnnnnnnnnnnnnnnnnnnnnnnnnnnnnnnnnnnnnnnnnnnnnnnnnnnnnnnnnnnnnnnnnnnnnnnnnnnnnnnnnnnnnnnnnnnnnnnnnnnnnnnnnnnnnnnnnnnnnnnnnnnnnnnnnnnnnnnnnnnnnnnnnnnnnnnnnnnnnnnnnnnnnnnnnnnnnnnnnnnnnnnnnnnnnnnnnnnnnnnnnnnnnnnnnnnnnnnnnnnnnnnnnnnnnnnnnnnnnnnnnnnnnnnnnnnnnnnnnnnnnnnnnnnnnnnnnnnnnnnnnnnnnnnnnnnnnnnnnnnnnnnnnnnnnnnnnnnnnnnnnnnnnnnnnnnnnnnnnnnnnnnnnnnnnnnnnnnnnnnnnnnnnnnnnnnnnnnnnnnnnnnnnnnnnnnnnnnnnnnnnnnnnnnnnnnnnnnnnnnnnnnnnnnnnnnnnnnnnnnnnnnnnnnnnnnnnnnnnnnnnnnnnnnnnnnnnnnnnnnnnnnnnnnnnnnnnnnnnnnnnnnnnnnnnnnnnnnnnnnnnnnnnnnnnnnnnnnnnnnnnnnnnnnnnnnnnnnnnnnnnnnnnnnnnnnnnnnnnnnnnnnnnnnnnnnnnnnnnnnnnnnnnnnnnnnnnnnnnnnnnnnnnnnnnnnnnnnnnnnnnnnnnnnnnnnnnnnnnnnnnnnnnnnnnnnnnnnnnnnnnnnnnnnnnnnnnnnnnnnnnnnnnnnnnnnnnnnnnnnnnnnnnnnnnnnnnnnnnnnnnnnnnnnnnnnnnnnnnnnnnnnnnnnnnnnnnnnnnnnnnnnnnnnnnnnnnnnnnnnnnnnnnnnnnnnnnnnnnnnnnnnnnnnnnnnnnnnnnnnnnnnnnnnnnnnnnnnnnnnnnnnnnnnnnnnnnnnnnnnnnnnnnnnnnnnnnnnnnnnnnnnnnnnnnnnnnnnnnnnnnnnnnnnnnnnnnnnnnnnnnnnnnnnnnnnnnnnnnnnnnnnnnnnnnnnnnnnnnnnnnnnnnnnnnnnnnnnnnnnnnnnnnnnnnnnnnnnnnnnnnnnnnnnnnnnnnnnnnnnnnnnnnnnnnnnnnnnnnnnnnnnnnnnnnnnnnnnnnnnnnnnnnnnnnnnnnnnnnnnnnnnnnnnnnnnnnnnnnnnnnnnnnnnnnnnnnnnnnnnnnnnnnnnnnnnnnnnnnnnnnnnnnnnnnnnnnnnnnnnnnnnnnnnnnnnnnnnnnnnnnnnnnnnnnnnnnnnnnnnnnnnnnnnnnnnnnnnnnnnnnnnnnnnnnnnnnnnnnnnnnnnnnnnnnnnnnnnnnnnnnnnnnnnnnnnnnnnnnnnnnnnnnnnnnnnnnnnnnnnnnnnnnnnnnnnnnnnnnnnnnnnnnnnnnnnnnnnnnnnnnnnnnnnnnnnnnnnnnnnnnnnnnnnnnnnnnnnnnnnnnnnnnnnnnnnnnnnnnnnnnnnnnnnnnnnnnnnnnnnnnnnnnnnnnnnnnnnnnnnnnnnnnnnnnnnnnnnnnnnnnnnnnnnnnnnnnnnnnnnnnnnnnnnnnnnnnnnnnnnnnnnnnnnnnnnnnnnnnnnnnnnnnnnnnnnnnnnnnnnnnnnnnnnnnnnnnnnnnnnnnnnnnnnnnnnnnnnnnnnnnnnnnnnnnnnnnnnnnnnnnnnnnnnnnnnnnnnnnnnnnnnnnnnnnnnnnnnnnnnnnnnnnnnnnnnnnnnnnnnnnnnnnnnnnnnnnnnnnnnnnnnnnnnnnnnnnnnnnnnnnnnnnnnnnnnnnnnnnnnnnnnnnnnnnnnnnnnnnnnnnnnnnnnnnnnnnnnnnnnnnnnnnnnnnnnnnnnnnnnnnnnnnnnnnnnnnnnnnnnnnnnnnnnnnnnnnnnnnnnnnnnnnnnnnnnnnnnnnnnnnnnnnnnnnnnnnnnnnnnnnnnnnnnnnnnnnnnnnnnnnnnnnnnnnnnnnnnnnnnnnnnnnnnnnnnnnnnnnnnnnnnnnnnnnnnnnnnnnnnnnnnnnnnnnnnnnnnnnnnnnnnnnnnnnnnnnnnnnnnnnnnnnnnnnnnnnnnnnnnnnnnnnnnnnnnnnnnnnnnnnnnnnnnnnnnnnnnnnnnnnnnnnnnnnnnnnnnnnnnnnnnnnnnnnnnnnnnnnnnnnnnnnnnnnnnnnnnnnnnnnnnnnnnnnnnnnnnnnnnnnnnnnnnnnnnnnnnnnnnnnnnnnnnnnnnnnnnnnnnnnnnnnnnnnnnnnnnnnnnnnnnnnnnnnnnnnnnnnnnnnnnnnnnnnnnnnnnnnnnnnnnnnnnnnnnnnnnnnnnnnnnnnnnnnnnnnnnnnnnnnnnnnnnnnnnnnnnnnnnnnnnnnnnnnnnnnnnnnnnnnnnnnnnnnnnnnnnnnnnnnnnnnnnnnnnnnnnnnnnnnnnnnnnnnnnnnnnnnnnnnnnnnnnnnnnnnnnnnnnnnnnnnnnnnnnnnnnnnnnnnnnnnnnnnnnnnnnnnnnnnnnnnnnnnnnnnnnnnnnnnnnnnnnnnnnnnnnnnnnnnnnnnnnnnnnnnnnnnnnnnnnnnnnnnnnnnnnnnnnnnnnnnnnnnnnnnnnnnnnnnnnnnnnnnnnnnnnnnnnnnnnnnnnnnnnnnnnnnnnnnnnnnnnnnnnnnnnnnnnnnnnnnnnnnnnnnnnnnnnnnnnnnnnnnnnnnnnnnnnnnnnnnnnnnnnnnnnnnnnnnnnnnnnnnnnnnnnnnnnnnnnnnnnnnnnnnnnnnnnnnnnnnnnnnnnnnnnnnnnnnnnnnnnnnnnnnnnnnnnnnnnnnnnnnnnnnnnnnnnnnnnnnnnnnnnnnnnnnnnnnnnnnnnnnnnnnnnnnnnnnnnnnnnnnnnnnnnnnnnnnnnnnnnnnnnnnnnnnnnnnnnnnnnnnnnnnnnnnnnnnnnnnnnnnnnnnnnnnnnnnnnnnnnnnnnnnnnnnnnnnnnnnnnnnnnnnnnnnnnnnnnnnnnnnnnnnnnnnnnnnnnnnnnnnnnnnnnnnnnnnnnnnnnnnnnnnnnnnnnnnnnnnnnnnnnnnnnnnnnnnnnnnnnnnnnnnnnnnnnnnnnnnnnnnnnnnnnnnnnnnnnnnnnnnnnnnnnnnnnnnnnnnnnnnnnnnnnnnnnnnnnnnnnnnnnnnnnnnnnnnnnnnnnnnnnnnnnnnnnnnnnnnnnnnnnnnnnnnnnnnnnnnnnnnnnnnnnnnnnnnnnnnnnnnnnnnnnnnnnnnnnnnnnnnnnnnnnnnnnnnnnnnnnnnnnnnnnnnnnnnnnnnnnnnnnnnnnnnnnnnnnnnnnnnnnnnnnnnnnnnnnnnnnnnnnnnnnnnnnnnnnnnnnnnnnnnnnnnnnnnnnnnnnnnnnnnnnnnnnnnnnnnnnnnnnnnnnnnnnnnnnnnnnnnnnnnnnnnnnnnnnnnnnnnnnnnnnnnnnnnnnnnnnnnnnnnnnnnnnnnnnnnnnnnnnnnnnnnnnnnnnnnnnnnnnnnnnnnnnnnnnnnnnnnnnnnnnnnnnnnnnnnnnnnnnnnnnnnnnnnnnnnnnnnnnnnnnnnnnnnnnnnnnnnnnnnnnnnnnnnnnnnnnnnnnnnnnnnnnnnnnnnnnnnnnnnnnnnnnnnnnnnnnnnnnnnnnnnnnnnnnnnnnnnnnnnnnnnnnnnnnnnnnnnnnnnnnnnnnnnnnnnnnnnnnnnnnnnnnnnnnnnnnnnnnnnnnnnnnnnnnnnnnnnnnnnnnnnnnnnnnnnnnnnnnnnnnnnnnnnnnnnnnnnnnnnnnnnnnnnnnnnnnnnnnnnnnnnnnnnnnnnnnnnnnnnnnnnnnnnnnnnnnnnnnnnnnnnnnnnnnnnnnnnnnnnnnnnnnnnnnnnnnnnnnnnnnnnnnnnnnnnnnnnnnnnnnnnnnnnnnnnnnnnnnnnnnnnnnnnnnnnnnnnnnnnnnnnnnnnnnnnnnnnnnnnnnnnnnnnnnnnnnnnnnnnnnnnnnnnnnnnnnnnnnnnnnnnnnnnnnnnnnnnnnnnnnnnnnnnnnnnnnnnnnnnnnnnnnnnnnnnnnnnnnnnnnnnnnnnnnnnnnnnnnnnnnnnnnnnnnnnnnnnnnnnnnnnnnnnnnnnnnnnnnnnnnnnnnnnnnnnnnnnnnnnnnnnnnnnnnnnnnnnnnnnnnnnnnnnnnnnnnnnnnnnnnnnnnnnnnnnnnnnnnnnnnnnnnnnnnnnnnnnnnnnnnnnnnnnnnnnnnnnnnnnnnnnnnnnnnnnnnnnnnnnnnnnnnnnnnnnnnnnnnnnnnnnnnnnnnnnnnnnnnnnnnnnnnnnnnnnnnnnnnnnnnnnnnnnnnnnnnnnnnnnnnnnnnnnnnnnnnnnnnnnnnnnnnnnnnnnnnnnnnnnnnnnnnnnnnnnnnnnnnnnnnnnnnnnnnnnnnnnnnnnnnnnnnnnnnnnnnnnnnnnnnnnnnnnnnnnnnnnnnnnnnnnnnnnnnnnnnnnnnnnnnnnnnnnnnnnnnnnnnnnnnnnnnnnnnnnnnnnnnnnnnnnnnnnnnnnnnnnnnnnnnnnnnnnnnnnnnnnnnnnnnnnnnnnnnnnnnnnnnnnnnnnnnnnnnnnnnnnnnnnnnnnnnnnnnnnnnnnnnnnnnnnnnnnnnnnnnnnnnnnnnnnnnnnnnnnnnnnnnnnnnnnnnnnnnnnnnnnnnnnnnnnnnnnnnnnnnnnnnnnnnnnnnnnnnnnnnnnnnnnnnnnnnnnnnnnnnnnnnnnnnnnnnnnnnnnnnnnnnnnnnnnnnnnnnnnnnnnnnnnnnnnnnnnnnnnnnnnnnnnnnnnnnnnnnnnnnnnnnnnnnnnnnnnnnnnnnnnnnnnnnnnnnnnnnnnnnnnnnnnnnnnnnnnnnnnnnnnnnnnnnnnnnnnnnnnnnnnnnnnnnnnnnnnnnnnnnnnnnnnnnnnnnnnnnnnnnnnnnnnnnnnnnnnnnnnnnnnnnnnnnnnnnnnnnnnnnnnnnnnnnnnnnnnnnnnnnnnnnnnnnnnnnnnnnnnnnnnnnnnnnnnnnnnnnnnnnnnnnnnnnnnnnnnnnnnnnnnnnnnnnnnnnnnnnnnnnnnnnnnnnnnnnnnnnnnnnnnnnnnnnnnnnnnnnnnnnnnnnnnnnnnnnnnnnnnnnnnnnnnnnnnnnnnnnnnnnnnnnnnnnnnnnnnnnnnnnnnnnnnnnnnnnnnnnnnnnnnnnnnnnnnnnnnnnnnnnnnnnnnnnnnnnnnnnnnnnnnnnnnnnnnnnnnnnnnnnnnnnnnnnnnnnnnnnnnnnnnnnnnnnnnnnnnnnnnnnnnnnnnnnnnnnnnnnnnnnnnnnnnnnnnnnnnnnnnnnnnnnnnnnnnnnnnnnnnnnnnnnnnnnnnnnnnnnnnnnnnnnnnnnnnnnnnnnnnnnnnnnnnnnnnnnnnnnnnnnnnnnnnnnnnnnnnnnnnnnnnnnnnnnnnnnnnnnnnnnnnnnnnnnnnnnnnnnnnnnnnnnnnnnnnnnnnnnnnnnnnnnnnnnnnnnnnnnnnnnnnnnnnnnnnnnnnnnnnnnnnnnnnnnnnnnnnnnnnnnnnnnnnnnnnnnnnnnnnnnnnnnnnnnnnnnnnnnnnnnnnnnnnnnnnnnnnnnnnnnnnnnnnnnnnnnnnnnnnnnnnnnnnnnnnnnnnnnnnnnnnnnnnnnnnnnnnnnnnnnnnnnnnnnnnnnnnnnnnnnnnnnnnnnnnnnnnnnnnnnnnnnnnnnnnnnnnnnnnnnnnnnnnnnnnnnnnnnnnnnnnnnnnnnnnnnnnnnnnnnnnnnnnnnnnnnnnnnnnnnnnnnnnnnnnnnnnnnnnnnnnnnnnnnnnnnnnnnnnnnnnnnnnnnnnnnnnnnnnnnnnnnnnnnnnnnnnnnnnnnnnnnnnnnnnnnnnnnnnnnnnnnnnnnnnnnnnnnnnnnnnnnnnnnnnnnnnnnnnnnnnnnnnnnnnnnnnnnnnnnnnnnnnnnnnnnnnnnnnnnnnnnnnnnnnnnnnnnnnnnnnnnnnnnnnnnnnnnnnnnnnnnnnnnnnnnnnnnnnnnnnnnnnnnnnnnnnnnnnnnnnnnnnnnnnnnnnnnnnnnnnnnnnnnnnnnnnnnnnnnnnnnnnnnnnnnnnnnnnnnnnnnnnnnnnnnnnnnnnnnnnnnnnnnnnnnnnnnnnnnnnnnnnnnnnnnnnnnnnnnnnnnnnnnnnnnnnnnnnnnnnnnnnnnnnnnnnnnnnnnnnnnnnnnnnnnnnnnnnnnnnnnnnnnnnnnnnnnnnnnnnnnnnnnnnnnnnnnnnnnnnnnnnnnnnnnnnnnnnnnnnnnnnnnnnnnnnnnnnnnnnnnnnnnnnnnnnnnnnnnnnnnnnnnnnnnnnnnnnnnnnnnnnnnnnnnnnnnnnnnnnnnnnnnnnnnnnnnnnnnnnnnnnnnnnnnnnnnnnnnnnnnnnnnnnnnnnnnnnnnnnnnnnnnnnnnnnnnnnnnnnnnnnnnnnnnnnnnnnnnnnnnnnnnnnnnnnnnnnnnnnnnnnnnnnnnnnnnnnnnnnnnnnnnnnnnnnnnnnnnnnnnnnnnnnnnnnnnnnnnnnnnnnnnnnnnnnnnnnnnnnnnnnnnnnnnnnnnnnnnnnnnnnnnnnnnnnnnnnnnnnnnnnnnnnnnnnnnnnnnnnnnnnnnnnnnnnnnnnnnnnnnnnnnnnnnnnnnnnnnnnnnnnnnnnnnnnnnnnnnnnnnnnnnnnnnnnnnnnnnnnnnnnnnnnnnnnnnnnnnnnnnnnnnnnnnnnnnnnnnnnnnnnnnnnnnnnnnnnnnnnnnnnnnnnnnnnnnnnnnnnnnnnnnnnnnnnnnnnnnnnnnnnnnnnnnnnnnnnnnnnnnnnnnnnnnnnnnnnnnnnnnnnnnnnnnnnnnnnnnnnnnnnnnnnnnnnnnnnnnnnnnnnnnnnnnnnnnnnnnnnnnnnnnnnnnnnnnnnnnnnnnnnnnnnnnnnnnnnnnnnnnnnnnnnnnnnnnnnnnnnnnnnnnnnnnnnnnnnnnnnnnnnnnnnnnnnnnnnnnnnnnnnnnnnnnnnnnnnnnnnnnnnnnnnnnnnnnnnnnnnnnnnnnnnnnnnnnnnnnnnnnnnnnnnnnnnnnnnnnnnnnnnnnnnnnnnnnnnnnnnnnnnnnnnnnnnnnnnnnnnnnnnnnnnnnnnnnnnnnnnnnnnnnnnnnnnnnnnnnnnnnnnnnnnnnnnnnnnnnnnnnnnnnnnnnnnnnnnnnnnnnnnnnnnnnnnnnnnnnnnnnnnnnnnnnnnnnnnnnnnnnnnnnnnnnnnnnnnnnnnnnnnnnnnnnnnnnnnnnnnnnnnnnnnnnnnnnnnnnnnnnnnnnnnnnnnnnnnnnnnnnnnnnnnnnnnnnnnnnnnnnnnnnnnnnnnnnnnnnnnnnnnnnnnnnnnnnnnnnnnnnnnnnnnnnnnnnnnnnnnnnnnnnnnnnnnnnnnnnnnnnnnnnnnnnnnnnnnnnnnnnnnnnnnnnnnnnnnnnnnnnnnnnnnnnnnnnnnnnnnnnnnnnnnnnnnnnnnnnnnnnnnnnnnnnnnnnnnnnnnnnnnnnnnnnnnnnnnnnnnnnnnnnnnnnnnnnnnnnnnnnnnnnnnnnnnnnnnnnnnnnnnnnnnnnnnnnnnnnnnnnnnnnnnnnnnnnnnnnnnnnnnnnnnnnnnnnnnnnnnnnnnnnnnnnnnnnnnnnnnnnnnnnnnnnnnnnnnnnnnnnnnnnnnnnnnnnnnnnnnnnnnnnnnnnnnnnnnnnnnnnnnnnnnnnnnnnnnnnnnnnnnnnnnnnnnnnnnnnnnnnnnnnnnnnnnnnnnnnnnnnnnnnnnnnnnnnnnnnnnnnnnnnnnnnnnnnnnnnnnnnnnnnnnnnnnnnnnnnnnnnnnnnnnnnnnnnnnnnnnnnnnnnnnnnnnnnnnnnnnnnnnnnnnnnnnnnnnnnnnnnnnnnnnnnnnnnnnnnnnnnnnnnnnnnnnnnnnnnnnnnnnnnnnnnnnnnnnnnnnnnnnnnnnnnnnnnnnnnnnnnnnnnnnnnnnnnnnnnnnnnnnnnnnnnnnnnnnnnnnnnnnnnnnnnnnnnnnnnnnnnnnnnnnnnnnnnnnnnnnnnnnnnnnnnnnnnnnnnnnnnnnnnnnnnnnnnnnnnnnnnnnnnnnnnnnnnnnnnnnnnnnnnnnnnnnnnnnnnnnnnnnnnnnnnnnnnnnnnnnnnnnnnnnnnnnnnnnnnnnnnnnnnnnnnnnnnnnnnnnnnnnnnnnnnnnnnnnnnnnnnnnnnnnnnnnnnnnnnnnnnnnnnnnnnnnnnnnnnnnnnnnnnnnnnnnnnnnnnnnnnnnnnnnnnnnnnnnnnnnnnnnnnnnnnnnnnnnnnnnnnnnnnnnnnnnnnnnnnnnnnnnnnnnnnnnnnnnnnnnnnnnnnnnnnnnnnnnnnnnnnnnnnnnnnnnnnnnnnnnnnnnnnnnnnnnnnnnnnnnnnnnnnnnnnnnnnnnnnnnnnnnnnnnnnnnnnnnnnnnnnnnnnnnnnnnnnnnnnnnnnnnnnnnnnnnnnnnnnnnnnnnnnnnnnnnnnnnnnnnnnnnnnnnnnnnnnnnnnnnnnnnnnnnnnnnnnnnnnnnnnnnnnnnnnnnnnnnnnnnnnnnnnnnnnnnnnnnnnnnnnnnnnnnnnnnnnnnnnnnnnnnnnnnnnnnnnnnnnnnnnnnnnnnnnnnnnnnnnnnnnnnnnnnnnnnnnnnnnnnnnnnnnnnnnnnnnnnnnnnnnnnnnnnnnnnnnnnnnnnnnnnnnnnnnnnnnnnnnnnnnnnnnnnnnnnnnnnnnnnnnnnnnnnnnnnnnnnnnnnnnnnnnnnnnnnnnnnnnnnnnnnnnnnnnnnnnnnnnnnnnnnnnnnnnnnnnnnnnnnnnnnnnnnnnnnnnnnnnnnnnnnnnnnnnnnnnnnnnnnnnnnnnnnnnnnnnnnnnnnnnnnnnnnnnnnnnnnnnnnnnnnnnnnnnnnnnnnnnnnnnnnnnnnnnnnnnnnnnnnnnnnnnnnnnnnnnnnnnnnnnnnnnnnnnnnnnnnnnnnnnnnnnnnnnnnnnnnnnnnnnnnnnnnnnnnnnnnnnnnnnnnnnnnnnnnnnnnnnnnnnnnnnnnnnnnnnnnnnnnnnnnnnnnnnnnnnnnnnnnnnnnnnnnnnnnnnnnnnnnnnnnnnnnnnnnnnnnnnnnnnnnnnnnnnnnnnnnnnnnnnnnnnnnnnnnnnnnnnnnnnnnnnnnnnnnnnnnnnnnnnnnnnnnnnnnnnnnnnnnnnnnnnnnnnnnnnnnnnnnnnnnnnnnnnnnnnnnnnnnnnnnnnnnnnnnnnnnnnnnnnnnnnnnnnnnnnnnnnnnnnnnnnnnnnnnnnnnnnnnnnnnnnnnnnnnnnnnnnnnnnnnnnnnnnnnnnnnnnnnnnnnnnnnnnnnnnnnnnnnnnnnnnnnnnnnnnnnnnnnnnnnnnnnnnnnnnnnnnnnnnnnnnnnnnnnnnnnnnnnnnnnnnnnnnnnnnnnnnnnnnnnnnnnnnnnnnnnnnnnnnnnnnnnnnnnnnnnnnnnnnnnnnnnnnnnnnnnnnnnnnnnnnnnnnnnnnnnnnnnnnnnnnnnnnnnnnnnnnnnnnnnnnnnnnnnnnnnnnnnnnnnnnnnnnnnnnnnnnnnnnnnnnnnnnnnnnnnnnnnnnnnnnnnnnnnnnnnnnnnnnnnnnnnnnnnnnnnnnnnnnnnnnnnnnnnnnnnnnnnnnnnnnnnnnnnnnnnnnnnnnnnnnnnnnnnnnnnnnnnnnnnnnnnnnnnnnnnnnnnnnnnnnnnnnnnnnnnnnnnnnnnnnnnnnnnnnnnnnnnnnnnnnnnnnnnnnnnnnnnnnnnnnnnnnnnnnnnnnnnnnnnnnnnnnnnnnnnnnnnnnnnnnnnnnnnnnnnnnnnnnnnnnnnnnnnnnnnnnnnnnnnnnnnnnnnnnnnnnnnnnnnnnnnnnnnnnnnnnnnnnnnnnnnnnnnnnnnnnnnnnnnnnnnnnnnnnnnnnnnnnnnnnnnnnnnnnnnnnnnnnnnnnnnnnnnnnnnnnnnnnnnnnnnnnnnnnnnnnnnnnnnnnnnnnnnnnnnnnnnnnnnnnnnnnnnnnnnnnnnnnnnnnnnnnnnnnnnnnnnnnnnnnnnnnnnnnnnnnnnnnnnnnnnnnnnnnnnnnnnnnnnnnnnnnnnnnnnnnnnnnnnnnnnnnnnnnnnnnnnnnnnnnnnnnnnnnnnnnnnnnnnnnnnnnnnnnnnnnnnnnnnnnnnnnnnnnnnnnnnnnnnnnnnnnnnnnnnnnnnnnnnnnnnnnnnnnnnnnnnnnnnnnnnnnnnnnnnnnnnnnnnnnnnnnnnnnnnnnnnnnnnnnnnnnnnnnnnnnnnnnnnnnnnnnnnnnnnnnnnnnnnnnnnnnnnnnnnnnnnnnnnnnnnnnnnnnnnnnnnnnnnnnnnnnnnnnnnnnnnnnnnnnnnnnnnnnnnnnnnnnnnnnnnnnnnnnnnnnnnnnnnnnnnnnnnnnnnnnnnnnnnnnnnnnnnnnnnnnnnnnnnnnnnnnnnnnnnnnnnnnnnnnnnnnnnnnnnnnnnnnnnnnnnnnnnnnnnnnnnnnnnnnnnnnnnnnnnnnnnnnnnnnnnnnnnnnnnnnnnnnnnnnnnnnnnnnnnnnnnnnnnnnnnnnnnnnnnnnnnnnnnnnnnnnnnnnnnnnnnnnnnnnnnnnnnnnnnnnnnnnnnnnnnnnnnnnnnnnnnnnnnnnnnnnnnnnnnnnnnnnnnnnnnnnnnnnnnnnnnnnnnnnnnnnnnnnnnnnnnnnnnnnnnnnnnnnnnnnnnnnnnnnnnnnnnnnnnnnnnnnnnnnnnnnnnnnnnnnnnnnnnnnnnnnnnnnnnnnnnnnnnnnnnnnnnnnnnnnnnnnnnnnnnnnnnnnnnnnnnnnnnnnnnnnnnnnnnnnnnnnnnnnnnnnnnnnnnnnnnnnnnnnnnnnnnnnnnnnnnnnnnnnnnnnnnnnnnnnnnnnnnnnnnnnnnnnnnnnnnnnnnnnnnnnnnnnnnnnnnnnnnnnnnnnnnnnnnnnnnnnnnnnnnnnnnnnnnnnnnnnnnnnnnnnnnnnnnnnnnnnnnnnnnnnnnnnnnnnnnnnnnnnnnnnnnnnnnnnnnnnnnnnnnnnnnnnnnnnnnnnnnnnnnnnnnnnnnnnnnnnnnnnnnnnnnnnnnnnnnnnnnnnnnnnnnnnnnnnnnnnnnnnnnnnnnnnnnnnnnnnnnnnnnnnnnnnnnnnnnnnnnnnnnnnnnnnnnnnnnnnnnnnnnnnnnnnnnnnnnnnnnnnnnnnnnnnnnnnnnnnnnnnnnnnnnnnnnnnnnnnnnnnnnnnnnnnnnnnnnnnnnnnnnnnnnnnnnnnnnnnnnnnnnnnnnnnnnnnnnnnnnnnnnnnnnnnnnnnnnnnnnnnnnnnnnnnnnnnnnnnnnnnnnnnnnnnnnnnnnnnnnnnnnnnnnnnnnnnnnnnnnnnnnnnnnnnnnnnnnnnnnnnnnnnnnnnnnnnnnnnnnnnnnnnnnnnnnnnnnnnnnnnnnnnnnnnnnnnnnnnnnnnnnnnnnnnnnnnnnnnnnnnnnnnnnnnnnnnnnnnnnnnnnnnnnnnnnnnnnnnnnnnnnnnnnnnnnnnnnnnnnnnnnnnnnnnnnnnnnnnnnnnnnnnnnnnnnnnnnnnnnnnnnnnnnnnnnnnnnnnnnnnnnnnnnnnnnnnnnnnnnnnnnnnnnnnnnnnnnnnnnnnnnnnnnnnnnnnnnnnnnnnnnnnnnnnnnnnnnnnnnnnnnnnnnnnnnnnnnnnnnnnnnnnnnnnnnnnnnnnnnnnnnnnnnnnnnnnnnnnnnnnnnnnnnnnnnnnnnnnnnnnnnnnnnnnnnnnnnnnnnnnnnnnnnnnnnnnnnnnnnnnnnnnnnnnnnnnnnnnnnnnnnnnnnnnnnnnnnnnnnnnnnnnnnnnnnnnnnnnnnnnnnnnnnnnnnnnnnnnnnnnnnnnnnnnnnnnnnnnnnnnnnnnnnnnnnnnnnnnnnnnnnnnnnnnnnnnnnnnnnnnnnnnnnnnnnnnnnnnnnnnnnnnnnnnnnnnnnnnnnnnnnnnnnnnnnnnnnnnnnnnnnnnnnnnnnnnnnnnnnnnnnnnnnnnnnnnnnnnnnnnnnnnnnnnnnnnnnnnnnnnnnnnnnnnnnnnnnnnnnnnnnnnnnnnnnnnnnnnnnnnnnnnnnnnnnnnnnnnnnnnnnnnnnnnnnnnnnnnnnnnnnnnnnnnnnnnnnnnnnnnnnnnnnnnnnnnnnnnnnnnnnnnnnnnnnnnnnnnnnnnnnnnnnnnnnnnnnnnnnnnnnnnnnnnnnnnnnnnnnnnnnnnnnnnnnnnnnnnnnnnnnnnnnnnnnnnnnnnnnnnnnnnnnnnnnnnnnnnnnnnnnnnnnnnnnnnnnnnnnnnnnnnnnnnnnnnnnnnnnnnnnnnnnnnnnnnnnnnnnnnnnnnnnnnnnnnnnnnnnnnnnnnnnnnnnnnnnnnnnnnnnnnnnnnnnnnnnnnnnnnnnnnnnnnnnnnnnnnnnnnnnnnnnnnnnnnnnnnnnnnnnnnnnnnnnnnnnnnnnnnnnnnnnnnnnnnnnnnnnnnnnnnnnnnnnnnnnnnnnnnnnnnnnnnnnnnnnnnnnnnnnnnnnnnnnnnnnnnnnnnnnnnnnnnnnnnnnnnnnnnnnnnnnnnnnnnnnnnnnnnnnnnnnnnnnnnnnnnnnnnnnnnnnnnnnnnnnnnnnnnnnnnnnnnnnnnnnnnnnnnnnnnnnnnnnnnnnnnnnnnnnnnnnnnnnnnnnnnnnnnnnnnnnnnnnnnnnnnnnnnnnnnnnnnnnnnnnnnnnnnnnnnnnnnnnnnnnnnnnnnnnnnnnnnnnnnnnnnnnnnnnnnnnnnnnnnnnnnnnnnnnnnnnnnnnnnnnnnnnnnnnnnnnnnnnnnnnnnnnnnnnnnnnnnnnnnnnnnnnnnnnnnnnnnnnnnnnnnnnnnnnnnnnnnnnnnnnnnnnnnnnnnnnnnnnnnnnnnnnnnnnnnnnnnnnnnnnnnnnnnnnnnnnnnnnnnnnnnnnnnnnnnnnnnnnnnnnnnnnnnnnnnnnnnnnnnnnnnnnnnnnnnnnnnnnnnnnnnnnnnnnnnnnnnnnnnnnnnnnnnnnnnnnnnnnnnnnnnnnnnnnnnnnnnnnnnnnnnnnnnnnnnnnnnnnnnnnnnnnnnnnnnnnnnnnnnnnnnnnnnnnnnnnnnnnnnnnnnnnnnnnnnnnnnnnnnnnnnnnnnnnnnnnnnnnnnnnnnnnnnnnnnnnnnnnnnnnnnnnnnnnnnnnnnnnnnnnnnnnnnnnnnnnnnnnnnnnnnnnnnnnnnnnnnnnnnnnnnnnnnnnnnnnnnnnnnnnnnnnnnnnnnnnnnnnnnnnnnnnnnnnnnnnnnnnnnnnnnnnnnnnnnnnnnnnnnnnnnnnnnnnnnnnnnnnnnnnnnnnnnnnnnnnnnnnnnnnnnnnnnnnnnnnnnnnnnnnnnnnnnnnnnnnnnnnnnnnnnnnnnnnnnnnnnnnnnnnnnnnnnnnnnnnnnnnnnnnnnnnnnnnnnnnnnnnnnnnnnnnnnnnnnnnnnnnnnnnnnnnnnnnnnnnnnnnnnnnnnnnnnnnnnnnnnnnnnnnnnnnnnnnnnnnnnnnnnnnnnnnnnnnnnnnnnnnnnnnnnnnnnnnnnnnnnnnnnnnnnnnnnnnnnnnnnnnnnnnnnnnnnnnnnnnnnnnnnnnnnnnnnnnnnnnnnnnnnnnnnnnnnnnnnnnnnnnnnnnnnnnnnnnnnnnnnnnnnnnnnnnnnnnnnnnnnnnnnnnnnnnnnnnnnnnnnnnnnnnnnnnnnnnnnnnnnnnnnnnnnnnnnnnnnnnnnnnnnnnnnnnnnnnnnnnnnnnnnnnnnnnnnnnnnnnnnnnnnnnnnnnnnnnnnnnnnnnnnnnnnnnnnnnnnnnnnnnnnnnnnnnnnnnnnnnnnnnnnnnnnnnnnnnnnnnnnnnnnnnnnnnnnnnnnnnnnnnnnnnnnnnnnnnnnnnnnnnnnnnnnnnnnnnnnnnnnnnnnnnnnnnnnnnnnnnnnnnnnnnnnnnnnnnnnnnnnnnnnnnnnnnnnnnnnnnnnnnnnnnnnnnnnnnnnnnnnnnnnnnnnnnnnnnnnnnnnnnnnnnnnnnnnnnnnnnnnnnnnnnnnnnnnnnnnnnnnnnnnnnnnnnnnnnnnnnnnnnnnnnnnnnnnnnnnnnnnnnnnnnnnnnnnnnnnnnnnnnnnnnnnnnnnnnnnnnnnnnnnnnnnnnnnnnnnnnnnnnnnnnnnnnnnnnnnnnnnnnnnnnnnnnnnnnnnnnnnnnnnnnnnnnnnnnnnnnnnnnnnnnnnnnnnnnnnnnnnnnnnnnnnnnnnnnnnnnnnnnnnnnnnnnnnnnnnnnnnnnnnnnnnnnnnnnnnnnnnnnnnnnnnnnnnnnnnnnnnnnnnnnnnnnnnnnnnnnnnnnnnnnnnnnnnnnnnnnnnnnnnnnnnnnnnnnnnnnnnnnnnnnnnnnnnnnnnnnnnnnnnnnnnnnnnnnnnnnnnnnnnnnnnnnnnnnnnnnnnnnnnnnnnnnnnnnnnnnnnnnnnnnnnnnnnnnnnnnnnnnnnnnnnnnnnnnnnnnnnnnnnnnnnnnnnnnnnnnnnnnnnnnnnnnnnnnnnnnnnnnnnnnnnnnnnnnnnnnnnnnnnnnnnnnnnnnnnnnnnnnnnnnnnnnnnnnnnnnnnnnnnnnnnnnnnnnnnnnnnnnnnnnnnnnnnnnnnnnnnnnnnnnnnnnnnnnnnnnnnnnnnnnnnnnnnnnnnnnnnnnnnnnnnnnnnnnnnnnnnnnnnnnnnnnnnnnnnnnnnnnnnnnnnnnnnnnnnnnnnnnnnnnnnnnnnnnnnnnnnnnnnnnnnnnnnnnnnnnnnnnnnnnnnnnnnnnnnnnnnnnnnnnnnnnnnnnnnnnnnnnnnnnnnnnnnnnnnnnnnnnnnnnnnnnnnnnnnnnnnnnnnnnnnnnnnnnnnnnnnnnnnnnnnnnnnnnnnnnnnnnnnnnnnnnnnnnnnnnnnnnnnnnnnnnnnnnnnnnnnnnnnnnnnnnnnnnnnnnnnnnnnnnnnnnnnnnnnnnnnnnnnnnnnnnnnnnnnnnnnnnnnnnnnnnnnnnnnnnnnnnnnnnnnnnnnnnnnnnnnnnnnnnnnnnnnnnnnnnnnnnnnnnnnnnnnnnnnnnnnnnnnnnnnnnnnnnnnnnnnnnnnnnnnnnnnnnnnnnnnnnnnnnnnnnnnnnnnnnnnnnnnnnnnnnnnnnnnnnnnnnnnnnnnnnnnnnnnnnnnnnnnnnnnnnnnnnnnnnnnnnnnnnnnnnnnnnnnnnnnnnnnnnnnnnnnnnnnnnnnnnnnnnnnnnnnnnnnnnnnnnnnnnnnnnnnnnnnnnnnnnnnnnnnnnnnnnnnnnnnnnnnnnnnnnnnnnnnnnnnnnnnnnnnnnnnnnnnnnnnnnnnnnnnnnnnnnnnnnnnnnnnnnnnnnnnnnnnnnnnnnnnnnnnnnnnnnnnnnnnnnnnnnnnnnnnnnnnnnnnnnnnnnnnnnnnnnnnnnnnnnnnnnnnnnnnnnnnnnnnnnnnnnnnnnnnnnnnnnnnnnnnnnnnnnnnnnnnnnnnnnnnnnnnnnnnnnnnnnnnnnnnnnnnnnnnnnnnnnnnnnnnnnnnnnnnnnnnnnnnnnnnnnnnnnnnnnnnnnnnnnnnnnnnnnnnnnnnnnnnnnnnnnnnnnnnnnnnnnnnnnnnnnnnnnnnnnnnnnnnnnnnnnnnnnnnnnnnnnnnnnnnnnnnnnnnnnnnnnnnnnnnnnnnnnnnnnnnnnnnnnnnnnnnnnnnnnnnnnnnnnnnnnnnnnnnnnnnnnnnnnnnnnnnnnnnnnnnnnnnnnnnnnnnnnnnnnnnnnnnnnnnnnnnnnnnnnnnnnnnnnnnnnnnnnnnnnnnnnnnnnnnnnnnnnnnnnnnnnnnnnnnnnnnnnnnnnnnnnnnnnnnnnnnnnnnnnnnnnnnnnnnnnnnnnnnnnnnnnnnnnnnnnnnnnnnnnnnnnnnnnnnnnnnnnnnnnnnnnnnnnnnnnnnnnnnnnnnnnnnnnnnnnnnnnnnnnnnnnnnnnnnnnnnnnnnnnnnnnnnnnnnnnnnnnnnnnnnnnnnnnnnnnnnnnnnnnnnnnnnnnnnnnnnnnnnnnnnnnnnnnnnnnnnnnnnnnnnnnnnnnnnnnnnnnnnnnnnnnnnnnnnnnnnnnnnnnnnnnnnnnnnnnnnnnnnnnnnnnnnnnnnnnnnnnnnnnnnnnnnnnnnnnnnnnnnnnnnnnnnnnnnnnnnnnnnnnnnnnnnnnnnnnnnnnnnnnnnnnnnnnnnnnnnnnnnnnnnnnnnnnnnnnnnnnnnnnnnnnnnnnnnnnnnnnnnnnnnnnnnnnnnnnnnnnnnnnnnnnnnnnnnnnnnnnnnnnnnnnnnnnnnnnnnnnnnnnnnnnnnnnnnnnnnnnnnnnnnnnnnnnnnnnnnnnnnnnnnnnnnnnnnnnnnnnnnnnnnnnnnnnnnnnnnnnnnnnnnnnnnnnnnnnnnnnnnnnnnnnnnnnnnnnnnnnnnnnnnnnnnnnnnnnnnnnnnnnnnnnnnnnnnnnnnnnnnnnnnnnnnnnnnnnnnnnnnnnnnnnnnnnnnnnnnnnnnnnnnnnnnnnnnnnnnnnnnnnnnnnnnnnnnnnnnnnnnnnnnnnnnnnnnnnnnnnnnnnnnnnnnnnnnnnnnnnnnnnnnnnnnnnnnnnnnnnnnnnnnnnnnnnnnnnnnnnnnnnnnnnnnnnnnnnnnnnnnnnnnnnnnnnnnnnnnnnnnnnnnnnnnnnnnnnnnnnnnnnnnnnnnnnnnnnnnnnnnnnnnnnnnnnnnnnnnnnnnnnnnnnnnnnnnnnnnnnnnnnnnnnnnnnnnnnnnnnnnnnnnnnnnnnnnnnnnnnnnnnnnnnnnnnnnnnnnnnnnnnnnnnnnnnnnnnnnnnnnnnnnnnnnnnnnnnnnnnnnnnnnnnnnnnnnnnnnnnnnnnnnnnnnnnnnnnnnnnnnnnnnnnnnnnnnnnnnnnnnnnnnnnnnnnnnnnnnnnnnnnnnnnnnnnnnnnnnnnnnnnnnnnnnnnnnnnnnnnnnnnnnnnnnnnnnnnnnnnnnnnnnnnnnnnnnnnnnnnnnnnnnnnnnnnnnnnnnnnnnnnnnnnnnnnnnnnnnnnnnnnnnnnnnnnnnnnnnnnnnnnnnnnnnnnnnnnnnnnnnnnnnnnnnnnnnnnnnnnnnnnnnnnnnnnnnnnnnnnnnnnnnnnnnnnnnnnnnnnnnnnnnnnnnnnnnnnnnnnnnnnnnnnnnnnnnnnnnnnnnnnnnnnnnnnnnnnnnnnnnnnnnnnnnnnnnnnnnnnnnnnnnnnnnnnnnnnnnnnnnnnnnnnnnnnnnnnnnnnnnnnnnnnnnnnnnnnnnnnnnnnnnnnnnnnnnnnnnnnnnnnnnnnnnnnnnnnnnnnnnnnnnnnnnnnnnnnnnnnnnnnnnnnnnnnnnnnnnnnnnnnnnnnnnnnnnnnnnnnnnnnnnnnnnnnnnnnnnnnnnnnnnnnnnnnnnnnnnnnnnnnnnnnnnnnnnnnnnnnnnnnnnnnnnnnnnnnnnnnnnnnnnnnnnnnnnnnnnnnnnnnnnnnnnnnnnnnnnnnnnnnnnnnnnnnnnnnnnnnnnnnnnnnnnnnnnnnnnnnnnnnnnnnnnnnnnnnnnnnnnnnnnnnnnnnnnnnnnnnnnnnnnnnnnnnnnnnnnnnnnnnnnnnnnnnnnnnnnnnnnnnnnnnnnnnnnnnnnnnnnnnnnnnnnnnnnnnnnnnnnnnnnnnnnnnnnnnnnnnnnnnnnnnnnnnnnnnnnnnnnnnnnnnnnnnnnnnnnnnnnnnnnnnnnnnnnnnnnnnnnnnnnnnnnnnnnnnnnnnnnnnnnnnnnnnnnnnnnnnnnnnnnnnnnnnnnnnnnnnnnnnnnnnnnnnnnnnnnnnnnnnnnnnnnnnnnnnnnnnnnnnnnnnnnnnnnnnnnnnnnnnnnnnnnnnnnnnnnnnnnnnnnnnnnnnnnnnnnnnnnnnnnnnnnnnnnnnnnnnnnnnnnnnnnnnnnnnnnnnnnnnnnnnnnnnnnnnnnnnnnnnnnnnnnnnnnnnnnnnnnnnnnnnnnnnnnnnnnnnnnnnnnnnnnnnnnnnnnnnnnnnnnnnnnnnnnnnnnnnnnnnnnnnnnnnnnnnnnnnnnnnnnnnnnnnnnnnnnnnnnnnnnnnnnnnnnnnnnnnnnnnnnnnnnnnnnnnnnnnnnnnnnnnnnnnnnnnnnnnnnnnnnnnnnnnnnnnnnnnnnnnnnnnnnnnnnnnnnnnnnnnnnnnnnnnnnnnnnnnnnnnnnnnnnnnnnnnnnnnnnnnnnnnnnnnnnnnnnnnnnnnnnnnnnnnnnnnnnnnnnnnnnnnnnnnnnnnnnnnnnnnnnnnnnnnnnnnnnnnnnnnnnnnnnnnnnnnnnnnnnnnnnnnnnnnnnnnnnnnnnnnnnnnnnnnnnnnnnnnnnnnnnnnnnnnnnnnnnnnnnnnnnnnnnnnnnnnnnnnnnnnnnnnnnnnnnnnnnnnnnnnnnnnnnnnnnnnnnnnnnnnnnnnnnnnnnnnnnnnnnnnnnnnnnnnnnnnnnnnnnnnnnnnnnnnnnnnnnnnnnnnnnnnnnnnnnnnnnnnnnnnnnnnnnnnnnnnnnnnnnnnnnnnnnnnnnnnnnnnnnnnnnnnnnnnnnnnnnnnnnnnnnnnnnnnnnnnnnnnnnnnnnnnnnnnnnnnnnnnnnnnnnnnnnnnnnnnnnnnnnnnnnnnnnnnnnnnnnnnnnnnnnnnnnnnnnnnnnnnnnnnnnnnnnnnnnnnnnnnnnnnnnnnnnnnnnnnnnnnnnnnnnnnnnnnnnnnnnnnnnnnnnnnnnnnnnnnnnnnnnnnnnnnnnnnnnnnnnnnnnnnnnnnnnnnnnnnnnnnnnnnnnnnnnnnnnnnnnnnnnnnnnnnnnnnnnnnnnnnnnnnnnnnnnnnnnnnnnnnnnnnnnnnnnnnnnnnnnnnnnnnnnnnnnnnnnnnnnnnnnnnnnnnnnnnnnnnnnnnnnnnnnnnnnnnnnnnnnnnnnnnnnnnnnnnnnnnnnnnnnnnnnnnnnnnnnnnnnnnnnnnnnnnnnnnnnnnnnnnnnnnnnnnnnnnnnnnnnnnnnnnnnnnnnnnnnnnnnnnnnnnnnnnnnnnnnnnnnnnnnnnnnnnnnnnnnnnnnnnnnnnnnnnnnnnnnnnnnnnnnnnnnnnnnnnnnnnnnnnnnnnnnnnnnnnnnnnnnnnnnnnnnnnnnnnnnnnnnnnnnnnnnnnnnnnnnnnnnnnnnnnnnnnnnnnnnnnnnnnnnnnnnnnnnnnnnnnnnnnnnnnnnnnnnnnnnnnnnnnnnnnnnnnnnnnnnnnnnnnnnnnnnnnnnnnnnnnnnnnnnnnnnnnnnnnnnnnnnnnnnnnnnnnnnnnnnnnnnnnnnnnnnnnnnnnnnnnnnnnnnnnnnnnnnnnnnnnnnnnnnnnnnnnnnnnnnnnnnnnnnnnnnnnnnnnnnnnnnnnnnnnnnnnnnnnnnnnnnnnnnnnnnnnnnnnnnnnnnnnnnnnnnnnnnnnnnnnnnnnnnnnnnnnnnnnnnnnnnnnnnnnnnnnnnnnnnnnnnnnnnnnnnnnnnnnnnnnnnnnnnnnnnnnnnnnnnnnnnnnnnnnnnnnnnnnnnnnnnnnnnnnnnnnnnnnnnnnnnnnnnnnnnnnnnnnnnnnnnnnnnnnnnnnnnnnnnnnnnnnnnnnnnnnnnnnnnnnnnnnnnnnnnnnnnnnnnnnnnnnnnnnnnnnnnnnnnnnnnnnnnnnnnnnnnnnnnnnnnnnnnnnnnnnnnnnnnnnnnnnnnnnnnnnnnnnnnnnnnnnnnnnnnnnnnnnnnnnnnnnnnnnnnnnnnnnnnnnnnnnnnnnnnnnnnnnnnnnnnnnnnnnnnnnnnnnnnnnnnnnnnnnnnnnnnnnnnnnnnnnnnnnnnnnnnnnnnnnnnnnnnnnnnnnnnnnnnnnnnnnnnnnnnnnnnnnnnnnnnnnnnnnnnnnnnnnnnnnnnnnnnnnnnnnnnnnnnnnnnnnnnnnnnnnnnnnnnnnnnnnnnnnnnnnnnnnnnnnnnnnnnnnnnnnnnnnnnnnnnnnnnnnnnnnnnnnnnnnnnnnnnnnnnnnnnnnnnnnnnnnnnnnnnnnnnnnnnnnnnnnnnnnnnnnnnnnnnnnnnnnnnnnnnnnnnnnnnnnnnnnnnnnnnnnnnnnnnnnnnnnnnnnnnnnnnnnnnnnnnnnnnnnnnnnnnnnnnnnnnnnnnnnnnnnnnnnnnnnnnnnnnnnnnnnnnnnnnnnnnnnnnnnnnnnnnnnnnnnnnnnnnnnnnnnnnnnnnnnnnnnnnnnnnnnnnnnnnnnnnnnnnnnnnnnnnnnnnnnnnnnnnnnnnnnnnnnnnnnnnnnnnnnnnnnnnnnnnnnnnnnnnnnnnnnnnnnnnnnnnnnnnnnnnnnnnnnnnnnnnnnnnnnnnnnnnnnnnnnnnnnnnnnnnnnnnnnnnnnnnnnnnnnnnnnnnnnnnnnnnnnnnnnnnnnnnnnnnnnnnnnnnnnnnnnnnnnnnnnnnnnnnnnnnnnnnnnnnnnnnnnnnnnnnnnnnnnnnnnnnnnnnnnnnnnnnnnnnnnnnnnnnnnnnnnnnnnnnnnnnnnnnnnnnnnnnnnnnnnnnnnnnnnnnnnnnnnnnnnnnnnnnnnnnnnnnnnnnnnnnnnnnnnnnnnnnnnnnnnnnnnnnnnnnnnnnnnnnnnnnnnnnnnnnnnnnnnnnnnnnnnnnnnnnnnnnnnnnnnnnnnnnnnnnnnnnnnnnnnnnnnnnnnnnnnnnnnnnnnnnnnnnnnnnnnnnnnnnnnnnnnnnnnnnnnnnnnnnnnnnnnnnnnnnnnnnnnnnnnnnnnnnnnnnnnnnnnnnnnnnnnnnnnnnnnnnnnnnnnnnnnnnnnnnnnnnnnnnnnnnnnnnnnnnnnnnnnnnnnnnnnnnnnnnnnnnnnnnnnnnnnnnnnnnnnnnnnnnnnnnnnnnnnnnnnnnnnnnnnnnnnnnnnnnnnnnnnnnnnnnnnnnnnnnnnnnnnnnnnnnnnnnnnnnnnnnnnnnnnnnnnnnnnnnnnnnnnnnnnnnnnnnnnnnnnnnnnnnnnnnnnnnnnnnnnnnnnnnnnnnnnnnnnnnnnnnnnnnnnnnnnnnnnnnnnnnnnnnnnnnnnnnnnnnnnnnnnnnnnnnnnnnnnnnnnnnnnnnnnnnnnnnnnnnnnnnnnnnnnnnnnnnnnnnnnnnnnnnnnnnnnnnnnnnnnnnnnnnnnnnnnnnnnnnnnnnnnnnnnnnnnnnnnnnnnnnnnnnnnnnnnnnnnnnnnnnnnnnnnnnnnnnnnnnnnnnnnnnnnnnnnnnnnnnnnnnnnnnnnnnnnnnnnnnnnnnnnnnnnnnnnnnnnnnnnnnnnnnnnnnnnnnnnnnnnnnnnnnnnnnnnnnnnnnnnnnnnnnnnnnnnnnnnnnnnnnnnnnnnnnnnnnnnnnnnnnnnnnnnnnnnnnnnnnnnnnnnnnnnnnnnnnnnnnnnnnnnnnnnnnnnnnnnnnnnnnnnnnnnnnnnnnnnnnnnnnnnnnnnnnnnnnnnnnnnnnnnnnnnnnnnnnnnnnnnnnnnnnnnnnnnnnnnnnnnnnnnnnnnnnnnnnnnnnnnnnnnnnnnnnnnnnnnnnnnnnnnnnnnnnnnnnnnnnnnnnnnnnnnnnnnnnnnnnnnnnnnnnnnnnnnnnnnnnnnnnnnnnnnnnnnnnnnnnnnnnnnnnnnnnnnnnnnnnnnnnnnnnnnnnnnnnnnnnnnnnnnnnnnnnnnnnnnnnnnnnnnnnnnnnnnnnnnnnnnnnnnnnnnnnnnnnnnnnnnnnnnnnnnnnnnnnnnnnnnnnnnnnnnnnnnnnnnnnnnnnnnnnnnnnnnnnnnnnnnnnnnnnnnnnnnnnnnnnnnnnnnnnnnnnnnnnnnnnnnnnnnnnnnnnnnnnnnnnnnnnnnnnnnnnnnnnnnnnnnnnnnnnnnnnnnnnnnnnnnnnnnnnnnnnnnnnnnnnnnnnnnnnnnnnnnnnnnnnnnnnnnnnnnnnnnnnnnnnnnnnnnnnnnnnnnnnnnnnnnnnnnnnnnnnnnnnnnnnnnnnnnnnnnnnnnnnnnnnnnnnnnnnnnnnnnnnnnnnnnnnnnnnnnnnnnnnnnnnnnnnnnnnnnnnnnnnnnnnnnnnnnnnnnnnnnnnnnnnnnnnnnnnnnnnnnnnnnnnnnnnnnnnnnnnnnnnnnnnnnnnnnnnnnnnnnnnnnnnnnnnnnnnnnnnnnnnnnnnnnnnnnnnnnnnnnnnnnnnnnnnnnnnnnnnnnnnnnnnnnnnnnnnnnnnnnnnnnnnnnnnnnnnnnnnnnnnnnnnnnnnnnnnnnnnnnnnnnnnnnnnnnnnnnnnnnnnnnnnnnnnnnnnnnnnnnnnnnnnnnnnnnnnnnnnnnnnnnnnnnnnnnnnnnnnnnnnnnnnnnnnnnnnnnnnnnnnnnnnnnnnnnnnnnnnnnnnnnnnnnnnnnnnnnnnnnnnnnnnnnnnnnnnnnnnnnnnnnnnnnnnnnnnnnnnnnnnnnnnnnnnnnnnnnnnnnnnnnnnnnnnnnnnnnnnnnnnnnnnnnnnnnnnnnnnnnnnnnnnnnnnnnnnnnnnnnnnnnnnnnnnnnnnnnnnnnnnnnnnnnnnnnnnnnnnnnnnnnnnnnnnnnnnnnnnnnnnnnnnnnnnnnnnnnnnnnnnnnnnnnnnnnnnnnnnnnnnnnnnnnnnnnnnnnnnnnnnnnnnnnnnnnnnnnnnnnnnnnnnnnnnnnnnnnnnnnnnnnnnnnnnnnnnnnnnnnnnnnnnnnnnnnnnnnnnnnnnnnnnnnnnnnnnnnnnnnnnnnnnnnnnnnnnnnnnnnnnnnnnnnnnnnnnnnnnnnnnnnnnnnnnnnnnnnnnnnnnnnnnnnnnnnnnnnnnnnnnnnnnnnnnnnnnnnnnnnnnnnnnnnnnnnnnnnnnnnnnnnnnnnnnnnnnnnnnnnnnnnnnnnnnnnnnnnnnnnnnnnnnnnnnnnnnnnnnnnnnnnnnnnnnnnnnnnnnnnnnnnnnnnnnnnnnnnnnnnnnnnnnnnnnnnnnnnnnnnnnnnnnnnnnnnnnnnnnnnnnnnnnnnnnnnnnnnnnnnnnnnnnnnnnnnnnnnnnnnnnnnnnnnnnnnnnnnnnnnnnnnnnnnnnnnnnnnnnnnnnnnnnnnnnnnnnnnnnnnnnnnnnnnnnnnnnnnnnnnnnnnnnnnnnnnnnnnnnnnnnnnnnnnnnnnnnnnnnnnnnnnnnnnnnnnnnnnnnnnnnnnnnnnnnnnnnnnnnnnnnnnnnnnnnnnnnnnnnnnnnnnnnnnnnnnnnnnnnnnnnnnnnnnnnnnnnnnnnnnnnnnnnnnnnnnnnnnnnnnnnnnnnnnnnnnnnnnnnnnnnnnnnnnnnnnnnnnnnnnnnnnnnnnnnnnnnnnnnnnnnnnnnnnnnnnnnnnnnnnnnnnnnnnnnnnnnnnnnnnnnnnnnnnnnnnnnnnnnnnnnnnnnnnnnnnnnnnnnnnnnnnnnnnnnnnnnnnnnnnnnnnnnnnnnnnnnnnnnnnnnnnnnnnnnnnnnnnnnnnnnnnnnnnnnnnnnnnnnnnnnnnnnnnnnnnnnnnnnnnnnnnnnnnnnnnnnnnnnnnnnnnnnnnnnnnnnnnnnnnnnnnnnnnnnnnnnnnnnnnnnnnnnnnnnnnnnnnnnnnnnnnnnnnnnnnnnnnnnnnnnnnnnnnnnnnnnnnnnnnnnnnnnnnnnnnnnnnnnnnnnnnnnnnnnnnnnnnnnnnnnnnnnnnnnnnnnnnnnnnnnnnnnnnnnnnnnnnnnnnnnnnnnnnnnnnnnnnnnnnnnnnnnnnnnnnnnnnnnnnnnnnnnnnnnnnnnnnnnnnnnnnnnnnnnnnnnnnnnnnnnnnnnnnnnnnnnnnnnnnnnnnnnnnnnnnnnnnnnnnnnnnnnnnnnnnnnnnnnnnnnnnnnnnnnnnnnnnnnnnnnnnnnnnnnnnnnnnnnnnnnnnnnnnnnnnnnnnnnnnnnnnnnnnnnnnnnnnnnnnnnnnnnnnnnnnnnnnnnnnnnnnnnnnnnnnnnnnnnnnnnnnnnnnnnnnnnnnnnnnnnnnnnnnnnnnnnnnnnnnnnnnnnnnnnnnnnnnnnnnnnnnnnnnnnnnnnnnnnnnnnnnnnnnnnnnnnnnnnnnnnnnnnnnnnnnnnnnnnnnnnnnnnnnnnnnnnnnnnnnnnnnnnnnnnnnnnnnnnnnnnnnnnnnnnnnnnnnnnnnnnnnnnnnnnnnnnnnnnnnnnnnnnnnnnnnnnnnnnnnnnnnnnnnnnnnnnnnnnnnnnnnnnnnnnnnnnnnnnnnnnnnnnnnnnnnnnnnnnnnnnnnnnnnnnnnnnnnnnnnnnnnnnnnnnnnnnnnnnnnnnnnnnnnnnnnnnnnnnnnnnnnnnnnnnnnnnnnnnnnnnnnnnnnnnnnnnnnnnnnnnnnnnnnnnnnnnnnnnnnnnnnnnnnnnnnnnnnnnnnnnnnnnnnnnnnnnnnnnnnnnnnnnnnnnnnnnnnnnnnnnnnnnnnnnnnnnnnnnnnnnnnnnnnnnnnnnnnnnnnnnnnnnnnnnnnnnnnnnnnnnnnnnnnnnnnnnnnnnnnnnnnnnnnnnnnnnnnnnnnnnnnnnnnnnnnnnnnnnnnnnnnnnnnnnnnnnnnnnnnnnnnnnnnnnnnnnnnnnnnnnnnnnnnnnnnnnnnnnnnnnnnnnnnnnnnnnnnnnnnnnnnnnnnnnnnnnnnnnnnnnnnnnnnnnnnnnnnnnnnnnnnnnnnnnnnnnnnnnnnnnnnnnnnnnnnnnnnnnnnnnnnnnnnnnnnnnnnnnnnnnnnnnnnnnnnnnnnnnnnnnnnnnnnnnnnnnnnnnnnnnnnnnnnnnnnnnnnnnnnnnnnnnnnnnnnnnnnnnnnnnnnnnnnnnnnnnnnnnnnnnnnnnnnnnnnnnnnnnnnnnnnnnnnnnnnnnnnnnnnnnnnnnnnnnnnnnnnnnnnnnnnnnnnnnnnnnnnnnnnnnnnnnnnnnnnnnnnnnnnnnnnnnnnnnnnnnnnnnnnnnnnnnnnnnnnnnnnnnnnnnnnnnnnnnnnnnnnnnnnnnnnnnnnnnnnnnnnnnnnnnnnnnnnnnnnnnnnnnnnnnnnnnnnnnnnnnnnnnnnnnnnnnnnnnnnnnnnnnnnnnnnnnnnnnnnnnnnnnnnnnnnnnnnnnnnnnnnnnnnnnnnnnnnnnnnnnnnnnnnnnnnnnnnnnnnnnnnnnnnnnnnnnnnnnnnnnnnnnnnnnnnnnnnnnnnnnnnnnnnnnnnnnnnnnnnnnnnnnnnnnnnnnnnnnnnnnnnnnnnnnnnnnnnnnnnnnnnnnnnnnnnnnnnnnnnnnnnnnnnnnnnnnnnnnnnnnnnnnnnnnnnnnnnnnnnnnnnnnnnnnnnnnnnnnnnnnnnnnnnnnnnnnnnnnnnnnnnnnnnnnnnnnnnnnnnnnnnnnnnnnnnnnnnnnnnnnnnnnnnnnnnnnnnnnnnnnnnnnnnnnnnnnnnnnnnnnnnnnnnnnnnnnnnnnnnnnnnnnnnnnnnnnnnnnnnnnnnnnnnnnnnnnnnnnnnnnnnnnnnnnnnnnnnnnnnnnnnnnnnnnnnnnnnnnnnnnnnnnnnnnnnnnnnnnnnnnnnnnnnnnnnnnnnnnnnnnnnnnnnnnnnnnnnnnnnnnnnnnnnnnnnnnnnnnnnnnnnnnnnnnnnnnnnnnnnnnnnnnnnnnnnnnnnnnnnnnnnnnnnnnnnnnnnnnnnnnnnnnnnnnnnnnnnnnnnnnnnnnnnnnnnnnnnnnnnnnnnnnnnnnnnnnnnnnnnnnnnnnnnnnnnnnnnnnnnnnnnnnnnnnnnnnnnnnnnnnnnnnnnnnnnnnnnnnnnnnnnnnnnnnnnnnnnnnnnnnnnnnnnnnnnnnnnnnnnnnnnnnnnnnnnnnnnnnnnnnnnnnnnnnnnnnnnnnnnnnnnnnnnnnnnnnnnnnnnnnnnnnnnnnnnnnnnnnnnnnnnnnnnnnnnnnnnnnnnnnnnnnnnnnnnnnnnnnnnnnnnnnnnnnnnnnnnnnnnnnnnnnnnnnnnnnnnnnnnnnnnnnnnnnnnnnnnnnnnnnnnnnnnnnnnnnnnnnnnnnnnnnnnnnnnnnnnnnnnnnnnnnnnnnnnnnnnnnnnnnnnnnnnnnnnnnnnnnnnnnnnnnnnnnnnnnnnnnnnnnnnnnnnnnnnnnnnnnnnnnnnnnnnnnnnnnnnnnnnnnnnnnnnnnnnnnnnnnnnnnnnnnnnnnnnnnnnnnnnnnnnnnnnnnnnnnnnnnnnnnnnnnnnnnnnnnnnnnnnnnnnnnnnnnnnnnnnnnnnnnnnnnnnnnnnnnnnnnnnnnnnnnnnnnnnnnnnnnnnnnnnnnnnnnnnnnnnnnnnnnnnnnnnnnnnnnnnnnnnnnnnnnnnnnnnnnnnnnnnnnnnnnnnnnnnnnnnnnnnnnnnnnnnnnnnnnnnnnnnnnnnnnnnnnnnnnnnnnnnnnnnnnnnnnnnnnnnnnnnnnnnnnnnnnnnnnnnnnnnnnnnnnnnnnnnnnnnnnnnnnnnnnnnnnnnnnnnnnnnnnnnnnnnnnnnnnnnnnnnnnnnnnnnnnnnnnnnnnnnnnnnnnnnnnnnnnnnnnnnnnnnnnnnnnnnnnnnnnnnnnnnnnnnnnnnnnnnnnnnnnnnnnnnnnnnnnnnnnnnnnnnnnnnnnnnnnnnnnnnnnnnnnnnnnnnnnnnnnnnnnnnnnnnnnnnnnnnnnnnnnnnnnnnnnnnnnnnnnnnnnnnnnnnnnnnnnnnnnnnnnnnnnnnnnnnnnnnnnnnnnnnnnnnnnnnnnnnnnnnnnnnnnnnnnnnnnnnnnnnnnnnnnnnnnnnnnnnnnnnnnnnnnnnnnnnnnnnnnnnnnnnnnnnnnnnnnnnnnnnnnnnnnnnnnnnnnnnnnnnnnnnnnnnnnnnnnnnnnnnnnnnnnnnnnnnnnnnnnnnnnnnnnnnnnnnnnnnnnnnnnnnnnnnnnnnnnnnnnnnnnnnnnnnnnnnnnnnnnnnnnnnnnnnnnnnnnnnnnnnnnnnnnnnnnnnnnnnnnnnnnnnnnnnnnnnnnnnnnnnnnnnnnnnnnnnnnnnnnnnnnnnnnnnnnnnnnnnnnnnnnnnnnnnnnnnnnnnnnnnnnnnnnnnnnnnnnnnnnnnnnnnnnnnnnnnnnnnnnnnnnnnnnnnnnnnnnnnnnnnnnnnnnnnnnnnnnnnnnnnnnnnnnnnnnnnnnnnnnnnnnnnnnnnnnnnnnnnnnnnnnnnnnnnnnnnnnnnnnnnnnnnnnnnnnnnnnnnnnnnnnnnnnnnnnnnnnnnnnnnnnnnnnnnnnnnnnnnnnnnnnnnnnnnnnnnnnnnnnnnnnnnnnnnnnnnnnnnnnnnnnnnnnnnnnnnnnnnnnnnnnnnnnnnnnnnnnnnnnnnnnnnnnnnnnnnnnnnnnnnnnnnnnnnnnnnnnnnnnnnnnnnnnnnnnnnnnnnnnnnnnnnnnnnnnnnnnnnnnnnnnnnnnnnnnnnnnnnnnnnnnnnnnnnnnnnnnnnnnnnnnnnnnnnnnnnnnnnnnnnnnnnnnnnnnnnnnnnnnnnnnnnnnnnnnnnnnnnnnnnnnnnnnnnnnnnnnnnnnnnnnnnnnnnnnnnnnnnnnnnnnnnnnnnnnnnnnnnnnnnnnnnnnnnnnnnnnnnnnnnnnnnnnnnnnnnnnnnnnnnnnnnnnnnnnnnnnnnnnnnnnnnnnnnnnnnnnnnnnnnnnnnnnnnnnnnnnnnnnnnnnnnnnnnnnnnnnnnnnnnnnnnnnnnnnnnnnnnnnnnnnnnnnnnnnnnnnnnnnnnnnnnnnnnnnnnnnnnnnnnnnnnnnnnnnnnnnnnnnnnnnnnnnnnnnnnnnnnnnnnnnnnnnnnnnnnnnnnnnnnnnnnnnnnnnnnnnnnnnnnnnnnnnnnnnnnnnnnnnnnnnnnnnnnnnnnnnnnnnnnnnnnnnnnnnnnnnnnnnnnnnnnnnnnnnnnnnnnnnnnnnnnnnnnnnnnnnnnnnnnnnnnnnnnnnnnnnnnnnnnnnnnnnnnnnnnnnnnnnnnnnnnnnnnnnnnnnnnnnnnnnnnnnnnnnnnnnnnnnnnnnnnnnnnnnnnnnnnnnnnnnnnnnnnnnnnnnnnnnnnnnnnnnnnnnnnnnnnnnnnnnnnnnnnnnnnnnnnnnnnnnnnnnnnnnnnnnnnnnnnnnnnnnnnnnnnnnnnnnnnnnnnnnnnnnnnnnnnnnnnnnnnnnnnnnnnnnnnnnnnnnnnnnnnnnnnnnnnnnnnnnnnnnnnnnnnnnnnnnnnnnnnnnnnnnnnnnnnnnnnnnnnnnnnnnnnnnnnnnnnnnnnnnnnnnnnnnnnnnnnnnnnnnnnnnnnnnnnnnnnnnnnnnnnnnnnnnnnnnnnnnnnnnnnnnnnnnnnnnnnnnnnnnnnnnnnnnnnnnnnnnnnnnnnnnnnnnnnnnnnnnnnnnnnnnnnnnnnnnnnnnnnnnnnnnnnnnnnnnnnnnnnnnnnnnnnnnnnnnnnnnnnnnnnnnnnnnnnnnnnnnnnnnnnnnnnnnnnnnnnnnnnnnnnnnnnnnnnnnnnnnnnnnnnnnnnnnnnnnnnnnnnnnnnnnnnnnnnnnnnnnnnnnnnnnnnnnnnnnnnnnnnnnnnnnnnnnnnnnnnnnnnnnnnnnnnnnnnnnnnnnnnnnnnnnnnnnnnnnnnnnnnnnnnnnnnnnnnnnnnnnnnnnnnnnnnnnnnnnnnnnnnnnnnnnnnnnnnnnnnnnnnnnnnnnnnnnnnnnnnnnnnnnnnnnnnnnnnnnnnnnnnnnnnnnnnnnnnnnnnnnnnnnnnnnnnnnnnnnnnnnnnnnnnnnnnnnnnnnnnnnnnnnnnnnnnnnnnnnnnnnnnnnnnnnnnnnnnnnnnnnnnnnnnnnnnnnnnnnnnnnnnnnnnnnnnnnnnnnnnnnnnnnnnnnnnnnnnnnnnnnnnnnnnnnnnnnnnnnnnnnnnnnnnnnnnnnnnnnnnnnnnnnnnnnnnnnnnnnnnnnnnnnnnnnnnnnnnnnnnnnnnnnnnnnnnnnnnnnnnnnnnnnnnnnnnnnnnnnnnnnnnnnnnnnnnnnnnnnnnnnnnnnnnnnnnnnnnnnnnnnnnnnnnnnnnnnnnnnnnnnnnnnnnnnnnnnnnnnnnnnnnnnnnnnnnnnnnnnnnnnnnnnnnnnnnnnnnnnnnnnnnnnnnnnnnnnnnnnnnnnnnnnnnnnnnnnnnnnnnnnnnnnnnnnnnnnnnnnnnnnnnnnnnnnnnnnnnnnnnnnnnnnnnnnnnnnnnnnnnnnnnnnnnnnnnnnnnnnnnnnnnnnnnnnnnnnnnnnnnnnnnnnnnnnnnnnnnnnnnnnnnnnnnnnnnnnnnnnnnnnnnnnnnnnnnnnnnnnnnnnnnnnnnnnnnnnnnnnnnnnnnnnnnnnnnnnnnnnnnnnnnnnnnnnnnnnnnnnnnnnnnnnnnnnnnnnnnnnnnnnnnnnnnnnnnnnnnnnnnnnnnnnnnnnnnnnnnnnnnnnnnnnnnnnnnnnnnnnnnnnnnnnnnnnnnnnnnnnnnnnnnnnnnnnnnnnnnnnnnnnnnnnnnnnnnnnnnnnnnnnnnnnnnnnnnnnnnnnnnnnnnnnnnnnnnnnnnnnnnnnnnnnnnnnnnnnnnnnnnnnnnnnnnnnnnnnnnnnnnnnnnnnnnnnnnnnnnnnnnnnnnnnnnnnnnnnnnnnnnnnnnnnnnnnnnnnnnnnnnnnnnnnnnnnnnnnnnnnnnnnnnnnnnnnnnnnnnnnnnnnnnnnnnnnnnnnnnnnnnnnnnnnnnnnnnnnnnnnnnnnnnnnnnnnnnnnnnnnnnnnnnnnnnnnnnnnnnnnnnnnnnnnnnnnnnnnnnnnnnnnnnnnnnnnnnnnnnnnnnnnnnnnnnnnnnnnnnnnnnnnnnnnnnnnnnnnnnnnnnnnnnnnnnnnnnnnnnnnnnnnnnnnnnnnnnnnnnnnnnnnnnnnnnnnnnnnnnnnnnnnnnnnnnnnnnnnnnnnnnnnnnnnnnnnnnnnnnnnnnnnnnnnnnnnnnnnnnnnnnnnnnnnnnnnnnnnnnnnnnnnnnnnnnnnnnnnnnnnnnnnnnnnnnnnnnnnnnnnnnnnnnnnnnnnnnnnnnnnnnnnnnnnnnnnnnnnnnnnnnnnnnnnnnnnnnnnnnnnnnnnnnnnnnnnnnnnnnnnnnnnnnnnnnnnnnnnnnnnnnnnnnnnnnnnnnnnnnnnnnnnnnnnnnnnnnnnnnnnnnnnnnnnnnnnnnnnnnnnnnnnnnnnnnnnnnnnnnnnnnnnnnnnnnnnnnnnnnnnnnnnnnnnnnnnnnnnnnnnnnnnnnnnnnnnnnnnnnnnnnnnnnnnnnnnnnnnnnnnnnnnnnnnnnnnnnnnnnnnnnnnnnnnnnnnnnnnnnnnnnnnnnnnnnnnnnnnnnnnnnnnnnnnnnnnnnnnnnnnnnnnnnnnnnnnnnnnnnnnnnnnnnnnnnnnnnnnnnnnnnnnnnnnnnnnnnnnnnnnnnnnnnnnnnnnnnnnnnnnnnnnnnnnnnnnnnnnnnnnnnnnnnnnnnnnnnnnnnnnnnnnnnnnnnnnnnnnnnnnnnnnnnnnnnnnnnnnnnnnnnnnnnnnnnnnnnnnnnnnnnnnnnnnnnnnnnnnnnnnnnnnnnnnnnnnnnnnnnnnnnnnnnnnnnnnnnnnnnnnnnnnnnnnnnnnnnnnnnnnnnnnnnnnnnnnnnnnnnnnnnnnnnnnnnnnnnnnnnnnnnnnnnnnnnnnnnnnnnnnnnnnnnnnnnnnnnnnnnnnnnnnnnnnnnnnnnnnnnnnnnnnnnnnnnnnnnnnnnnnnnnnnnnnnnnnnnnnnnnnnnnnnnnnnnnnnnnnnnnnnnnnnnnnnnnnnnnnnnnnnnnnnnnnnnnnnnnnnnnnnnnnnnnnnnnnnnnnnnnnnnnnnnnnnnnnnnnnnnnnnnnnnnnnnnnnnnnnnnnnnnnnnnnnnnnnnnnnnnnnnnnnnnnnnnnnnnnnnnnnnnnnnnnnnnnnnnnnnnnnnnnnnnnnnncacccttgctcctctttcttttttttacaacgcgagggcccccacggagatctaccctggtccgctgggcggcggcgcaagatgtgtataggagccaggctatatattgtgtcatcccgggcaagcgcacgcttgacccgggatccagtcttttagaaacacccgtggaaaggtggaaatggcggttcagcgaccgccagtacaaagtagcggcgcttgccatagcgccgtttgggattgccgtccatggggggggatggcaaagtccgtttgccacagagaccggaggtctcttccaagcaggcaactccgttgcctctgccgaacggacttcggcaacccttatattacaccaatccgcgacaatctgcgccttttatccgcgtatatctgcgtgaaccgtggaacccgggatccagtcttttacaggaaagtttgaagtccgagccggcttcaggactggcataagcatgaaacccatattgccggctcgaactctaaacacagccagcatggagttcaagagccttttcagactgaaaaatgccaccatacaagttggctcttggacttcatgcgtaacatattgctggctcgaactctaaacacaaccagaatatatttcatccgcgaggcaaataatgcttgacatagaatctaaaccacacaaaaatagatttgagagggtaaataaagaaaggagcaggaaagatgagcaagagcttagtttttgtgctggcgttcttatgcctggcggctgcgtgcctggggtcggaagcggccgcgcctgaccctccggagccactccgcgcggtggaactgacgcctccgccttcaccggtaagagcgttgccagggcagaagtccgtgcctccctggaacttcagcgtcaatccaaacccgatcataaacaactattacgactacatgatcggcggctacaacaacctgcctctgaacctcgtccccgagagccagggcggaggctatttcctcacctggacggggcgcaacagccccaccagcgaccgcaagtcctattacggctatctgtactcatccggaatgccaatcttcgttaaccagatcgttacccagggagaaggcgagcacggcatgccggcattggtggtggatcccgttgatggaaatcctttctacgcctggacccagaatgtggacacggacccggtgtccgagattgtgctgacctccgatgccttcatagccggaattgccggattgttcaacaccacccagatcgtgatcgacaaccccgtcaccctcaccgcgccggacgggacggagaccacaaacaacgttttctactggcccagcctggccatcggcccctcccctctggcgggcaagcgcaggctctatctgctgggacggcaaaactgcaacgtctatctggcaatggctgatttctcccgcgatgatgtcgaaaatggaatccccctcaactggcagtactccagcgttccgcaactcaacacctgggaactgaatgccgtgccaaacaaaacctatctggccctggaaactgactccggcgggaatgtcatcctggccggatatcacaacagctactcgattgagaatgatatcatcgtcttcatctgcggcaacttcggacagggggaatggacgttccacagcttcaacagcaggatgcccacctggaaccccacctatcccggcagcaacggcggcttctttatagatgatgaggggcaaccctttcaggatcaagacctgcactggaaactgttgaactccggacatctgaacgccaccctggatagcggtggcaggctgcatatcgtggggatttgggccttggccggcggggacggcgtatttttccctcatttccagttcgtgaaagaagctgtttacgacccgacttggaataatttcgagatccgcgacatctttccccaaaaaaattgtgacgaccttttcaatgcctgtttcaccccctgggacatgctgccgccctacggcgaggttgacgaatggatctacgatgaggaatatggttactatccatacacgttcactgactggcccttcccccactgggaccaggcagcacacgaaaacaccatgatgttccactataacaacgtcaagatcacccgcgccaacgactatggccagatggctgtggtctggcaggattccaaacgcgcctttgactggtgcgtgtatcattatcccggctatgaggcctgggaacacggcacggacatctatatcgcctatacaaactatggcggctcggagtggcaggacccgatcgtgctcaacaatgtcgatactcccgaactggcgggcatcaagccgatgtgggtgtatccggctgaccggatgatatacactggcttcaaccagtacggaattaaagagggaaaactgggcctgatgttttacgatgacttcacctggggctcgaattctctcccgccaccctaccaccccgatcctgacggcggccgggtgatgttcatggaactgcatatcggatacctggacgccaacgatcccagccaggcgccagctccggccatcctggcgcagaattggcccaaccccttcaatcctaacaccaacatcagttttgaactgcctcagcccggccctgcccggctggaaatcttcgacctccgcggaaggctggtaagcaccctactggacaaggagatgggagccggaaaacatagcctgaactgggacggcaccgactccaacggcgcccaactggcaagcggagtctatatctaccgcctcagcacgggaaggacgagcgccagccgcaaaatgatattgctgaagtgacgggcatccgcccttccaagtccgatctttataccgagccgccgcgtgtattgcgcggcggtttgctttccgcagaccaagtattagcagcgggaaaactgcaatgaaatagccgctggtggggctccgtaaaatgggagtggaagccgccgcatggaacaccttgaaagtaacaagagaccgccccaaattgacctttcctgacctaataacccctcaaagcaaatttcttgacaatgatctttggctaaaatataaggttcccatcgagcaaaaggagcatgttatgtacaatcttctttgtgataattgggtaaacgtggtctatctttcgggcaaaccagatagaatatctttagttcaaactcttaaagacgcacactgtctgcaactggcatacagcaatcctatggaccggttcgctgtcttcagattcctgcttgctcttggctactggtgtttcgccaacaccaacgtggagcctgaacctgataagccgcttccggtctcctggataccctggctggaagaaaacaaggagtatttcgagctttttggtgatggaaagagatttttccaagccgatcccagttccaggatcagagccattaccgaccttattcatgagataccaacagctcacaacctatgccatttcaaacatgtcaccgactatatcgatgggctctgcgaagcttgctgcatcaagggactgctgagattacctgtctttaccactgtcggtggcagagggataggcgctggaatcaacaacactcctccattttacctgctctggcatgcaaatgatctcgctggcatgctggctcaaaattggcaaccctgggataatatggggattccggcatggttgggttcttttcaaaaagaaagcagggaagtaggcttacttgctggaatgacctggctgccgcgcaaggtgtatctgcatgatcctgtcccaggtcaggcagcatgttgttcctgcggcttaccctccaaagctctcgtctattcctgcagcataaaacctgaaccagtgccggaaggccttaaatggaaagaccctcatggtgtttacaccgatcagggaaaaagtctccagtccaaaatcaaactgatgtccaatgatagatacactttcgcggaccgggattggtatagcccgttgttcagctatttgcacgcggaaggaaactccagacaaggaaaactatggttggttggatttgccagcgataaagcaaaaagcatagacatctgggacaagatcatcgagcttgagggaactgatacaaatgatgagctactggctcaattggcaaacagggctactgcccttaatgccatgcgcaagaagcctctcagaggtgatttcaaaaagtcagtgggcactccccagattgctgacattatcccccacgccgaaagcagaattgccatcaatgcgggtaaaatgactgagaacaggggctattcctggcaggatgccgatactgaatacggagaactgctcaccaaggttgcatgctctttggagccggctcaaacagtggacgccaggctcaagagaggtaaattcatttcccgcaagccctggccagttataccagaatccaaaacaaaacccgcagaggaggaccagaatgaatagaggaaccgttgacttcattgcaagcctggagaacctcaaagaaggcgatttgggcattcttagaaaactcaggggagcccggcttgatgaaaagcttcccggatttgacctgttttccgccctatggtggcctttgcggcaaaagaatcaacgcgctcccaagcgtgaagtggcttggttgatcgccaaactttttgctgaattccgctttgaacagcgcgagggagccacattgcccattcttatgggaggcatctgccggaagttggaacccaaaaaggaattaccccgggtattggcacgctttgatcaactcgcatcgcttgacattatgcagatggaagagccgctgtcggtcatcatgggtattttgcgcaagcaccagcaggtctgcctggactgggtagggcttactgatgttctgtcattttgggagcaggaacctgtcaaaagagaatggtcggattcatttattaaagcatacaagatcaacaaggaggattcagatgttgattgaaattcatatgattcagaatcacagtccggcaaatcttaaccgggacgacttgggcgcccccaagacctgttatttcggtggagtattacgttctcgcatctccagccagtgcatcaagcgcagcatccgttttgccccggaattcgcggaccttagaggaggtatccgaacaaggcgtctggcagagaaactcgaggaaatgctggaaaacaaagataagaagctggttgccaagtttcttgaagcctgcggaatcaaaaccaaatcttccaagaaagctgcaaaaaagtccgaaaagatacccgcggaagccgatgaagatcaggatgagcagcaggcggctgatacatctgacatgctggtttttaccacttatgatgccctgcgccaaatggcaaagctgctttccgactccaaactaagtgaaagcgaaaaactgctgcagttcaaagatctgctcacaaactgcgtccattctccggatatagcactttgcggcaggatgctggagaccaaagagcttaaaaacactggcgttgaaggcgccctacaggttgcacatgcgatctccacccacattgccagacctgagatagactattttgtggcggccgatgatgttcccggtgaagacgccggagcgggtcatattggcgaatccatgtttgcctcagcctgtttctacaaatacttctccattgattgggaacagttggtcaagaacctgaaaggggacacgaatctggcagcccacaccgtgggtgcctttctcctcgccgctgccaaaaccaaccccagtggcaaacagaacagcttcgccgctcataactatcccgatggcatccttgttgagttcaagaattcccctattagctacgccaacgcattcgtcaggccagtttccgtggtcaaggaatcggacctggtggaacaaagcatcggccagctttccaactacgtgaacgacatcaggcttggctattatgatgagcaatccccagttatcagcttctggttttctccaaacaatcgctattcccttggcaatgagcattccaaactggcttccagaaacattggcaacctcaatgagcttgtaggcgctgtgttggattatattggcggcttcaagtgggaagaagttcagaaaagcaaggcttatgttggcggctgacatgagtgcgccacccaacaccttattcttgcgcttggagggggctttgcagtcttggggcagcaacgaggctaagtttgctttgcgcaggactaccgacgctcccacaaaatcaggtgtcctggggctgctttgcgcggccatgggaattgggcgcgcggaggctgctgattcatggctcccaaaactcgccaacctgcgcatgggcgtgcggatagaccgccccggcatacgctggtgggacttccatactgttggagcgggacaaagaatgcgcatggcagagctgaaggcacccaaaaaaccttccatggttggagctgccctggctgataccctgacaccaagcaaagtaaaaaccagggcagagaccttgctctcacgccgcgaatatcttgccgacgccagttttctggtcgccttgcagggtgagccggaacttgtggaaaagctctccgccgctctggccaagccggtctgggcaatttatctggggcgcaaatcctgtcccccttcacgtcccgtgggcgagcatgctccgggcttttataacactttggaggaggcgctgtccgcggttcccctgcaaaagcgctggcacaatgaacccctgccgcaaatactgccttgcgtcatggactggatccccagccaggacggagaacatgcgcctgatgacgcggagattcattacgatctgccggtttcttttcagccgccccgccatttgccgcgcttcgtgatcaggcgtgagctggttgtgggagaggatgtgcaagtgagcagggaaaccggaaccagcgtttggaggcccaaaggaacccgggcggattataacaattccgagtataagaaggtcagggcggagcggcttgtgatggaccatgccgcgtgcatggtatgcaaagctcccgccacgactgttcaacacgtgaattaccgcagggcgggaggcaaggaaataccggaagacctgcgggcgctgtgccgcctctgccacgacgcctgcaccatgctggaatacggttccggcatgaccaccgaccgcatcgacccctgcgaccccatatggcgggagcgaatactggcaaagcgcaaagatatagtcgagttccgttcgcgcgggcagcgtttccgcaaaatgaagccagaggaggaaaacggatgatctacttgtccaagctattgatcgatactggaggcaatccagaccgtccccgccccggcagaaagtggctggacaatatctataacgtccaccgccgcctttccatggcgttcccttcaggtttgcgccgggagcaggatccgcatttcctgaagcccttttcgccaaacgacttccaaaaaactcccttccttttccgggtcgataacaacatcgacggaaacgataaaagggcgattattatcgtccagtccgttcttgagccggattgggattattgcttccaaaacgcgcttgatttcctggcagcgccaccggaaacaaaggagtataatccagagtttcaagcgggacaactgctccggttcaggctgcgggtaaacgccagcgtacgccgtcatattcctgagaaggtgcaacaggacggtcaaaccatagaaactggcaacatcctgcacaaaagggtttctctcacctgggatccctcttccaccccggatcaggcccttgccgactggctggctgccaaaagcccaaagctgggcttcacccttcagcgctgtgagcttcttcaactgggttgggtttatggctccaagcctgaacctaaaaatgtcaaagcaaaggaacagggacagggctactggcgtgaacacacatacaatcctctgcgcttccgttcggctctactggagggaattctcaaagtggatgacccgaaactgttcctggaaacgcttagaagcggcattggaaaagcgaaaagcttcggctttggcctgctgtccgttctgccaatcaggaatgatgaataaagacctgcactctatcccccggatcagagatcggcttagctatctctatgtggagcatgccaaaattgatcagaacgggcaagccatcgccattcacgatgccctgggagaaaccccggttccttgtgccggcttggctatgctgatgctgggaccgggcataaccatcacccatgcggcaatactttcactggctgcctgtggctgtctggtagcctgggtgggggaacatggcgtcaggttctatgccgcaggcacaggtacaacccgtagcgccgtcaatcttatgaaacaggcaaagtactgggcagacccggttttgcatttacgggttgtgcgctccatgtatcagttgaggttccaggatgagctttctcctgatttaactttgaaccagatcaggggcaaggaaggtgcccgggtgcgcgatacatatttccaactctcccaaaagtatggtgtgcccatgcagggcagaaactatcaaagagacaactggaataaagcggatcccataaaccgggcattatctgtggcaaactcctgcctctacggcatatcgcacgctgccattgttgctgcaggattctctcccggattgggctttgtccacactggcaagcaactgtcatttgtctatgatatcgcggatctatacaaaatggaaatggctgctcccgccgcattccgggcgaccgctgaagggatcggcgaactcgaccgcagagtcaggcttgcctgccgtgatgaattccacaggcagaatctactcaaacgcattgtcgcggatattagttctctcttcggtgatattatgccagaggatagcccggatgactgttttgccgaagaaccagccttgcctggaggactctggtctccagatggagaagtttccccaggcggcatatcttacgggcaggatgatctgccaaaggaagattgatggtggttttagtattggaaaatgtgccaagctccctgaggggtaagatcacacgttggctgctggaagtaaaagccggggtgtttgtgggtaaagtctcagcaatggttagagataaactgtgggataaggttagaagcaattgcagcggtggaacttgcctgatgatctggagtagtcagaccgagcaagggtttgatatcgaattctggggtgccgcatcaagagtcgttacggaatgggagggtatcaaacttatgaccaagcatccttaaactaaggcttgaaggtgttcaatgacctcttagacctctattgatcaagtgtattccccatgcatgtgggggtgaaccgtagatggcacaagtgcaagcgccgcaaccacagtattccccatgcatgtgggggtgaaccgtgatggcgtaagcaatgtgccagaagttaatagtattccccatgcatgtgggggtgaaccggaattgccattgatgcggcaaataatgatcttgtattccccatgcatgtgggggtgaaccgggagagtagctctcttcggaaaaaacagcgaagtattccccatgcatgtgggggtgaaccgagtcacgctgttattgcgtataggcagggtgggtattccccatgcatgtgggggtgaaccggtcaaacgcggtttcaaggaggctgagtatgtgtattccccatgcatgtgggggtgaaccgggcggctggagccattgagccataaggagatagtattccccatgcatgtgggggtgaaccggcatccaatatctattggggcgtttcaggatagtattccccatgcatgtgggggtgaaccggttacctcttaaggtttaatgagattgtggcgtattccccatgcatgtgggggtgaaccgaaatgagagatgttaaacaggagaatacataagtattccccatgcatgtgggggtgaaccgcggtttatagaccgatgcaagccgatattagggtattccccatgcatgtgggggtgaaccgaggttcccgccataactgcccaacaccagtacgtattccccatgcatgtgggggtgaaccgattgacgacaaacataaagccatgatgaactagtattccccatgcatgtgggggtgaaccgattgacgacaaacataaagccatgatgaactagtattccccatgcatgtgggggtgaaccgttatgcttacccaagctgagggggttgctggggtattccccatgcatgtgggggtgaaccaggtggacgcatacctggaagcggaggcggagaggtattccccacgcatgtgggggtgaaccgccggctaacgcgtgtttttttaatgttagttatgtattccccacgcatgtgggggtgaaccggggcagatggacgtgaaggcgctgctgaagctgtattccccacgcatgtgggggtgaaccgtccttttgcttgttggagatacctaccagcgcgtattccccatgcatgtgggggtgaaccgtggtagtgcctctcgtgaagcatcacaacgaagtattccccatgcatgtgggggtgaaccgacgccttcgcggaggtcttttttaagagtgatgtattccccacgcatgtgggggtgaaccatgggcgcaaaagatgtttgcgggtgagcccttgtattccccacgcatgtgggggtgttgcgatttcctcgcgcgcgggcgactctcatttgcatctggcgctcagaccttggtcttcctggggtcaaccttaacctttatatggatgacctaaggatgatggcaccaaagccagtagcagcaagggagagcggtatgaagcaatatgaggattatcacgggaattattttgaagggacaagcatccagtctgggtagtttgttggtattttgtcggttgtctaaagtggtggttttgtaattgacctgaaatcggtgtgacggggttttatggttttttgaagttcttttttgtatcggattgtaaaattttcaccctctttctatctgtgtaatttgtggttttattaaaagactggatcccgggtcaagcaagcttgcccaggatgacacagtatatagcttgggggtggtttgtttcaccattccacctttccacttctaacaattcgtgttagtttgtgtaatttaagggctgccgaagtctgttcggcagaggcaacagagttgcctgtttgggagagacctccggtctctgtggcaaacggattttgccacccctggacaatggatcacggctcgcagcccgtgatgacacagcatatagcttggcggacttgtttcggggctgatgcttgtttttgggttggacgtttgtccttattctgttcttttaatccgtataatttgtgtaatttgtggatatttttaaaagactggatcacggctcgcaggccgatatagcttggtggacttgtttcggggctggttgactgacccaaacggcgctatggcaagcgccgctacagtaaaggcggtcgctgaaccgccttcagggcagattcttttgtcctttaccttatccggcaaaattaacttgacataatttattataggtgattatctggtgactgtcattaagtttcgttttgaaatctccaaggaggcagatatgaaacgatcgcttcttatattggcgctgcttgccgtcacggcatcagccttcgccgccggagtacttatcaacaagcaaaacactcagtttcagattgctcaattgcggagctgcagctatgaggtgcaaatcaccaatcaggttgcggaagtgcaagtgaacgaaacatttgtcaacaacagcaacggttttttctatccccgctactattttcccatcccgcgaggcgccaacgcgacccgcttgagatggagctatggcgacacctggcaggaagcgtcaatttcaccggtgccgcaaaacccacagggcggcccgtcctcttttccggatgaatttgtcgtttatatccagttgatgccggtagttttcgacgtggcagactccatggccgtgaatgactccctgcggctggaactctcctacgtgatgatgttgagttacaatttcggcagcgtaaccctcaacctcaagaacgactacagcttgttgcagagcactcctctggatttgcagtccctggatgtgaatgtctcgtccgacaaagagattttggatttcaacatcctgaatgtgacagccagcacccaacacacggggcacagcgccagcgggcattactccctcgccaatcaacccgccaccgccaactatgcctgccagatactgctatcgaccgccgaactgggctcctggggcttgagcaccttactggatgatgtccccgatgaggaggcgccggggtttttcgtcttcaatcttgaggaggaaagccttccggcggattccactttattcctgcggctgaacatcgtgatcgacgtatccggttccatgacctttgaaaaccgcctggaaaacgccaagaccgccgcgatctatgtgctaaaccatctggaacccgaggattacttcaatatcatcctctttgaccaccgggtgcgccctctctgggattatctccactccaatacagacagcaaccgccaagccgccatttcctatatccagaattatgagattaccggtttgaacggaaccaacctctccggtggtttgcaaaacgcgctgtatcagttttcaccaactcccccgggagtcaaaaactgcgtgctgctcctttccgacggccaaccgactgtcgggatgacggatacctaccaaataatcaacaatgtcaaccaacacatcaccaactataacatcgatccccgcatcttctgctttggagtcggcaccgaggtcaactatcatctgttaagcgcgctgtcacaatacacagacggcgtcaccatctttctggagagctccgagatcgtcaatacggtcagcagcttctacgacgtcatgcgcaatcctctgctcctcgatcccgaactggccatcgtcccgcccgggatcacggaggtgtatccctatcccatcccctccatttatggaggaatccagtatcgcatcgtgggcaggtattcgactccgggaacctatcagatgacgatcagcggcgggcaccagggcacgcagttgaacctgaactattcccaaaaccttagcggagaggaagcccccggtttgagcttcattcccaagatctgggctgcttccaagatcgacaacctgatggtggagtattattcctatccgcccaattcggcggaagcgatcgccctgcgtgatcaaatcaccgagatcagccagagtttcggggtggtctgcatcttcaccagtttcacttccgatccgcccgacacggatttggatgacgtggtccaacccgtggtaaaaatgcccctccgcctgctgcctaaccagcccaatcccttcaatccctccaccctgctctgttttgaagtatccgccgaactggagggactggcagagatcagaatctataacctgaaaggacaactggtgaagatcctcacggtgaaggttgacggcaaaggcaggtacagcgtgccctggaacggcaccgatctgactgagcggtcggtttccagcggggtttatgtctatactgtcagatttggtaagtacctgctccacggcaagatgacacttgccaaatagagccggacaaatgccctttgcggcgctatggcaagcgccggtactttgtaaaggcggtcaccacaccgccttttttctatccctttttaagctcttttacttcgtgttaattcgtgttaattcgtgtaattcgtggatgaacttccaaaagtccaacctgcttcagccccagtatttgcggtccaggctgcggtattggatggcttcggagatatggtcggatttgatggcggccaggccttccaggtcggcgatggtgcgcgccaccttgaggatgcggtcgaagacccgggcggaatagcccagcttgtcgatcgcgtgctgcatctggctttggctgggggcatccagcgcgcagtgtttgcgcagcagtttggagttcatctgggcgttgcagaagatgccgtcattggcatagcgttcccgctggatggcgcgggcgcggttgaccctggcgcggatgtcggcggagctgtcgccggaaggcaaagaggccagatcggaataggtgaccgagggcacttccacgtggatgtcgatgcggtccagcagcgggccggagattcggctgcggtagcgttggatggcgccgtattcgcaggtgcaagggtgattggggatgctggagccgaaatagccgcagggacaagggttcatcgaggcgatgagcatgaactccgcgggaaaggtgaggctttgggaggcgcgggagatggtgacgatgccatcctccaggggctggcgcagcacttccaacacgccgcgcttgaactccggcagctcatccagaaacagcacgccgcgatgcgccagggatacctcgccgggacgggggaaggttcctccgccgatcagggcgatatcgctgacggtgtgatgcgggctgcgataggggcgggtggtgaggatgccattgtgaaaatctttggagtatcccgccacggagtggatcttggtggcctccagggcttcatccagcgagagttccggcaggatggtgggcacgcgccgggccagcatggtcttgcccgaaccgggaggacccagcatcagcaggttgtggcctcctgcagcggagacctccagggcacgcttgacctgaaactgccccttcacgtcgtgcatatccacgggaaaggcgttcagagaggaaaaaatccgctcacggtccacctcggcgggcggaatcttggcctcgccgcgcagaaagagggccgcctccttcagcgaggtgaccgggatcacctgtaatccttcaatgatggcggcttccccggcattttcccagggcaggacgagggtgtcgatgccatcccgtttggcagctaaagcgatgggcagcactcccttgacggggcgcaggttgccatccagggaaagctcgccgatcagggcggtcttggtcaggtattccaccggaatctgcttgatggactgcagcacggcgatggcgatgggaaggtcgagggcggcgctgtccttgcggatgtccgccggggcgaggttgatggtgaagcggcgcacggcggcgtcccagccggaattgcgcagggcggcaaagatgcggtcctggctttccttgaccgcgttggatgccatgcccacgatggtgaccgcgaaaacctgagaggtggcgtcacactccacagtgagctgttgcccgtctatccctatcgtggtgtaagtgcgcactattccaaccatttgaacctacccttgtttggtattttgctttgttttgcagtaaaatagcggtcggcgcaacggtcaagggaaaagtgcgggaggagggtgactatccgcaaattacgcgaatttacacgatttattagaagtggaaaggtggaatggtgaaaaggagcctcgaaataaacccgaccaggccatataccgtgtcatcacgggctcgacccgtgatccagtcttttagaaacaaccagccagcccggaaacaaacaaccccagactaaaagagtgtcatcacggccttcgagccgtaatccagccttttggaaacagcaaccaagccccaaaacaaacattccacctttcctccaattctacaattcttcccccatatatataggtgctacgacccctttatcccaggcaggaagcggattccagggcaagtatataaatatacttgcccgtaattgcgcggccatgtatcggcctcttccctttccctcgcgcgtgggtggccctcatttgcatcaccttctccggcgtgggtcttcctggggtcaaccttataatttataaggatgacctaaggatgattagctaacctgttgatggtgcaaatgatagcaacatgggaggcaaaaaagtatgtcttggagtttgcccgttggtttccgggctggctggttgtttccaaaagactggatcccgggtcaagcacggcttgcccgggatgacacagcatatagcttggtggacttgtttacaggctccatttcacctttccgcctttccacctttccacctcaaaaacacctttccacgtataataattcgtgtaattcgtggactattatctaacaggcttgctccagacgcgcccatcttcgcggatgatccagtccggggagccgcccttgccgggcagggtgaggtcaaatccggcggaggtggtttccaggcgtggtttaatctttttgccatcccgcagataggggcgcgcgcccagttgacgcagctttccagcccagcgtccgtgatccataaaatactgtttttggaggtaatagatctgcctcagatattccttttcccgctcggaggcaggcggcgaaaaacccgggtctgccgagccagcgggcgcggcggagaagaacagataaccccaacgctctggatagtgcatcgcgatcagtccctggggactccaaacccagttgcgttcaggcataccgggcactttggtgtagttgccgtccagccactcggtatcccattgcacgcgggagaagttgagccgccaataatcgccgtcccggggcgggcaggggacatgggcgaactcctcaaaggccggccagggcagaaacatctccacgctccagccgctgtcgaggtcactggggtcgttgagggtgccgtcgattccgatggcaaagcttgctcccttgatgtcccagccgttcagggggctgtgggcgtcgcggtaaggcttgaggatgaagaggtcccagagggtgcccagggcgttgatctccagttcgtaatactcgtgggtgtcgccgttggggtcgaggaagacctcaaaatcgttgtcgtaaaagatcaccgcgtcacgctcggtgaggcttgcccagatgtggggctcctccagccaggcgccgatgtagagtccggagtcatcccagagcatcttgacccaggtatccagatggggcgcgggtttgaggtcgccctcgatatccgtgaacagctccgtgggcagggcaagttgccagtcgatgtcgtccaggctgccatccaccttgatcccctccaccgttctgaacgcggtgtaggagcggggcgcgaactcgcccacgggcaggggaaaggtctcggcggcaaggacggaaaggatgaacaagagaacggggacaagcagttttttcatgggatagctccttatggttcgcggcaggctgccagcagctcacccgcggtggcgacggccagaccgacacaggtgtccgccgcgccgtaatagatgaagattctggtgccgggcaacactgtgccgtcggcttccacgctttcggggatggcggcggagggaaagaccacattgggcacttggccactcagttcccaggattcacgcggttccaggatgttttgcgcgctcctggcggttacgttccagggcaaagcgccatcgtgcagcgaaactcccgcctgatatatgtttacgctggcaaagtgggtcgcaacgccgtggtagatatgcagccagccctcggaggtcttgagcgggggcgggccggagccgagcagttcgtcccaatagtggggacggccgctgaagacgggggccacgggctcccaattaagcagatcgggcgaggcgtagcagacgatggtggctccggaacgcactccatccgcgcccagatggtcattgggacgggcaaagagcagatagctgccgccgatccgttccggaaagagtaccgcgttgcgcagatcggcatccgccagcaggcccagatagcgcaggctgcggcagtcttccgtttcaaacagcgcggagcggcagcccggggcgcaatcgatggcgcaggtgacgtagatgcgcccctccaggcgggtgacgcgggggtcgtagaggtggtaaatctcatagggaaaagcttccagcccgctcaccgccacgggatggccgtccacgcggaaactgacgccatcggctgacgcggcgcggacaaacagggtgcgcctgccgcgatcctgcacgcgcagcagcagaacatactcgccgccaagcttgaccccaccggggttgaagacagagctgacatcgcgcggcaaggcatccgaaacggggatatccgcccgggtgaggacgggattgcgcggatggcggatcatagcaggcctttcagctctttgacgcgccgctcacactcggcgaaatccctggaagggaaatcgctccagaacagctccgccatgtaaagcatgcggtcatagaccatttccttcagacggcggctattggaaatccgctccgtccagaggttggcctgtccgcccaggaagagtccggggttggaaaacctgaacttgccgaggtccagcccatagacatcccggctggtggtgactccgaagcctccgggacagtccgggtcttcgttatagcgccagtcaaaatagaggcggttgttggggcagatgatgtagcggttgccgttgtcatgagccatgcgggcggcatccaccccgtctccgcgccagcacatggcgatcggccggctgtcgatcccgccgtccagaatctcatcccaaccgatcacatccctgccgcgtttttgcacatgagccaccagttgatgcaaaaaccaggcctggaggtgttcttcatcccgcaaaccctcttcccggatgcgccgctggcaacggggacactctttccagcgctccttgggcacctcgtcgccgcccagatggatgtattggccgggaaagagttccaacacctcatccagcaattctttaaggaaatctatcacgctgtccttaccggcacagaggatgtccgtggaaatgccccagacgttgagcggctcaaagtcccgggggaagcaggccagatccggataggcggccaggatcgccatggcgtggccagggatgtcgatctccggcaccacctcgatgccgcggtcccgcgcgtaatccagcaccaggcgcacctgcttccgggtgtggaaaccgccgtaaaggctgccatcctcctctttgcgccaggcgcccacttcatgcaggcggggaaagcgtttgctctccagccgccagccctggtcatcgcttaggtgccagtggaatttgttcagtttgacggccgccatccagtccagatagcggcggataaccttgtagtcaaaatagtggcggctggtgtccagatgcagtccccgccaaggaaaggagggccagtcctccaggtcgaagcagggcagtcgcgcggagtcctttttgccttggcgggcagccttgtgccaaatctgccgcaggctctgcacgccatgcaccaggccgggatagtcctgcgcgctgatcaccgtgtcctggggacggctgactatcttgtaatggccgcctggacgctttcccttgcgcggggtaagttccaggcttacgctatgcggggtttcgctgtctggatccatgaagtccaacagcttgctgtaactgctttccaggctggaggagagatatctgtgggcactggcggagagttggggacagcacatgataataagcaacgggctggggcggaacgtctctttgagggggtgatactttttgggcttaggaagcatgtttcctaccttatcaacagggttttgatctggaagggcttgaaactgaggcggatgccccgctcgccgatgggctgcgcttcgctgtccggcaaggggttttccaacaggtcgcagacgctccagagatggtggccgggtgccaaaagagtagcctcggcggaacctcccgcgcattcatggaggcggacaacgatgccgccgccggattcagcgggcttgatccaatcgagggtcacggcatcggaaagcaggcgcacgggcggacggggcagagggttggcgagggcgggcacttccaggcagagcagatcggcgcaaaaggcctcggcagcctgccagagccgggagccggcatagtctccgctgtggaagtaaaccgcgtaggaatattcgtgttcgcccaaatctgccagggggtcaacgtcggcgggagagcgcaagaggttgaggtccatctcgttgtcgcgcacatggcagccgaacttgtcggcgcagaaaatggcgcagccgcggtctgcctgggaaagatcgaagaacttttggaaaggcacctcgaagcgcgcttcctcccaggcgttgcggggcttggcgctgcgtcccagcatgccggactggatgccaaagctggcctgggcagagcggacatcgggataccagtgcgcgcgcagcatcttgtgcttttcctgccagtcgatgtggtgcgagacgcgcagcaggcgctctccccggcgcagttccagggtctgccgcaggatggaggagcccacgcgcaaggtctggacaaggcgggcaaattccccgggcagggtgtagttttgcgccgcttccaggctgatcccctccgcaggcgtgggtgtggttgtgcggtaaaagtggttgatatcccaggcgccccagttgttgggttcatcctcccagagcagcaggcggtttgattctgaggcgaggagcggcgttccggactccttgtcccacacctcgctcacgcttccctgctgggttacggtcacgcgcaggaactcattttccaggcaatagccagccagaggaataggcttgggaatctcccccactccggctttgaaggcgatggaacccactccccaggcgggcaggctggccttgaccagcgttccctccggggtggagcaacaggtgagggggacgccgtcttccccgcagggcagcaggccttcggcaggggcgggaagcggcagccattccgtcttggatgcgggagagggattgagcagcagccagccctggccgggtgaggcttccccggaggtggtaagtccggcggcgcgctggttcagaaagtcatccaggattttgcggttaccggcgcagatggcactggcatcgttataaaccatgccaatcgaggagccggggatgatgtcgtgaaactgcagcaacagggtatcctgccacacggggcgcagttcccggggatattcttccccgccggtgagcgcggccaggtattccgccgccctgagcagcctttccgcccgcgcattgtcccgcttcatccgcgcctgggtggtgtaggtgccgcggtgatactccagataaagctcgccgggcatcacaggcagcagggagcggtccagagccttcagatgctcgaaatagtctgacgacctggcaaagcggaacttcggcacgccctccagatcgcgctgccggaggccatactccagatgcgcctcggtgggcccgccgccaccgtctccgatgccatagaggttgaggaaggcgtcgcaaatctcgctctgggcgaagcgttcctccgtcttcaggaaggcggagggattgttggaaaagttatagtcgtgggtgggcagttgttgcgccagtacccggctgccgtcgatgccctcccacaggaagaggttgtgggggaaggcgttgctttcgttccaggatagcttttgggtcataaactgctccacgccgcagcccttcatcagttggggcaggttgccgctgaagccgaagcagtcgggcagccagaggacatccggctccacgccgaactcctcacggaaaaagcgtttgccgtacatgaactggcggatgacggactccgcggagatgagattggtgtcgaactccacccaggacgccccctgcacctcccatctgccttccgccacgcgctttttaacctgcgcgtagagagcgggatacagctccttcatccagagatagagctgggcttgggaggcaccgaagatatagtccggataccgttccagcaggcgcagcgcgttggcgaaggttctgccgcccttgcgtttggtctcgcgcaggggccagagccaggccagatccagatgggcgtgaccgacgctgaacgcggtgagcgcgctggcattagctggcttggcgagcaggtcgtccagaatgcccgcgcaggcttccctgtcgctgttccagaggtcgcaaacccggttcagtccatacaggatacgctgcctgcgggtctgcccattgggcaggctgagcgcaagatccagcagcagttcgatgtcccagagtagcttgcgcagccggggatcacgccagaccaggctgcactcccgcagcctatactcgctttttcccccgccgaaaaggtcgttggcggcggcctcgatcagcagttccacccgttccccctcttgcaggggcaggggaacgaaatacttggcggcgttgtgataccagtccaccttgggggtcaggccctgccagggagtttggcctttgaacacgcaggcttcgccgtcacaatcgaaccacagccccagttccatgcccgcgggggttgccggagcctgcccgctgatcctgaaccaggcgctctgccagggtttgccccacagtccgccgacttcgatctccttgaaactcatcgaggcgagcttttcctgcgggatgggatccgccgcgctcacatactccgcccgcacgggcagcttttccccgtgcagcagcgctttctgcctctccacgaggcgtttgatccgctcgatatggatcttttcgttgtgcattatttctccatggggaccacgatgccccggataatgatattctggaagaagacaaacaccgccagcgtggggatggcggcaatcaccagggcggcgtagcccactccgctgctggcgcgctgcaacagctcgtagatgtgcaccatcagggtccacatcgactgatcctggcagaccaggaaggcaaaaaggaagttgcggtaagccgcgttgaaggcccccagagcgatcaccgccaggatcggcttgctgagatacatggtgaactgccagaacatgcgcagctcccccgctccgtccaggctggcgctttcatagatttcccgcggcaggctgtcgaaaaagcccttgagcaggaagatgaagtagccatccgccgcagcgggcaagaccagcgcccaaaaggtgttgagcaggttcaaacgcttcaacatcagaaagttcggaatgcccatcaccatcgccgggaaagccatggtgagcatgaagatcatgatgacctgatgcgtgaagcgcggtttgaagcggctgagcgcgtaggcggccagcgggttgaccgtgaccgcgaagaagatggagagcagcacgtagatcagggtgttgcgcagcgagcgggagtccgccagcatctgatccagcgccatggcatagttgcgggtgagaaactcccgccggatggcgcccttgcgctccataaaagttcccctgtcgatctccgcgctggggaaagggactttcccaaagcccgtgtagctgcttccccaagcccggttgagcgcgccgagggagccatacttatcctccaaccagtccctgaaccccgccgccacgctcactatcctgagttcttcgggagccgccctggtctggatatacagggccagatcgtccacttgcgcgccgctgtccggcaggcggacgggaatgccgacctgctcgaaactgctgtaagatgcctgccaggcggtgttcagcaggctgatcccgccgtacttttccttcagcgcccggcggaatcccggctccgcctccggggaaagccgcagatgctggatggaaagcacttcccgcgcatattccagccagtaggggcgcagcgggtcgccccgggcgggacagctttcgggcaggatcacctggctccaggtggcgtagctggtgcccaactccttgttcagcttgtccagattgccctggaaggtggggatcaggatggcgttgacaaaggttccgtccgggttcatatagagccgctgccagtccgggcgttgctccttgaagcggcggaacctgcccagatagccttgggtggagctggcaaagttgcgcaaaaagatgtccttttcctccaccgaaatctcttcccagcttttagccccggtgttgtagcggcggttgaaggccgccaggtcgccgccgttttcctcgcgcagcagcttgcggtattgcctctgcgccagcggatagacccctcttccgtaatgctccgacacatagtagaaattgactccgtagtccccgccgcgttcccgcagaaagcgcttccaatcctcatacacagcgggattgccgtccgagggcagttccacctcggaaaaggcgatccagccgcccggatagttgtccatcagacggctgctttcctcgttgtagcggctttccagatacttttggtagagcgcgccgtcccggtaaacatagcgcggcaccagatccagctgggtgctgtccaccgcgctcttgaacgatgaggaaatcatcagcaaaaagggatagaccatcgtgaccgagccaagcagcaggatgacgtgcaaagacgcgttcagcgcccgcaccttgaagctttgcctgcccaccctgccgatgatactcattcgtcctcccggcccgccacgcggaactccatgcgtgagatatagcgtatctgcagcaccgtaaagcccatcagcagcaggctcagcatccaggccatggttgtcgccagcccgaaacgcagatagaggtaagccttttcaaagatcatcaggtctgccacccgggtcgcctcgttgggcccgccgaaggtcatcaccaggataaagtcgctggattgcgccgccacgatgaaggccgcgatcagttgcacgatgatcagcatcttgaggctgggaaacacgatatggcgaatcttggcaaaaaagcccgccccatcgatgtccgccgcctcgtaaagctcattggggatgttcttgagcgccgccaggtagatcagcgaacccggccccactcccgcccaaaccacaggcagcaccacgcaaagcatggccagtttttcatcctgcagccagcggctcttgggcaggccgaaagcggtcagcaactggttcagggcgcccacgtcacccggggcgtagagcagtttccagaggtagatcacgatcaccccgctgatcaccgccggcaggtagtagatcacccggtagatcatcttgccgcgcgaaacctcctgcagcatgatggccaggatgatgggcgggaaaaagcccagtcccaggttcaacgccatgtaatacaaggtcttgcccacagaggaccaccaactgggatcgaaaagcatctccgcgaaattggccatgcccacaaaggggctggggcccaccaggctgtaatcctgcaccgccataacgctgccgctgatcaggggcacatatttccacacaaagatgctgatcgccgcgggagcaagcagcagcaggacgcagcccaggcgtttggtctgctgtcccccgccactcccccgctccggggccagaatcttccacacccgccacagcgtgaagcaaaaggcaaaaaggatcagcgccgccaccacggccgcccatcgttcccgggctttgcgcgtggcttccggcagatggccgatcatctccgcgttggtgcgctgttccgcccgcgccagcacccgcttgatggcggctttgcgtgccgcggggtcggtgccgagcttgcccgccagttgcaggccgatcagctcgtccagcggataggtcatgtattcataaactttctggcagttgtcgccaaagggttcgggacgcccctcgcgcatcgcggtctcaaaggtctgcagccagcccgccggggcgtagcgcaggtattcgccatagccatagcgctgcaggaacaccggattctgcatcttgccatagccgttttccaccatcaccttcatgcggatgcgccgcgcttcctcgctgtcgtagaagcggatgaaagtccaggccgcctcgcgcacctcccgcgggtcacgctgtcccagtccggcgttgttgctgattccggcaccggaaaagattcccatcatgcggcagttgatttcgctgcctccgcgtccggaaggcccggcggggcttggcgcgaagccgtagaggttgggatcgtatttgccgcccatgttctgctgcgaaaggtagtccatgcgcatcccgatcttgccttcctgccagaggttgccccagttgccgtcgcggatggcgaagccctgctggagcttgcccgcggagtccgtccaggggcgcgtggcgaggtcgaggtaatactccatcgcctccacacccgcctgcgaggcgaaggaagcccgccactgcctgttgtccgcgtcgtaggtcaccgcgtcgccgcctgccgcccacaaaaagggcagccagtcataagctgcctgcgggccgatggcgaggatggtaccataggttccggccttgggatcggttagctgtttcgcataggcggcaaactccgcccagtcgcgcgggggacggttgggatcgaggccgcatttcttgaacaggtctttgcggtacatcaggacgcgcaccagggtctcatagggcaaggcccagacccgctctttgctatccccctttttctgcctgcgaatcacctgccagacgggtttttccacccgcagggcgaggtcttccgcgctttcccgcgccataaactcatccagcggatagagcaggttgttttggatataggtgtcgctctggcggaaatttacatacatcacgtccggcgccactccccccgcgatcgccagcagcgggccggaatccaggtccatgccctcgatcttgatgccggaaaaggagcgcagttcgatccacggatatttctggcggaaggcgttgatcaccgccaggtcggctttgctgttggcatcggtatgccgggcgtcgggcagttcaaaaaccttgagcaccaccgttttgcgctgcgccgccgcggaaaagggcagcaggcaaagcagcagaaccagcggcgccagacggcggataccagcggaacgccgtccccgcgtggctttggaacactgtaaagctctgaacaaactcatcattttaccaaccgctgcatcctgcccgggcccgctctacaggtcaagtaaaatcaggttcgtgctttttcagcccctctttctccagaacaggcagcagggcgcggcggtattgctccagccggaaggcggccaggctgggccaggcgccgggattggccctgtaaaaggggtcacgtgccaggctcttgaaggcttggggcgaaggcgagatcagcgtgtatatatccagcttcatgtcctccaactccacgtgcagcaagcgtctgtcaccaggatcaaccgcgagggcgcgaataccgggatcgacacgcatttgtttgattaacaaatttttaacatagaaactggtgcagaatatccgttcaatctggggcatgaggggcagtatacccccgacgggcacggtggaaaacacctgcagggaactgtcggaggcagagtttccccgcctggcagcggtttgaatgatgtcaacgacaccgacgttatgtttgcgcaaccaactcttgatcaagtgcttgggtatttccttgtccgctgcgtccaaagaccagttttgcccaaaaacctcctgcagcaggctccagaacgcgttgttccggctgccgtaatagtagtccatgtctccttccggcaatctttgcctcagttgcccgccaaagctgacgtaccgcgggggcggaaaactgcccacgatcagccagcgcgttgtgtccgacaggagcgtctcatcatgcaacccgttgtagggatgcttccccaccgggaaaatcaatatgtttctgtcttctgtttcatgctgttgcttcatgctgttctccatatcatgctgcagggcagcttatctgatccgccccgcaagtcaagtgaaatattccgcttttgcttcacgccgccatcccttgctgctcctcgctttggtgccatcatccttaggtcatcccttaccgggttaaggatgactgccggaagacccccggcaagccagatattgcaaacgcggcccccatatatataggtgctacgattaggccgtggaaaggaaatagaacgcggataatataagggctgccgaaatccgttcggcagaggcaacggagttgcctgtttggaagagacctccggtctctgtggcaaacggactttgccaccccaaggcactggctcccgggtcagtcagctcattcatctcccgcaaaaaggttgtccgccacatcggaaggcaggatggagggggttccgcggcgggcggcaagtttttccgcggtgcgtcccagcaggaaggaagcgttgatggcggcttcggggatgctcaaaccctgcgccaaaaaggagatgatgatgccagccaggacgtcgccgctgccgccggtggcgagcccatcgttgccgctgctgtttaccatagtggtttcgccgtcgtgatagacgctgaagtgggatttgagcagcacgcgggccttatggcgggcgacaaattcacgcagaggggagaggcagtccgtttccaggctgtccttggggatgcccgccaggcgggagaactcgccccagtggggtgtgatgaggatgtttggcttggccagatacttgagcagggcggggttgtcggcaatcaggttgaggccgtcggcgtccaccaccagaggccgcttcacctggcgcagggcgatctccagcagacgcagggaatagctgtcgcgtcccaggccgggcccgatcagcaccgcggaggcttcgcccagcaagctggcaagctgtttggtatccggcatggcgcgggagttttccgggatggagaggctgagggcttcggtgagcctgatgaagtagaagggctgcagttcaggccgatggagcatccagacatatccggcaccggcgcgcagagcgccccgggcggccagcagcgaggctccggtgtagcccggcactccgccgaagatatagaccttgccgaagtcgttcttgtggctgtccggatggcgcatgggagggcagaaatcctcttcggtgaacagtttgacgctgggcaggccgtggtagtaaaagtggggaatgccgatggggacaaagctggtggggccgcagacttccctgccgtagcccaggacgtgtcccagcttgagagaggcgatgcagagggtggcatcggcgtaaatcgcgtcgccgcaccagccggtgtcggcatccagccccgaggggatgtccaccgcgatcacgcgggaggcactggtattgaccacttcaaaaagggtgaggtgaaagtcgtccggctcgccgtggaagcctgtgccaaagatggcgtcgatcaccaggtcgctgtcggagacgatctcttccagcaggggcaggtcttccaggctggaaatctgcagaatggggatgccgagggcgcggcaaagctccagattggccttggcgtccggggagaggtcgcctttcccgatccgcaggatcaccacttcgcagccgccctggtcgagccagcgggcaatcacggcgccgtcgccgccattgtttccgcggccgcagaggatgcaggtgcggccttgcagccattggggatattgcgcggcgatcaggtcggcgcagcctttgccggcggtttccatcaggacccgggaaggcaggccgaattcctcggcgcagcggcggtccaggtctttcatttgggaggaactgagcaggtattgcatggtttacctcttgctattggattggatgggcagtttgatctcaaaggtggtgccttcgttgggaacgctttggacaacgcgaatctgcccctggtgatattcttcgatgatgcgtttggccaggctgagtcccagtccccagccgcgggtcttggtggtgacgccgggatcgaagattcgtttccattgtgagcgggggatgcccttgccttcgtcgcgaatctgcaaatagatgtgccgttcggatttggaggcggtgatgatgatgctgccgccctttttggccatggcgtccacgcagtttttgatcaggttttccagagtccatttgaagagctcgggatccagcatgacctggacgccctcgatcttggaaatgaggtggatgtcgatgcgggagcccagatggggcatgcgcttttggaagtaatccaccgtctccaacaggatggtgttcaattcggtggggacgagattggtctgggagcccacctttccgaagcgggaggcgatcatgcgcaggtggttgaggtcggcggtcatgtattcgatgatgcggtccattccgggacggtcctgccctgtcccgggggattccttcaggtagtcgatccagcccatcagggaggtgatcggggtaccgaactggtgcgcggtttccttggccagcccgatccagagggtgtccttttcggtgcggtgcagcaggaagagcccgtaggaactgaaggcaatgagcagcaaagccaggatgatttccagcacgaagacgctttggatgcgggaaagcgacttgggcgcggtgaagtagatgtagccgaggctgtccgccgcgttgctgaggggaatctcggtcatcctggccagcctttcggacacctgctcacgctggaaaggcgggatatcataccaggggagggattcggggatgtccatgttgcgccagtagagggggtttttatcgcggtcggtgaccaccacggaatagtcgatattgctgaggaactggcgcagggaaatgggcttggcgaagaagacatagttggtgagcacgccgttggcgtcgatgggtatcctttccatgctgcccagatgcgaaaagaggatttggcgggaagccgggctgagttcggcaaagctgctgtctgaagaaactcccaccctgctccagtagaggggttccagatcggtatcggtgatgatgatgggcagtgggttgtggggcatgaattcgtaaaggatgtagtctccgatggaggagttgaagttaggcttctgcaccgatttgaagtagtttgagctcagctcgccgatcatcagggaatactgttccgcctggcgcaggtagtcatctgaataggcgatgtactgagcgaagatgcggggaatatattcctgctcctgcttggcgttgtggatcagaatctgggtgtaaaccgcaaagatgccaaagactacaatgctgccaaagatcaggtagaggcgcagggtgcggaagctattggtcttctttcgcgaggttccagagggcgtcgagttcttcgaggcttgcttcatggatattggctccgttttggcgatagtgctcctcgatatagcggaagcgttggtggaatttccgggtggtttccttgagcgcgccttcggcgtcgatattcagcttgcgggcaaggtttaccagggtgaaaagcatatcgcccagttcttccttgatcgcggcggcatcctgggaagccagggcggattgaaactcgtcctcttcctcccgcagcttgtccaacacgggtttgacggaggcccaatcgaagcccaccgcggcggccttttcctggctgcgttgagcttgaatgagggcgggc

SEQ ID NO: 978 - DNA, 128189 bp, Artificial Sequence
  Synthetic Oligonucleotide
  misc_feature (1)..(97064): n is a, c, g, or t
nnnnnnnnnnnnnnnnnnnnnnnnnnnnnnnnnnnnnnnnnnnnnnnnnnnnnnnnnnnnnnnnnnnnnnnnnnnnnnnnnnnnnnnnnnnnnnnnnnnnnnnnnnnnnnnnnnnnnnnnnnnnnnnnnnnnnnnnnnnnnnnnnnnnnnnnnnnnnnnnnnnnnnnnnnnnnnnnnnnnnnnnnnnnnnnnnnnnnnnnnnnnnnnnnnnnnnnnnnnnnnnnnnnnnnnnnnnnnnnnnnnnnnnnnnnnnnnnnnnnnnnnnnnnnnnnnnnnnnnnnnnnnnnnnnnnnnnnnnnnnnnnnnnnnnnnnnnnnnnnnnnnnnnnnnnnnnnnnnnnnnnnnnnnnnnnnnnnnnnnnnnnnnnnnnnnnnnnnnnnnnnnnnnnnnnnnnnnnnnnnnnnnnnnnnnnnnnnnnnnnnnnnnnnnnnnnnnnnnnnnnnnnnnnnnnnnnnnnnnnnnnnnnnnnnnnnnnnnnnnnnnnnnnnnnnnnnnnnnnnnnnnnnnnnnnnnnnnnnnnnnnnnnnnnnnnnnnnnnnnnnnnnnnnnnnnnnnnnnnnnnnnnnnnnnnnnnnnnnnnnnnnnnnnnnnnnnnnnnnnnnnnnnnnnnnnnnnnnnnnnnnnnnnnnnnnnnnnnnnnnnnnnnnnnnnnnnnnnnnnnnnnnnnnnnnnnnnnnnnnnnnnnnnnnnnnnnnnnnnnnnnnnnnnnnnnnnnnnnnnnnnnnnnnnnnnnnnnnnnnnnnnnnnnnnnnnnnnnnnnnnnnnnnnnnnnnnnnnnnnnnnnnnnnnnnnnnnnnnnnnnnnnnnnnnnnnnnnnnnnnnnnnnnnnnnnnnnnnnnnnnnnnnnnnnnnnnnnnnnnnnnnnnnnnnnnnnnnnnnnnnnnnnnnnnnnnnnnnnnnnnnnnnnnnnnnnnnnnnnnnnnnnnnnnnnnnnnnnnnnnnnnnnnnnnnnnnnnnnnnnnnnnnnnnnnnnnnnnnnnnnnnnnnnnnnnnnnnnnnnnnnnnnnnnnnnnnnnnnnnnnnnnnnnnnnnnnnnnnnnnnnnnnnnnnnnnnnnnnnnnnnnnnnnnnnnnnnnnnnnnnnnnnnnnnnnnnnnnnnnnnnnnnnnnnnnnnnnnnnnnnnnnnnnnnnnnnnnnnnnnnnnnnnnnnnnnnnnnnnnnnnnnnnnnnnnnnnnnnnnnnnnnnnnnnnnnnnnnnnnnnnnnnnnnnnnnnnnnnnnnnnnnnnnnnnnnnnnnnnnnnnnnnnnnnnnnnnnnnnnnnnnnnnnnnnnnnnnnnnnnnnnnnnnnnnnnnnnnnnnnnnnnnnnnnnnnnnnnnnnnnnnnnnnnnnnnnnnnnnnnnnnnnnnnnnnnnnnnnnnnnnnnnnnnnnnnnnnnnnnnnnnnnnnnnnnnnnnnnnnnnnnnnnnnnnnnnnnnnnnnnnnnnnnnnnnnnnnnnnnnnnnnnnnnnnnnnnnnnnnnnnnnnnnnnnnnnnnnnnnnnnnnnnnnnnnnnnnnnnnnnnnnnnnnnnnnnnnnnnnnnnnnnnnnnnnnnnnnnnnnnnnnnnnnnnnnnnnnnnnnnnnnnnnnnnnnnnnnnnnnnnnnnnnnnnnnnnnnnnnnnnnnnnnnnnnnnnnnnnnnnnnnnnnnnnnnnnnnnnnnnnnnnnnnnnnnnnnnnnnnnnnnnnnnnnnnnnnnnnnnnnnnnnnnnnnnnnnnnnnnnnnnnnnnnnnnnnnnnnnnnnnnnnnnnnnnnnnnnnnnnnnnnnnnnnnnnnnnnnnnnnnnnnnnnnnnnnnnnnnnnnnnnnnnnnnnnnnnnnnnnnnnnnnnnnnnnnnnnnnnnnnnnnnnnnnnnnnnnnnnnnnnnnnnnnnnnnnnnnnnnnnnnnnnnnnnnnnnnnnnnnnnnnnnnnnnnnnnnnnnnnnnnnnnnnnnnnnnnnnnnnnnnnnnnnnnnnnnnnnnnnnnnnnnnnnnnnnnnnnnnnnnnnnnnnnnnnnnnnnnnnnnnnnnnnnnnnnnnnnnnnnnnnnnnnnnnnnnnnnnnnnnnnnnnnnnnnnnnnnnnnnnnnnnnnnnnnnnnnnnnnnnnnnnnnnnnnnnnnnnnnnnnnnnnnnnnnnnnnnnnnnnnnnnnnnnnnnnnnnnnnnnnnnnnnnnnnnnnnnnnnnnnnnnnnnnnnnnnnnnnnnnnnnnnnnnnnnnnnnnnnnnnnnnnnnnnnnnnnnnnnnnnnnnnnnnnnnnnnnnnnnnnnnnnnnnnnnnnnnnnnnnnnnnnnnnnnnnnnnnnnnnnnnnnnnnnnnnnnnnnnnnnnnnnnnnnnnnnnnnnnnnnnnnnnnnnnnnnnnnnnnnnnnnnnnnnnnnnnnnnnnnnnnnnnnnnnnnnnnnnnnnnnnnnnnnnnnnnnnnnnnnnnnnnnnnnnnnnnnnnnnnnnnnnnnnnnnnnnnnnnnnnnnnnnnnnnnnnnnnnnnnnnnnnnnnnnnnnnnnnnnnnnnnnnnnnnnnnnnnnnnnnnnnnnnnnnnnnnnnnnnnnnnnnnnnnnnnnnnnnnnnnnnnnnnnnnnnnnnnnnnnnnnnnnnnnnnnnnnnnnnnnnnnnnnnnnnnnnnnnnnnnnnnnnnnnnnnnnnnnnnnnnnnnnnnnnnnnnnnnnnnnnnnnnnnnnnnnnnnnnnnnnnnnnnnnnnnnnnnnnnnnnnnnnnnnnnnnnnnnnnnnnnnnnnnnnnnnnnnnnnnnnnnnnnnnnnnnnnnnnnnnnnnnnnnnnnnnnnnnnnnnnnnnnnnnnnnnnnnnnnnnnnnnnnnnnnnnnnnnnnnnnnnnnnnnnnnnnnnnnnnnnnnnnnnnnnnnnnnnnnnnnnnnnnnnnnnnnnnnnnnnnnnnnnnnnnnnnnnnnnnnnnnnnnnnnnnnnnnnnnnnnnnnnnnnnnnnnnnnnnnnnnnnnnnnnnnnnnnnnnnnnnnnnnnnnnnnnnnnnnnnnnnnnnnnnnnnnnnnnnnnnnnnnnnnnnnnnnnnnnnnnnnnnnnnnnnnnnnnnnnnnnnnnnnnnnnnnnnnnnnnnnnnnnnnnnnnnnnnnnnnnnnnnnnnnnnnnnnnnnnnnnnnnnnnnnnnnnnnnnnnnnnnnnnnnnnnnnnnnnnnnnnnnnnnnnnnnnnnnnnnnnnnnnnnnnnnnnnnnnnnnnnnnnnnnnnnnnnnnnnnnnnnnnnnnnnnnnnnnnnnnnnnnnnnnnnnnnnnnnnnnnnnnnnnnnnnnnnnnnnnnnnnnnnnnnnnnnnnnnnnnnnnnnnnnnnnnnnnnnnnnnnnnnnnnnnnnnnnnnnnnnnnnnnnnnnnnnnnnnnnnnnnnnnnnnnnnnnnnnnnnnnnnnnnnnnnnnnnnnnnnnnnnnnnnnnnnnnnnnnnnnnnnnnnnnnnnnnnnnnnnnnnnnnnnnnnnnnnnnnnnnnnnnnnnnnnnnnnnnnnnnnnnnnnnnnnnnnnnnnnnnnnnnnnnnnnnnnnnnnnnnnnnnnnnnnnnnnnnnnnnnnnnnnnnnnnnnnnnnnnnnnnnnnnnnnnnnnnnnnnnnnnnnnnnnnnnnnnnnnnnnnnnnnnnnnnnnnnnnnnnnnnnnnnnnnnnnnnnnnnnnnnnnnnnnnnnnnnnnnnnnnnnnnnnnnnnnnnnnnnnnnnnnnnnnnnnnnnnnnnnnnnnnnnnnnnnnnnnnnnnnnnnnnnnnnnnnnnnnnnnnnnnnnnnnnnnnnnnnnnnnnnnnnnnnnnnnnnnnnnnnnnnnnnnnnnnnnnnnnnnnnnnnnnnnnnnnnnnnnnnnnnnnnnnnnnnnnnnnnnnnnnnnnnnnnnnnnnnnnnnnnnnnnnnnnnnnnnnnnnnnnnnnnnnnnnnnnnnnnnnnnnnnnnnnnnnnnnnnnnnnnnnnnnnnnnnnnnnnnnnnnnnnnnnnnnnnnnnnnnnnnnnnnnnnnnnnnnnnnnnnnnnnnnnnnnnnnnnnnnnnnnnnnnnnnnnnnnnnnnnnnnnnnnnnnnnnnnnnnnnnnnnnnnnnnnnnnnnnnnnnnnnnnnnnnnnnnnnnnnnnnnnnnnnnnnnnnnnnnnnnnnnnnnnnnnnnnnnnnnnnnnnnnnnnnnnnnnnnnnnnnnnnnnnnnnnnnnnnnnnnnnnnnnnnnnnnnnnnnnnnnnnnnnnnnnnnnnnnnnnnnnnnnnnnnnnnnnnnnnnnnnnnnnnnnnnnnnnnnnnnnnnnnnnnnnnnnnnnnnnnnnnnnnnnnnnnnnnnnnnnnnnnnnnnnnnnnnnnnnnnnnnnnnnnnnnnnnnnnnnnnnnnnnnnnnnnnnnnnnnnnnnnnnnnnnnnnnnnnnnnnnnnnnnnnnnnnnnnnnnnnnnnnnnnnnnnnnnnnnnnnnnnnnnnnnnnnnnnnnnnnnnnnnnnnnnnnnnnnnnnnnnnnnnnnnnnnnnnnnnnnnnnnnnnnnnnnnnnnnnnnnnnnnnnnnnnnnnnnnnnnnnnnnnnnnnnnnnnnnnnnnnnnnnnnnnnnnnnnnnnnnnnnnnnnnnnnnnnnnnnnnnnnnnnnnnnnnnnnnnnnnnnnnnnnnnnnnnnnnnnnnnnnnnnnnnnnnnnnnnnnnnnnnnnnnnnnnnnnnnnnnnnnnnnnnnnnnnnnnnnnnnnnnnnnnnnnnnnnnnnnnnnnnnnnnnnnnnnnnnnnnnnnnnnnnnnnnnnnnnnnnnnnnnnnnnnnnnnnnnnnnnnnnnnnnnnnnnnnnnnnnnnnnnnnnnnnnnnnnnnnnnnnnnnnnnnnnnnnnnnnnnnnnnnnnnnnnnnnnnnnnnnnnnnnnnnnnnnnnnnnnnnnnnnnnnnnnnnnnnnnnnnnnnnnnnnnnnnnnnnnnnnnnnnnnnnnnnnnnnnnnnnnnnnnnnnnnnnnnnnnnnnnnnnnnnnnnnnnnnnnnnnnnnnnnnnnnnnnnnnnnnnnnnnnnnnnnnnnnnnnnnnnnnnnnnnnnnnnnnnnnnnnnnnnnnnnnnnnnnnnnnnnnnnnnnnnnnnnnnnnnnnnnnnnnnnnnnnnnnnnnnnnnnnnnnnnnnnnnnnnnnnnnnnnnnnnnnnnnnnnnnnnnnnnnnnnnnnnnnnnnnnnnnnnnnnnnnnnnnnnnnnnnnnnnnnnnnnnnnnnnnnnnnnnnnnnnnnnnnnnnnnnnnnnnnnnnnnnnnnnnnnnnnnnnnnnnnnnnnnnnnnnnnnnnnnnnnnnnnnnnnnnnnnnnnnnnnnnnnnnnnnnnnnnnnnnnnnnnnnnnnnnnnnnnnnnnnnnnnnnnnnnnnnnnnnnnnnnnnnnnnnnnnnnnnnnnnnnnnnnnnnnnnnnnnnnnnnnnnnnnnnnnnnnnnnnnnnnnnnnnnnnnnnnnnnnnnnnnnnnnnnnnnnnnnnnnnnnnnnnnnnnnnnnnnnnnnnnnnnnnnnnnnnnnnnnnnnnnnnnnnnnnnnnnnnnnnnnnnnnnnnnnnnnnnnnnnnnnnnnnnnnnnnnnnnnnnnnnnnnnnnnnnnnnnnnnnnnnnnnnnnnnnnnnnnnnnnnnnnnnnnnnnnnnnnnnnnnnnnnnnnnnnnnnnnnnnnnnnnnnnnnnnnnnnnnnnnnnnnnnnnnnnnnnnnnnnnnnnnnnnnnnnnnnnnnnnnnnnnnnnnnnnnnnnnnnnnnnnnnnnnnnnnnnnnnnnnnnnnnnnnnnnnnnnnnnnnnnnnnnnnnnnnnnnnnnnnnnnnnnnnnnnnnnnnnnnnnnnnnnnnnnnnnnnnnnnnnnnnnnnnnnnnnnnnnnnnnnnnnnnnnnnnnnnnnnnnnnnnnnnnnnnnnnnnnnnnnnnnnnnnnnnnnnnnnnnnnnnnnnnnnnnnnnnnnnnnnnnnnnnnnnnnnnnnnnnnnnnnnnnnnnnnnnnnnnnnnnnnnnnnnnnnnnnnnnnnnnnnnnnnnnnnnnnnnnnnnnnnnnnnnnnnnnnnnnnnnnnnnnnnnnnnnnnnnnnnnnnnnnnnnnnnnnnnnnnnnnnnnnnnnnnnnnnnnnnnnnnnnnnnnnnnnnnnnnnnnnnnnnnnnnnnnnnnnnnnnnnnnnnnnnnnnnnnnnnnnnnnnnnnnnnnnnnnnnnnnnnnnnnnnnnnnnnnnnnnnnnnnnnnnnnnnnnnnnnnnnnnnnnnnnnnnnnnnnnnnnnnnnnnnnnnnnnnnnnnnnnnnnnnnnnnnnnnnnnnnnnnnnnnnnnnnnnnnnnnnnnnnnnnnnnnnnnnnnnnnnnnnnnnnnnnnnnnnnnnnnnnnnnnnnnnnnnnnnnnnnnnnnnnnnnnnnnnnnnnnnnnnnnnnnnnnnnnnnnnnnnnnnnnnnnnnnnnnnnnnnnnnnnnnnnnnnnnnnnnnnnnnnnnnnnnnnnnnnnnnnnnnnnnnnnnnnnnnnnnnnnnnnnnnnnnnnnnnnnnnnnnnnnnnnnnnnnnnnnnnnnnnnnnnnnnnnnnnnnnnnnnnnnnnnnnnnnnnnnnnnnnnnnnnnnnnnnnnnnnnnnnnnnnnnnnnnnnnnnnnnnnnnnnnnnnnnnnnnnnnnnnnnnnnnnnnnnnnnnnnnnnnnnnnnnnnnnnnnnnnnnnnnnnnnnnnnnnnnnnnnnnnnnnnnnnnnnnnnnnnnnnnnnnnnnnnnnnnnnnnnnnnnnnnnnnnnnnnnnnnnnnnnnnnnnnnnnnnnnnnnnnnnnnnnnnnnnnnnnnnnnnnnnnnnnnnnnnnnnnnnnnnnnnnnnnnnnnnnnnnnnnnnnnnnnnnnnnnnnnnnnnnnnnnnnnnnnnnnnnnnnnnnnnnnnnnnnnnnnnnnnnnnnnnnnnnnnnnnnnnnnnnnnnnnnnnnnnnnnnnnnnnnnnnnnnnnnnnnnnnnnnnnnnnnnnnnnnnnnnnnnnnnnnnnnnnnnnnnnnnnnnnnnnnnnnnnnnnnnnnnnnnnnnnnnnnnnnnnnnnnnnnnnnnnnnnnnnnnnnnnnnnnnnnnnnnnnnnnnnnnnnnnnnnnnnnnnnnnnnnnnnnnnnnnnnnnnnnnnnnnnnnnnnnnnnnnnnnnnnnnnnnnnnnnnnnnnnnnnnnnnnnnnnnnnnnnnnnnnnnnnnnnnnnnnnnnnnnnnnnnnnnnnnnnnnnnnnnnnnnnnnnnnnnnnnnnnnnnnnnnnnnnnnnnnnnnnnnnnnnnnnnnnnnnnnnnnnnnnnnnnnnnnnnnnnnnnnnnnnnnnnnnnnnnnnnnnnnnnnnnnnnnnnnnnnnnnnnnnnnnnnnnnnnnnnnnnnnnnnnnnnnnnnnnnnnnnnnnnnnnnnnnnnnnnnnnnnnnnnnnnnnnnnnnnnnnnnnnnnnnnnnnnnnnnnnnnnnnnnnnnnnnnnnnnnnnnnnnnnnnnnnnnnnnnnnnnnnnnnnnnnnnnnnnnnnnnnnnnnnnnnnnnnnnnnnnnnnnnnnnnnnnnnnnnnnnnnnnnnnnnnnnnnnnnnnnnnnnnnnnnnnnnnnnnnnnnnnnnnnnnnnnnnnnnnnnnnnnnnnnnnnnnnnnnnnnnnnnnnnnnnnnnnnnnnnnnnnnnnnnnnnnnnnnnnnnnnnnnnnnnnnnnnnnnnnnnnnnnnnnnnnnnnnnnnnnnnnnnnnnnnnnnnnnnnnnnnnnnnnnnnnnnnnnnnnnnnnnnnnnnnnnnnnnnnnnnnnnnnnnnnnnnnnnnnnnnnnnnnnnnnnnnnnnnnnnnnnnnnnnnnnnnnnnnnnnnnnnnnnnnnnnnnnnnnnnnnnnnnnnnnnnnnnnnnnnnnnnnnnnnnnnnnnnnnnnnnnnnnnnnnnnnnnnnnnnnnnnnnnnnnnnnnnnnnnnnnnnnnnnnnnnnnnnnnnnnnnnnnnnnnnnnnnnnnnnnnnnnnnnnnnnnnnnnnnnnnnnnnnnnnnnnnnnnnnnnnnnnnnnnnnnnnnnnnnnnnnnnnnnnnnnnnnnnnnnnnnnnnnnnnnnnnnnnnnnnnnnnnnnnnnnnnnnnnnnnnnnnnnnnnnnnnnnnnnnnnnnnnnnnnnnnnnnnnnnnnnnnnnnnnnnnnnnnnnnnnnnnnnnnnnnnnnnnnnnnnnnnnnnnnnnnnnnnnnnnnnnnnnnnnnnnnnnnnnnnnnnnnnnnnnnnnnnnnnnnnnnnnnnnnnnnnnnnnnnnnnnnnnnnnnnnnnnnnnnnnnnnnnnnnnnnnnnnnnnnnnnnnnnnnnnnnnnnnnnnnnnnnnnnnnnnnnnnnnnnnnnnnnnnnnnnnnnnnnnnnnnnnnnnnnnnnnnnnnnnnnnnnnnnnnnnnnnnnnnnnnnnnnnnnnnnnnnnnnnnnnnnnnnnnnnnnnnnnnnnnnnnnnnnnnnnnnnnnnnnnnnnnnnnnnnnnnnnnnnnnnnnnnnnnnnnnnnnnnnnnnnnnnnnnnnnnnnnnnnnnnnnnnnnnnnnnnnnnnnnnnnnnnnnnnnnnnnnnnnnnnnnnnnnnnnnnnnnnnnnnnnnnnnnnnnnnnnnnnnnnnnnnnnnnnnnnnnnnnnnnnnnnnnnnnnnnnnnnnnnnnnnnnnnnnnnnnnnnnnnnnnnnnnnnnnnnnnnnnnnnnnnnnnnnnnnnnnnnnnnnnnnnnnnnnnnnnnnnnnnnnnnnnnnnnnnnnnnnnnnnnnnnnnnnnnnnnnnnnnnnnnnnnnnnnnnnnnnnnnnnnnnnnnnnnnnnnnnnnnnnnnnnnnnnnnnnnnnnnnnnnnnnnnnnnnnnnnnnnnnnnnnnnnnnnnnnnnnnnnnnnnnnnnnnnnnnnnnnnnnnnnnnnnnnnnnnnnnnnnnnnnnnnnnnnnnnnnnnnnnnnnnnnnnnnnnnnnnnnnnnnnnnnnnnnnnnnnnnnnnnnnnnnnnnnnnnnnnnnnnnnnnnnnnnnnnnnnnnnnnnnnnnnnnnnnnnnnnnnnnnnnnnnnnnnnnnnnnnnnnnnnnnnnnnnnnnnnnnnnnnnnnnnnnnnnnnnnnnnnnnnnnnnnnnnnnnnnnnnnnnnnnnnnnnnnnnnnnnnnnnnnnnnnnnnnnnnnnnnnnnnnnnnnnnnnnnnnnnnnnnnnnnnnnnnnnnnnnnnnnnnnnnnnnnnnnnnnnnnnnnnnnnnnnnnnnnnnnnnnnnnnnnnnnnnnnnnnnnnnnnnnnnnnnnnnnnnnnnnnnnnnnnnnnnnnnnnnnnnnnnnnnnnnnnnnnnnnnnnnnnnnnnnnnnnnnnnnnnnnnnnnnnnnnnnnnnnnnnnnnnnnnnnnnnnnnnnnnnnnnnnnnnnnnnnnnnnnnnnnnnnnnnnnnnnnnnnnnnnnnnnnnnnnnnnnnnnnnnnnnnnnnnnnnnnnnnnnnnnnnnnnnnnnnnnnnnnnnnnnnnnnnnnnnnnnnnnnnnnnnnnnnnnnnnnnnnnnnnnnnnnnnnnnnnnnnnnnnnnnnnnnnnnnnnnnnnnnnnnnnnnnnnnnnnnnnnnnnnnnnnnnnnnnnnnnnnnnnnnnnnnnnnnnnnnnnnnnnnnnnnnnnnnnnnnnnnnnnnnnnnnnnnnnnnnnnnnnnnnnnnnnnnnnnnnnnnnnnnnnnnnnnnnnnnnnnnnnnnnnnnnnnnnnnnnnnnnnnnnnnnnnnnnnnnnnnnnnnnnnnnnnnnnnnnnnnnnnnnnnnnnnnnnnnnnnnnnnnnnnnnnnnnnnnnnnnnnnnnnnnnnnnnnnnnnnnnnnnnnnnnnnnnnnnnnnnnnnnnnnnnnnnnnnnnnnnnnnnnnnnnnnnnnnnnnnnnnnnnnnnnnnnnnnnnnnnnnnnnnnnnnnnnnnnnnnnnnnnnnnnnnnnnnnnnnnnnnnnnnnnnnnnnnnnnnnnnnnnnnnnnnnnnnnnnnnnnnnnnnnnnnnnnnnnnnnnnnnnnnnnnnnnnnnnnnnnnnnnnnnnnnnnnnnnnnnnnnnnnnnnnnnnnnnnnnnnnnnnnnnnnnnnnnnnnnnnnnnnnnnnnnnnnnnnnnnnnnnnnnnnnnnnnnnnnnnnnnnnnnnnnnnnnnnnnnnnnnnnnnnnnnnnnnnnnnnnnnnnnnnnnnnnnnnnnnnnnnnnnnnnnnnnnnnnnnnnnnnnnnnnnnnnnnnnnnnnnnnnnnnnnnnnnnnnnnnnnnnnnnnnnnnnnnnnnnnnnnnnnnnnnnnnnnnnnnnnnnnnnnnnnnnnnnnnnnnnnnnnnnnnnnnnnnnnnnnnnnnnnnnnnnnnnnnnnnnnnnnnnnnnnnnnnnnnnnnnnnnnnnnnnnnnnnnnnnnnnnnnnnnnnnnnnnnnnnnnnnnnnnnnnnnnnnnnnnnnnnnnnnnnnnnnnnnnnnnnnnnnnnnnnnnnnnnnnnnnnnnnnnnnnnnnnnnnnnnnnnnnnnnnnnnnnnnnnnnnnnnnnnnnnnnnnnnnnnnnnnnnnnnnnnnnnnnnnnnnnnnnnnnnnnnnnnnnnnnnnnnnnnnnnnnnnnnnnnnnnnnnnnnnnnnnnnnnnnnnnnnnnnnnnnnnnnnnnnnnnnnnnnnnnnnnnnnnnnnnnnnnnnnnnnnnnnnnnnnnnnnnnnnnnnnnnnnnnnnnnnnnnnnnnnnnnnnnnnnnnnnnnnnnnnnnnnnnnnnnnnnnnnnnnnnnnnnnnnnnnnnnnnnnnnnnnnnnnnnnnnnnnnnnnnnnnnnnnnnnnnnnnnnnnnnnnnnnnnnnnnnnnnnnnnnnnnnnnnnnnnnnnnnnnnnnnnnnnnnnnnnnnnnnnnnnnnnnnnnnnnnnnnnnnnnnnnnnnnnnnnnnnnnnnnnnnnnnnnnnnnnnnnnnnnnnnnnnnnnnnnnnnnnnnnnnnnnnnnnnnnnnnnnnnnnnnnnnnnnnnnnnnnnnnnnnnnnnnnnnnnnnnnnnnnnnnnnnnnnnnnnnnnnnnnnnnnnnnnnnnnnnnnnnnnnnnnnnnnnnnnnnnnnnnnnnnnnnnnnnnnnnnnnnnnnnnnnnnnnnnnnnnnnnnnnnnnnnnnnnnnnnnnnnnnnnnnnnnnnnnnnnnnnnnnnnnnnnnnnnnnnnnnnnnnnnnnnnnnnnnnnnnnnnnnnnnnnnnnnnnnnnnnnnnnnnnnnnnnnnnnnnnnnnnnnnnnnnnnnnnnnnnnnnnnnnnnnnnnnnnnnnnnnnnnnnnnnnnnnnnnnnnnnnnnnnnnnnnnnnnnnnnnnnnnnnnnnnnnnnnnnnnnnnnnnnnnnnnnnnnnnnnnnnnnnnnnnnnnnnnnnnnnnnnnnnnnnnnnnnnnnnnnnnnnnnnnnnnnnnnnnnnnnnnnnnnnnnnnnnnnnnnnnnnnnnnnnnnnnnnnnnnnnnnnnnnnnnnnnnnnnnnnnnnnnnnnnnnnnnnnnnnnnnnnnnnnnnnnnnnnnnnnnnnnnnnnnnnnnnnnnnnnnnnnnnnnnnnnnnnnnnnnnnnnnnnnnnnnnnnnnnnnnnnnnnnnnnnnnnnnnnnnnnnnnnnnnnnnnnnnnnnnnnnnnnnnnnnnnnnnnnnnnnnnnnnnnnnnnnnnnnnnnnnnnnnnnnnnnnnnnnnnnnnnnnnnnnnnnnnnnnnnnnnnnnnnnnnnnnnnnnnnnnnnnnnnnnnnnnnnnnnnnnnnnnnnnnnnnnnnnnnnnnnnnnnnnnnnnnnnnnnnnnnnnnnnnnnnnnnnnnnnnnnnnnnnnnnnnnnnnnnnnnnnnnnnnnnnnnnnnnnnnnnnnnnnnnnnnnnnnnnnnnnnnnnnnnnnnnnnnnnnnnnnnnnnnnnnnnnnnnnnnnnnnnnnnnnnnnnnnnnnnnnnnnnnnnnnnnnnnnnnnnnnnnnnnnnnnnnnnnnnnnnnnnnnnnnnnnnnnnnnnnnnnnnnnnnnnnnnnnnnnnnnnnnnnnnnnnnnnnnnnnnnnnnnnnnnnnnnnnnnnnnnnnnnnnnnnnnnnnnnnnnnnnnnnnnnnnnnnnnnnnnnnnnnnnnnnnnnnnnnnnnnnnnnnnnnnnnnnnnnnnnnnnnnnnnnnnnnnnnnnnnnnnnnnnnnnnnnnnnnnnnnnnnnnnnnnnnnnnnnnnnnnnnnnnnnnnnnnnnnnnnnnnnnnnnnnnnnnnnnnnnnnnnnnnnnnnnnnnnnnnnnnnnnnnnnnnnnnnnnnnnnnnnnnnnnnnnnnnnnnnnnnnnnnnnnnnnnnnnnnnnnnnnnnnnnnnnnnnnnnnnnnnnnnnnnnnnnnnnnnnnnnnnnnnnnnnnnnnnnnnnnnnnnnnnnnnnnnnnnnnnnnnnnnnnnnnnnnnnnnnnnnnnnnnnnnnnnnnnnnnnnnnnnnnnnnnnnnnnnnnnnnnnnnnnnnnnnnnnnnnnnnnnnnnnnnnnnnnnnnnnnnnnnnnnnnnnnnnnnnnnnnnnnnnnnnnnnnnnnnnnnnnnnnnnnnnnnnnnnnnnnnnnnnnnnnnnnnnnnnnnnnnnnnnnnnnnnnnnnnnnnnnnnnnnnnnnnnnnnnnnnnnnnnnnnnnnnnnnnnnnnnnnnnnnnnnnnnnnnnnnnnnnnnnnnnnnnnnnnnnnnnnnnnnnnnnnnnnnnnnnnnnnnnnnnnnnnnnnnnnnnnnnnnnnnnnnnnnnnnnnnnnnnnnnnnnnnnnnnnnnnnnnnnnnnnnnnnnnnnnnnnnnnnnnnnnnnnnnnnnnnnnnnnnnnnnnnnnnnnnnnnnnnnnnnnnnnnnnnnnnnnnnnnnnnnnnnnnnnnnnnnnnnnnnnnnnnnnnnnnnnnnnnnnnnnnnnnnnnnnnnnnnnnnnnnnnnnnnnnnnnnnnnnnnnnnnnnnnnnnnnnnnnnnnnnnnnnnnnnnnnnnnnnnnnnnnnnnnnnnnnnnnnnnnnnnnnnnnnnnnnnnnnnnnnnnnnnnnnnnnnnnnnnnnnnnnnnnnnnnnnnnnnnnnnnnnnnnnnnnnnnnnnnnnnnnnnnnnnnnnnnnnnnnnnnnnnnnnnnnnnnnnnnnnnnnnnnnnnnnnnnnnnnnnnnnnnnnnnnnnnnnnnnnnnnnnnnnnnnnnnnnnnnnnnnnnnnnnnnnnnnnnnnnnnnnnnnnnnnnnnnnnnnnnnnnnnnnnnnnnnnnnnnnnnnnnnnnnnnnnnnnnnnnnnnnnnnnnnnnnnnnnnnnnnnnnnnnnnnnnnnnnnnnnnnnnnnnnnnnnnnnnnnnnnnnnnnnnnnnnnnnnnnnnnnnnnnnnnnnnnnnnnnnnnnnnnnnnnnnnnnnnnnnnnnnnnnnnnnnnnnnnnnnnnnnnnnnnnnnnnnnnnnnnnnnnnnnnnnnnnnnnnnnnnnnnnnnnnnnnnnnnnnnnnnnnnnnnnnnnnnnnnnnnnnnnnnnnnnnnnnnnnnnnnnnnnnnnnnnnnnnnnnnnnnnnnnnnnnnnnnnnnnnnnnnnnnnnnnnnnnnnnnnnnnnnnnnnnnnnnnnnnnnnnnnnnnnnnnnnnnnnnnnnnnnnnnnnnnnnnnnnnnnnnnnnnnnnnnnnnnnnnnnnnnnnnnnnnnnnnnnnnnnnnnnnnnnnnnnnnnnnnnnnnnnnnnnnnnnnnnnnnnnnnnnnnnnnnnnnnnnnnnnnnnnnnnnnnnnnnnnnnnnnnnnnnnnnnnnnnnnnnnnnnnnnnnnnnnnnnnnnnnnnnnnnnnnnnnnnnnnnnnnnnnnnnnnnnnnnnnnnnnnnnnnnnnnnnnnnnnnnnnnnnnnnnnnnnnnnnnnnnnnnnnnnnnnnnnnnnnnnnnnnnnnnnnnnnnnnnnnnnnnnnnnnnnnnnnnnnnnnnnnnnnnnnnnnnnnnnnnnnnnnnnnnnnnnnnnnnnnnnnnnnnnnnnnnnnnnnnnnnnnnnnnnnnnnnnnnnnnnnnnnnnnnnnnnnnnnnnnnnnnnnnnnnnnnnnnnnnnnnnnnnnnnnnnnnnnnnnnnnnnnnnnnnnnnnnnnnnnnnnnnnnnnnnnnnnnnnnnnnnnnnnnnnnnnnnnnnnnnnnnnnnnnnnnnnnnnnnnnnnnnnnnnnnnnnnnnnnnnnnnnnnnnnnnnnnnnnnnnnnnnnnnnnnnnnnnnnnnnnnnnnnnnnnnnnnnnnnnnnnnnnnnnnnnnnnnnnnnnnnnnnnnnnnnnnnnnnnnnnnnnnnnnnnnnnnnnnnnnnnnnnnnnnnnnnnnnnnnnnnnnnnnnnnnnnnnnnnnnnnnnnnnnnnnnnnnnnnnnnnnnnnnnnnnnnnnnnnnnnnnnnnnnnnnnnnnnnnnnnnnnnnnnnnnnnnnnnnnnnnnnnnnnnnnnnnnnnnnnnnnnnnnnnnnnnnnnnnnnnnnnnnnnnnnnnnnnnnnnnnnnnnnnnnnnnnnnnnnnnnnnnnnnnnnnnnnnnnnnnnnnnnnnnnnnnnnnnnnnnnnnnnnnnnnnnnnnnnnnnnnnnnnnnnnnnnnnnnnnnnnnnnnnnnnnnnnnnnnnnnnnnnnnnnnnnnnnnnnnnnnnnnnnnnnnnnnnnnnnnnnnnnnnnnnnnnnnnnnnnnnnnnnnnnnnnnnnnnnnnnnnnnnnnnnnnnnnnnnnnnnnnnnnnnnnnnnnnnnnnnnnnnnnnnnnnnnnnnnnnnnnnnnnnnnnnnnnnnnnnnnnnnnnnnnnnnnnnnnnnnnnnnnnnnnnnnnnnnnnnnnnnnnnnnnnnnnnnnnnnnnnnnnnnnnnnnnnnnnnnnnnnnnnnnnnnnnnnnnnnnnnnnnnnnnnnnnnnnnnnnnnnnnnnnnnnnnnnnnnnnnnnnnnnnnnnnnnnnnnnnnnnnnnnnnnnnnnnnnnnnnnnnnnnnnnnnnnnnnnnnnnnnnnnnnnnnnnnnnnnnnnnnnnnnnnnnnnnnnnnnnnnnnnnnnnnnnnnnnnnnnnnnnnnnnnnnnnnnnnnnnnnnnnnnnnnnnnnnnnnnnnnnnnnnnnnnnnnnnnnnnnnnnnnnnnnnnnnnnnnnnnnnnnnnnnnnnnnnnnnnnnnnnnnnnnnnnnnnnnnnnnnnnnnnnnnnnnnnnnnnnnnnnnnnnnnnnnnnnnnnnnnnnnnnnnnnnnnnnnnnnnnnnnnnnnnnnnnnnnnnnnnnnnnnnnnnnnnnnnnnnnnnnnnnnnnnnnnnnnnnnnnnnnnnnnnnnnnnnnnnnnnnnnnnnnnnnnnnnnnnnnnnnnnnnnnnnnnnnnnnnnnnnnnnnnnnnnnnnnnnnnnnnnnnnnnnnnnnnnnnnnnnnnnnnnnnnnnnnnnnnnnnnnnnnnnnnnnnnnnnnnnnnnnnnnnnnnnnnnnnnnnnnnnnnnnnnnnnnnnnnnnnnnnnnnnnnnnnnnnnnnnnnnnnnnnnnnnnnnnnnnnnnnnnnnnnnnnnnnnnnnnnnnnnnnnnnnnnnnnnnnnnnnnnnnnnnnnnnnnnnnnnnnnnnnnnnnnnnnnnnnnnnnnnnnnnnnnnnnnnnnnnnnnnnnnnnnnnnnnnnnnnnnnnnnnnnnnnnnnnnnnnnnnnnnnnnnnnnnnnnnnnnnnnnnnnnnnnnnnnnnnnnnnnnnnnnnnnnnnnnnnnnnnnnnnnnnnnnnnnnnnnnnnnnnnnnnnnnnnnnnnnnnnnnnnnnnnnnnnnnnnnnnnnnnnnnnnnnnnnnnnnnnnnnnnnnnnnnnnnnnnnnnnnnnnnnnnnnnnnnnnnnnnnnnnnnnnnnnnnnnnnnnnnnnnnnnnnnnnnnnnnnnnnnnnnnnnnnnnnnnnnnnnnnnnnnnnnnnnnnnnnnnnnnnnnnnnnnnnnnnnnnnnnnnnnnnnnnnnnnnnnnnnnnnnnnnnnnnnnnnnnnnnnnnnnnnnnnnnnnnnnnnnnnnnnnnnnnnnnnnnnnnnnnnnnnnnnnnnnnnnnnnnnnnnnnnnnnnnnnnnnnnnnnnnnnnnnnnnnnnnnnnnnnnnnnnnnnnnnnnnnnnnnnnnnnnnnnnnnnnnnnnnnnnnnnnnnnnnnnnnnnnnnnnnnnnnnnnnnnnnnnnnnnnnnnnnnnnnnnnnnnnnnnnnnnnnnnnnnnnnnnnnnnnnnnnnnnnnnnnnnnnnnnnnnnnnnnnnnnnnnnnnnnnnnnnnnnnnnnnnnnnnnnnnnnnnnnnnnnnnnnnnnnnnnnnnnnnnnnnnnnnnnnnnnnnnnnnnnnnnnnnnnnnnnnnnnnnnnnnnnnnnnnnnnnnnnnnnnnnnnnnnnnnnnnnnnnnnnnnnnnnnnnnnnnnnnnnnnnnnnnnnnnnnnnnnnnnnnnnnnnnnnnnnnnnnnnnnnnnnnnnnnnnnnnnnnnnnnnnnnnnnnnnnnnnnnnnnnnnnnnnnnnnnnnnnnnnnnnnnnnnnnnnnnnnnnnnnnnnnnnnnnnnnnnnnnnnnnnnnnnnnnnnnnnnnnnnnnnnnnnnnnnnnnnnnnnnnnnnnnnnnnnnnnnnnnnnnnnnnnnnnnnnnnnnnnnnnnnnnnnnnnnnnnnnnnnnnnnnnnnnnnnnnnnnnnnnnnnnnnnnnnnnnnnnnnnnnnnnnnnnnnnnnnnnnnnnnnnnnnnnnnnnnnnnnnnnnnnnnnnnnnnnnnnnnnnnnnnnnnnnnnnnnnnnnnnnnnnnnnnnnnnnnnnnnnnnnnnnnnnnnnnnnnnnnnnnnnnnnnnnnnnnnnnnnnnnnnnnnnnnnnnnnnnnnnnnnnnnnnnnnnnnnnnnnnnnnnnnnnnnnnnnnnnnnnnnnnnnnnnnnnnnnnnnnnnnnnnnnnnnnnnnnnnnnnnnnnnnnnnnnnnnnnnnnnnnnnnnnnnnnnnnnnnnnnnnnnnnnnnnnnnnnnnnnnnnnnnnnnnnnnnnnnnnnnnnnnnnnnnnnnnnnnnnnnnnnnnnnnnnnnnnnnnnnnnnnnnnnnnnnnnnnnnnnnnnnnnnnnnnnnnnnnnnnnnnnnnnnnnnnnnnnnnnnnnnnnnnnnnnnnnnnnnnnnnnnnnnnnnnnnnnnnnnnnnnnnnnnnnnnnnnnnnnnnnnnnnnnnnnnnnnnnnnnnnnnnnnnnnnnnnnnnnnnnnnnnnnnnnnnnnnnnnnnnnnnnnnnnnnnnnnnnnnnnnnnnnnnnnnnnnnnnnnnnnnnnnnnnnnnnnnnnnnnnnnnnnnnnnnnnnnnnnnnnnnnnnnnnnnnnnnnnnnnnnnnnnnnnnnnnnnnnnnnnnnnnnnnnnnnnnnnnnnnnnnnnnnnnnnnnnnnnnnnnnnnnnnnnnnnnnnnnnnnnnnnnnnnnnnnnnnnnnnnnnnnnnnnnnnnnnnnnnnnnnnnnnnnnnnnnnnnnnnnnnnnnnnnnnnnnnnnnnnnnnnnnnnnnnnnnnnnnnnnnnnnnnnnnnnnnnnnnnnnnnnnnnnnnnnnnnnnnnnnnnnnnnnnnnnnnnnnnnnnnnnnnnnnnnnnnnnnnnnnnnnnnnnnnnnnnnnnnnnnnnnnnnnnnnnnnnnnnnnnnnnnnnnnnnnnnnnnnnnnnnnnnnnnnnnnnnnnnnnnnnnnnnnnnnnnnnnnnnnnnnnnnnnnnnnnnnnnnnnnnnnnnnnnnnnnnnnnnnnnnnnnnnnnnnnnnnnnnnnnnnnnnnnnnnnnnnnnnnnnnnnnnnnnnnnnnnnnnnnnnnnnnnnnnnnnnnnnnnnnnnnnnnnnnnnnnnnnnnnnnnnnnnnnnnnnnnnnnnnnnnnnnnnnnnnnnnnnnnnnnnnnnnnnnnnnnnnnnnnnnnnnnnnnnnnnnnnnnnnnnnnnnnnnnnnnnnnnnnnnnnnnnnnnnnnnnnnnnnnnnnnnnnnnnnnnnnnnnnnnnnnnnnnnnnnnnnnnnnnnnnnnnnnnnnnnnnnnnnnnnnnnnnnnnnnnnnnnnnnnnnnnnnnnnnnnnnnnnnnnnnnnnnnnnnnnnnnnnnnnnnnnnnnnnnnnnnnnnnnnnnnnnnnnnnnnnnnnnnnnnnnnnnnnnnnnnnnnnnnnnnnnnnnnnnnnnnnnnnnnnnnnnnnnnnnnnnnnnnnnnnnnnnnnnnnnnnnnnnnnnnnnnnnnnnnnnnnnnnnnnnnnnnnnnnnnnnnnnnnnnnnnnnnnnnnnnnnnnnnnnnnnnnnnnnnnnnnnnnnnnnnnnnnnnnnnnnnnnnnnnnnnnnnnnnnnnnnnnnnnnnnnnnnnnnnnnnnnnnnnnnnnnnnnnnnnnnnnnnnnnnnnnnnnnnnnnnnnnnnnnnnnnnnnnnnnnnnnnnnnnnnnnnnnnnnnnnnnnnnnnnnnnnnnnnnnnnnnnnnnnnnnnnnnnnnnnnnnnnnnnnnnnnnnnnnnnnnnnnnnnnnnnnnnnnnnnnnnnnnnnnnnnnnnnnnnnnnnnnnnnnnnnnnnnnnnnnnnnnnnnnnnnnnnnnnnnnnnnnnnnnnnnnnnnnnnnnnnnnnnnnnnnnnnnnnnnnnnnnnnnnnnnnnnnnnnnnnnnnnnnnnnnnnnnnnnnnnnnnnnnnnnnnnnnnnnnnnnnnnnnnnnnnnnnnnnnnnnnnnnnnnnnnnnnnnnnnnnnnnnnnnnnnnnnnnnnnnnnnnnnnnnnnnnnnnnnnnnnnnnnnnnnnnnnnnnnnnnnnnnnnnnnnnnnnnnnnnnnnnnnnnnnnnnnnnnnnnnnnnnnnnnnnnnnnnnnnnnnnnnnnnnnnnnnnnnnnnnnnnnnnnnnnnnnnnnnnnnnnnnnnnnnnnnnnnnnnnnnnnnnnnnnnnnnnnnnnnnnnnnnnnnnnnnnnnnnnnnnnnnnnnnnnnnnnnnnnnnnnnnnnnnnnnnnnnnnnnnnnnnnnnnnnnnnnnnnnnnnnnnnnnnnnnnnnnnnnnnnnnnnnnnnnnnnnnnnnnnnnnnnnnnnnnnnnnnnnnnnnnnnnnnnnnnnnnnnnnnnnnnnnnnnnnnnnnnnnnnnnnnnnnnnnnnnnnnnnnnnnnnnnnnnnnnnnnnnnnnnnnnnnnnnnnnnnnnnnnnnnnnnnnnnnnnnnnnnnnnnnnnnnnnnnnnnnnnnnnnnnnnnnnnnnnnnnnnnnnnnnnnnnnnnnnnnnnnnnnnnnnnnnnnnnnnnnnnnnnnnnnnnnnnnnnnnnnnnnnnnnnnnnnnnnnnnnnnnnnnnnnnnnnnnnnnnnnnnnnnnnnnnnnnnnnnnnnnnnnnnnnnnnnnnnnnnnnnnnnnnnnnnnnnnnnnnnnnnnnnnnnnnnnnnnnnnnnnnnnnnnnnnnnnnnnnnnnnnnnnnnnnnnnnnnnnnnnnnnnnnnnnnnnnnnnnnnnnnnnnnnnnnnnnnnnnnnnnnnnnnnnnnnnnnnnnnnnnnnnnnnnnnnnnnnnnnnnnnnnnnnnnnnnnnnnnnnnnnnnnnnnnnnnnnnnnnnnnnnnnnnnnnnnnnnnnnnnnnnnnnnnnnnnnnnnnnnnnnnnnnnnnnnnnnnnnnnnnnnnnnnnnnnnnnnnnnnnnnnnnnnnnnnnnnnnnnnnnnnnnnnnnnnnnnnnnnnnnnnnnnnnnnnnnnnnnnnnnnnnnnnnnnnnnnnnnnnnnnnnnnnnnnnnnnnnnnnnnnnnnnnnnnnnnnnnnnnnnnnnnnnnnnnnnnnnnnnnnnnnnnnnnnnnnnnnnnnnnnnnnnnnnnnnnnnnnnnnnnnnnnnnnnnnnnnnnnnnnnnnnnnnnnnnnnnnnnnnnnnnnnnnnnnnnnnnnnnnnnnnnnnnnnnnnnnnnnnnnnnnnnnnnnnnnnnnnnnnnnnnnnnnnnnnnnnnnnnnnnnnnnnnnnnnnnnnnnnnnnnnnnnnnnnnnnnnnnnnnnnnnnnnnnnnnnnnnnnnnnnnnnnnnnnnnnnnnnnnnnnnnnnnnnnnnnnnnnnnnnnnnnnnnnnnnnnnnnnnnnnnnnnnnnnnnnnnnnnnnnnnnnnnnnnnnnnnnnnnnnnnnnnnnnnnnnnnnnnnnnnnnnnnnnnnnnnnnnnnnnnnnnnnnnnnnnnnnnnnnnnnnnnnnnnnnnnnnnnnnnnnnnnnnnnnnnnnnnnnnnnnnnnnnnnnnnnnnnnnnnnnnnnnnnnnnnnnnnnnnnnnnnnnnnnnnnnnnnnnnnnnnnnnnnnnnnnnnnnnnnnnnnnnnnnnnnnnnnnnnnnnnnnnnnnnnnnnnnnnnnnnnnnnnnnnnnnnnnnnnnnnnnnnnnnnnnnnnnnnnnnnnnnnnnnnnnnnnnnnnnnnnnnnnnnnnnnnnnnnnnnnnnnnnnnnnnnnnnnnnnnnnnnnnnnnnnnnnnnnnnnnnnnnnnnnnnnnnnnnnnnnnnnnnnnnnnnnnnnnnnnnnnnnnnnnnnnnnnnnnnnnnnnnnnnnnnnnnnnnnnnnnnnnnnnnnnnnnnnnnnnnnnnnnnnnnnnnnnnnnnnnnnnnnnnnnnnnnnnnnnnnnnnnnnnnnnnnnnnnnnnnnnnnnnnnnnnnnnnnnnnnnnnnnnnnnnnnnnnnnnnnnnnnnnnnnnnnnnnnnnnnnnnnnnnnnnnnnnnnnnnnnnnnnnnnnnnnnnnnnnnnnnnnnnnnnnnnnnnnnnnnnnnnnnnnnnnnnnnnnnnnnnnnnnnnnnnnnnnnnnnnnnnnnnnnnnnnnnnnnnnnnnnnnnnnnnnnnnnnnnnnnnnnnnnnnnnnnnnnnnnnnnnnnnnnnnnnnnnnnnnnnnnnnnnnnnnnnnnnnnnnnnnnnnnnnnnnnnnnnnnnnnnnnnnnnnnnnnnnnnnnnnnnnnnnnnnnnnnnnnnnnnnnnnnnnnnnnnnnnnnnnnnnnnnnnnnnnnnnnnnnnnnnnnnnnnnnnnnnnnnnnnnnnnnnnnnnnnnnnnnnnnnnnnnnnnnnnnnnnnnnnnnnnnnnnnnnnnnnnnnnnnnnnnnnnnnnnnnnnnnnnnnnnnnnnnnnnnnnnnnnnnnnnnnnnnnnnnnnnnnnnnnnnnnnnnnnnnnnnnnnnnnnnnnnnnnnnnnnnnnnnnnnnnnnnnnnnnnnnnnnnnnnnnnnnnnnnnnnnnnnnnnnnnnnnnnnnnnnnnnnnnnnnnnnnnnnnnnnnnnnnnnnnnnnnnnnnnnnnnnnnnnnnnnnnnnnnnnnnnnnnnnnnnnnnnnnnnnnnnnnnnnnnnnnnnnnnnnnnnnnnnnnnnnnnnnnnnnnnnnnnnnnnnnnnnnnnnnnnnnnnnnnnnnnnnnnnnnnnnnnnnnnnnnnnnnnnnnnnnnnnnnnnnnnnnnnnnnnnnnnnnnnnnnnnnnnnnnnnnnnnnnnnnnnnnnnnnnnnnnnnnnnnnnnnnnnnnnnnnnnnnnnnnnnnnnnnnnnnnnnnnnnnnnnnnnnnnnnnnnnnnnnnnnnnnnnnnnnnnnnnnnnnnnnnnnnnnnnnnnnnnnnnnnnnnnnnnnnnnnnnnnnnnnnnnnnnnnnnnnnnnnnnnnnnnnnnnnnnnnnnnnnnnnnnnnnnnnnnnnnnnnnnnnnnnnnnnnnnnnnnnnnnnnnnnnnnnnnnnnnnnnnnnnnnnnnnnnnnnnnnnnnnnnnnnnnnnnnnnnnnnnnnnnnnnnnnnnnnnnnnnnnnnnnnnnnnnnnnnnnnnnnnnnnnnnnnnnnnnnnnnnnnnnnnnnnnnnnnnnnnnnnnnnnnnnnnnnnnnnnnnnnnnnnnnnnnnnnnnnnnnnnnnnnnnnnnnnnnnnnnnnnnnnnnnnnnnnnnnnnnnnnnnnnnnnnnnnnnnnnnnnnnnnnnnnnnnnnnnnnnnnnnnnnnnnnnnnnnnnnnnnnnnnnnnnnnnnnnnnnnnnnnnnnnnnnnnnnnnnnnnnnnnnnnnnnnnnnnnnnnnnnnnnnnnnnnnnnnnnnnnnnnnnnnnnnnnnnnnnnnnnnnnnnnnnnnnnnnnnnnnnnnnnnnnnnnnnnnnnnnnnnnnnnnnnnnnnnnnnnnnnnnnnnnnnnnnnnnnnnnnnnnnnnnnnnnnnnnnnnnnnnnnnnnnnnnnnnnnnnnnnnnnnnnnnnnnnnnnnnnnnnnnnnnnnnnnnnnnnnnnnnnnnnnnnnnnnnnnnnnnnnnnnnnnnnnnnnnnnnnnnnnnnnnnnnnnnnnnnnnnnnnnnnnnnnnnnnnnnnnnnnnnnnnnnnnnnnnnnnnnnnnnnnnnnnnnnnnnnnnnnnnnnnnnnnnnnnnnnnnnnnnnnnnnnnnnnnnnnnnnnnnnnnnnnnnnnnnnnnnnnnnnnnnnnnnnnnnnnnnnnnnnnnnnnnnnnnnnnnnnnnnnnnnnnnnnnnnnnnnnnnnnnnnnnnnnnnnnnnnnnnnnnnnnnnnnnnnnnnnnnnnnnnnnnnnnnnnnnnnnnnnnnnnnnnnnnnnnnnnnnnnnnnnnnnnnnnnnnnnnnnnnnnnnnnnnnnnnnnnnnnnnnnnnnnnnnnnnnnnnnnnnnnnnnnnnnnnnnnnnnnnnnnnnnnnnnnnnnnnnnnnnnnnnnnnnnnnnnnnnnnnnnnnnnnnnnnnnnnnnnnnnnnnnnnnnnnnnnnnnnnnnnnnnnnnnnnnnnnnnnnnnnnnnnnnnnnnnnnnnnnnnnnnnnnnnnnnnnnnnnnnnnnnnnnnnnnnnnnnnnnnnnnnnnnnnnnnnnnnnnnnnnnnnnnnnnnnnnnnnnnnnnnnnnnnnnnnnnnnnnnnnnnnnnnnnnnnnnnnnnnnnnnnnnnnnnnnnnnnnnnnnnnnnnnnnnnnnnnnnnnnnnnnnnnnnnnnnnnnnnnnnnnnnnnnnnnnnnnnnnnnnnnnnnnnnnnnnnnnnnnnnnnnnnnnnnnnnnnnnnnnnnnnnnnnnnnnnnnnnnnnnnnnnnnnnnnnnnnnnnnnnnnnnnnnnnnnnnnnnnnnnnnnnnnnnnnnnnnnnnnnnnnnnnnnnnnnnnnnnnnnnnnnnnnnnnnnnnnnnnnnnnnnnnnnnnnnnnnnnnnnnnnnnnnnnnnnnnnnnnnnnnnnnnnnnnnnnnnnnnnnnnnnnnnnnnnnnnnnnnnnnnnnnnnnnnnnnnnnnnnnnnnnnnnnnnnnnnnnnnnnnnnnnnnnnnnnnnnnnnnnnnnnnnnnnnnnnnnnnnnnnnnnnnnnnnnnnnnnnnnnnnnnnnnnnnnnnnnnnnnnnnnnnnnnnnnnnnnnnnnnnnnnnnnnnnnnnnnnnnnnnnnnnnnnnnnnnnnnnnnnnnnnnnnnnnnnnnnnnnnnnnnnnnnnnnnnnnnnnnnnnnnnnnnnnnnnnnnnnnnnnnnnnnnnnnnnnnnnnnnnnnnnnnnnnnnnnnnnnnnnnnnnnnnnnnnnnnnnnnnnnnnnnnnnnnnnnnnnnnnnnnnnnnnnnnnnnnnnnnnnnnnnnnnnnnnnnnnnnnnnnnnnnnnnnnnnnnnnnnnnnnnnnnnnnnnnnnnnnnnnnnnnnnnnnnnnnnnnnnnnnnnnnnnnnnnnnnnnnnnnnnnnnnnnnnnnnnnnnnnnnnnnnnnnnnnnnnnnnnnnnnnnnnnnnnnnnnnnnnnnnnnnnnnnnnnnnnnnnnnnnnnnnnnnnnnnnnnnnnnnnnnnnnnnnnnnnnnnnnnnnnnnnnnnnnnnnnnnnnnnnnnnnnnnnnnnnnnnnnnnnnnnnnnnnnnnnnnnnnnnnnnnnnnnnnnnnnnnnnnnnnnnnnnnnnnnnnnnnnnnnnnnnnnnnnnnnnnnnnnnnnnnnnnnnnnnnnnnnnnnnnnnnnnnnnnnnnnnnnnnnnnnnnnnnnnnnnnnnnnnnnnnnnnnnnnnnnnnnnnnnnnnnnnnnnnnnnnnnnnnnnnnnnnnnnnnnnnnnnnnnnnnnnnnnnnnnnnnnnnnnnnnnnnnnnnnnnnnnnnnnnnnnnnnnnnnnnnnnnnnnnnnnnnnnnnnnnnnnnnnnnnnnnnnnnnnnnnnnnnnnnnnnnnnnnnnnnnnnnnnnnnnnnnnnnnnnnnnnnnnnnnnnnnnnnnnnnnnnnnnnnnnnnnnnnnnnnnnnnnnnnnnnnnnnnnnnnnnnnnnnnnnnnnnnnnnnnnnnnnnnnnnnnnnnnnnnnnnnnnnnnnnnnnnnnnnnnnnnnnnnnnnnnnnnnnnnnnnnnnnnnnnnnnnnnnnnnnnnnnnnnnnnnnnnnnnnnnnnnnnnnnnnnnnnnnnnnnnnnnnnnnnnnnnnnnnnnnnnnnnnnnnnnnnnnnnnnnnnnnnnnnnnnnnnnnnnnnnnnnnnnnnnnnnnnnnnnnnnnnnnnnnnnnnnnnnnnnnnnnnnnnnnnnnnnnnnnnnnnnnnnnnnnnnnnnnnnnnnnnnnnnnnnnnnnnnnnnnnnnnnnnnnnnnnnnnnnnnnnnnnnnnnnnnnnnnnnnnnnnnnnnnnnnnnnnnnnnnnnnnnnnnnnnnnnnnnnnnnnnnnnnnnnnnnnnnnnnnnnnnnnnnnnnnnnnnnnnnnnnnnnnnnnnnnnnnnnnnnnnnnnnnnnnnnnnnnnnnnnnnnnnnnnnnnnnnnnnnnnnnnnnnnnnnnnnnnnnnnnnnnnnnnnnnnnnnnnnnnnnnnnnnnnnnnnnnnnnnnnnnnnnnnnnnnnnnnnnnnnnnnnnnnnnnnnnnnnnnnnnnnnnnnnnnnnnnnnnnnnnnnnnnnnnnnnnnnnnnnnnnnnnnnnnnnnnnnnnnnnnnnnnnnnnnnnnnnnnnnnnnnnnnnnnnnnnnnnnnnnnnnnnnnnnnnnnnnnnnnnnnnnnnnnnnnnnnnnnnnnnnnnnnnnnnnnnnnnnnnnnnnnnnnnnnnnnnnnnnnnnnnnnnnnnnnnnnnnnnnnnnnnnnnnnnnnnnnnnnnnnnnnnnnnnnnnnnnnnnnnnnnnnnnnnnnnnnnnnnnnnnnnnnnnnnnnnnnnnnnnnnnnnnnnnnnnnnnnnnnnnnnnnnnnnnnnnnnnnnnnnnnnnnnnnnnnnnnnnnnnnnnnnnnnnnnnnnnnnnnnnnnnnnnnnnnnnnnnnnnnnnnnnnnnnnnnnnnnnnnnnnnnnnnnnnnnnnnnnnnnnnnnnnnnnnnnnnnnnnnnnnnnnnnnnnnnnnnnnnnnnnnnnnnnnnnnnnnnnnnnnnnnnnnnnnnnnnnnnnnnnnnnnnnnnnnnnnnnnnnnnnnnnnnnnnnnnnnnnnnnnnnnnnnnnnnnnnnnnnnnnnnnnnnnnnnnnnnnnnnnnnnnnnnnnnnnnnnnnnnnnnnnnnnnnnnnnnnnnnnnnnnnnnnnnnnnnnnnnnnnnnnnnnnnnnnnnnnnnnnnnnnnnnnnnnnnnnnnnnnnnnnnnnnnnnnnnnnnnnnnnnnnnnnnnnnnnnnnnnnnnnnnnnnnnnnnnnnnnnnnnnnnnnnnnnnnnnnnnnnnnnnnnnnnnnnnnnnnnnnnnnnnnnnnnnnnnnnnnnnnnnnnnnnnnnnnnnnnnnnnnnnnnnnnnnnnnnnnnnnnnnnnnnnnnnnnnnnnnnnnnnnnnnnnnnnnnnnnnnnnnnnnnnnnnnnnnnnnnnnnnnnnnnnnnnnnnnnnnnnnnnnnnnnnnnnnnnnnnnnnnnnnnnnnnnnnnnnnnnnnnnnnnnnnnnnnnnnnnnnnnnnnnnnnnnnnnnnnnnnnnnnnnnnnnnnnnnnnnnnnnnnnnnnnnnnnnnnnnnnnnnnnnnnnnnnnnnnnnnnnnnnnnnnnnnnnnnnnnnnnnnnnnnnnnnnnnnnnnnnnnnnnnnnnnnnnnnnnnnnnnnnnnnnnnnnnnnnnnnnnnnnnnnnnnnnnnnnnnnnnnnnnnnnnnnnnnnnnnnnnnnnnnnnnnnnnnnnnnnnnnnnnnnnnnnnnnnnnnnnnnnnnnnnnnnnnnnnnnnnnnnnnnnnnnnnnnnnnnnnnnnnnnnnnnnnnnnnnnnnnnnnnnnnnnnnnnnnnnnnnnnnnnnnnnnnnnnnnnnnnnnnnnnnnnnnnnnnnnnnnnnnnnnnnnnnnnnnnnnnnnnnnnnnnnnnnnnnnnnnnnnnnnnnnnnnnnnnnnnnnnnnnnnnnnnnnnnnnnnnnnnnnnnnnnnnnnnnnnnnnnnnnnnnnnnnnnnnnnnnnnnnnnnnnnnnnnnnnnnnnnnnnnnnnnnnnnnnnnnnnnnnnnnnnnnnnnnnnnnnnnnnnnnnnnnnnnnnnnnnnnnnnnnnnnnnnnnnnnnnnnnnnnnnnnnnnnnnnnnnnnnnnnnnnnnnnnnnnnnnnnnnnnnnnnnnnnnnnnnnnnnnnnnnnnnnnnnnnnnnnnnnnnnnnnnnnnnnnnnnnnnnnnnnnnnnnnnnnnnnnnnnnnnnnnnnnnnnnnnnnnnnnnnnnnnnnnnnnnnnnnnnnnnnnnnnnnnnnnnnnnnnnnnnnnnnnnnnnnnnnnnnnnnnnnnnnnnnnnnnnnnnnnnnnnnnnnnnnnnnnnnnnnnnnnnnnnnnnnnnnnnnnnnnnnnnnnnnnnnnnnnnnnnnnnnnnnnnnnnnnnnnnnnnnnnnnnnnnnnnnnnnnnnnnnnnnnnnnnnnnnnnnnnnnnnnnnnnnnnnnnnnnnnnnnnnnnnnnnnnnnnnnnnnnnnnnnnnnnnnnnnnnnnnnnnnnnnnnnnnnnnnnnnnnnnnnnnnnnnnnnnnnnnnnnnnnnnnnnnnnnnnnnnnnnnnnnnnnnnnnnnnnnnnnnnnnnnnnnnnnnnnnnnnnnnnnnnnnnnnnnnnnnnnnnnnnnnnnnnnnnnnnnnnnnnnnnnnnnnnnnnnnnnnnnnnnnnnnnnnnnnnnnnnnnnnnnnnnnnnnnnnnnnnnnnnnnnnnnnnnnnnnnnnnnnnnnnnnnnnnnnnnnnnnnnnnnnnnnnnnnnnnnnnnnnnnnnnnnnnnnnnnnnnnnnnnnnnnnnnnnnnnnnnnnnnnnnnnnnnnnnnnnnnnnnnnnnnnnnnnnnnnnnnnnnnnnnnnnnnnnnnnnnnnnnnnnnnnnnnnnnnnnnnnnnnnnnnnnnnnnnnnnnnnnnnnnnnnnnnnnnnnnnnnnnnnnnnnnnnnnnnnnnnnnnnnnnnnnnnnnnnnnnnnnnnnnnnnnnnnnnnnnnnnnnnnnnnnnnnnnnnnnnnnnnnnnnnnnnnnnnnnnnnnnnnnnnnnnnnnnnnnnnnnnnnnnnnnnnnnnnnnnnnnnnnnnnnnnnnnnnnnnnnnnnnnnnnnnnnnnnnnnnnnnnnnnnnnnnnnnnnnnnnnnnnnnnnnnnnnnnnnnnnnnnnnnnnnnnnnnnnnnnnnnnnnnnnnnnnnnnnnnnnnnnnnnnnnnnnnnnnnnnnnnnnnnnnnnnnnnnnnnnnnnnnnnnnnnnnnnnnnnnnnnnnnnnnnnnnnnnnnnnnnnnnnnnnnnnnnnnnnnnnnnnnnnnnnnnnnnnnnnnnnnnnnnnnnnnnnnnnnnnnnnnnnnnnnnnnnnnnnnnnnnnnnnnnnnnnnnnnnnnnnnnnnnnnnnnnnnnnnnnnnnnnnnnnnnnnnnnnnnnnnnnnnnnnnnnnnnnnnnnnnnnnnnnnnnnnnnnnnnnnnnnnnnnnnnnnnnnnnnnnnnnnnnnnnnnnnnnnnnnnnnnnnnnnnnnnnnnnnnnnnnnnnnnnnnnnnnnnnnnnnnnnnnnnnnnnnnnnnnnnnnnnnnnnnnnnnnnnnnnnnnnnnnnnnnnnnnnnnnnnnnnnnnnnnnnnnnnnnnnnnnnnnnnnnnnnnnnnnnnnnnnnnnnnnnnnnnnnnnnnnnnnnnnnnnnnnnnnnnnnnnnnnnnnnnnnnnnnnnnnnnnnnnnnnnnnnnnnnnnnnnnnnnnnnnnnnnnnnnnnnnnnnnnnnnnnnnnnnnnnnnnnnnnnnnnnnnnnnnnnnnnnnnnnnnnnnnnnnnnnnnnnnnnnnnnnnnnnnnnnnnnnnnnnnnnnnnnnnnnnnnnnnnnnnnnnnnnnnnnnnnnnnnnnnnnnnnnnnnnnnnnnnnnnnnnnnnnnnnnnnnnnnnnnnnnnnnnnnnnnnnnnnnnnnnnnnnnnnnnnnnnnnnnnnnnnnnnnnnnnnnnnnnnnnnnnnnnnnnnnnnnnnnnnnnnnnnnnnnnnnnnnnnnnnnnnnnnnnnnnnnnnnnnnnnnnnnnnnnnnnnnnnnnnnnnnnnnnnnnnnnnnnnnnnnnnnnnnnnnnnnnnnnnnnnnnnnnnnnnnnnnnnnnnnnnnnnnnnnnnnnnnnnnnnnnnnnnnnnnnnnnnnnnnnnnnnnnnnnnnnnnnnnnnnnnnnnnnnnnnnnnnnnnnnnnnnnnnnnnnnnnnnnnnnnnnnnnnnnnnnnnnnnnnnnnnnnnnnnnnnnnnnnnnnnnnnnnnnnnnnnnnnnnnnnnnnnnnnnnnnnnnnnnnnnnnnnnnnnnnnnnnnnnnnnnnnnnnnnnnnnnnnnnnnnnnnnnnnnnnnnnnnnnnnnnnnnnnnnnnnnnnnnnnnnnnnnnnnnnnnnnnnnnnnnnnnnnnnnnnnnnnnnnnnnnnnnnnnnnnnnnnnnnnnnnnnnnnnnnnnnnnnnnnnnnnnnnnnnnnnnnnnnnnnnnnnnnnnnnnnnnnnnnnnnnnnnnnnnnnnnnnnnnnnnnnnnnnnnnnnnnnnnnnnnnnnnnnnnnnnnnnnnnnnnnnnnnnnnnnnnnnnnnnnnnnnnnnnnnnnnnnnnnnnnnnnnnnnnnnnnnnnnnnnnnnnnnnnnnnnnnnnnnnnnnnnnnnnnnnnnnnnnnnnnnnnnnnnnnnnnnnnnnnnnnnnnnnnnnnnnnnnnnnnnnnnnnnnnnnnnnnnnnnnnnnnnnnnnnnnnnnnnnnnnnnnnnnnnnnnnnnnnnnnnnnnnnnnnnnnnnnnnnnnnnnnnnnnnnnnnnnnnnnnnnnnnnnnnnnnnnnnnnnnnnnnnnnnnnnnnnnnnnnnnnnnnnnnnnnnnnnnnnnnnnnnnnnnnnnnnnnnnnnnnnnnnnnnnnnnnnnnnnnnnnnnnnnnnnnnnnnnnnnnnnnnnnnnnnnnnnnnnnnnnnnnnnnnnnnnnnnnnnnnnnnnnnnnnnnnnnnnnnnnnnnnnnnnnnnnnnnnnnnnnnnnnnnnnnnnnnnnnnnnnnnnnnnnnnnnnnnnnnnnnnnnnnnnnnnnnnnnnnnnnnnnnnnnnnnnnnnnnnnnnnnnnnnnnnnnnnnnnnnnnnnnnnnnnnnnnnnnnnnnnnnnnnnnnnnnnnnnnnnnnnnnnnnnnnnnnnnnnnnnnnnnnnnnnnnnnnnnnnnnnnnnnnnnnnnnnnnnnnnnnnnnnnnnnnnnnnnnnnnnnnnnnnnnnnnnnnnnnnnnnnnnnnnnnnnnnnnnnnnnnnnnnnnnnnnnnnnnnnnnnnnnnnnnnnnnnnnnnnnnnnnnnnnnnnnnnnnnnnnnnnnnnnnnnnnnnnnnnnnnnnnnnnnnnnnnnnnnnnnnnnnnnnnnnnnnnnnnnnnnnnnnnnnnnnnnnnnnnnnnnnnnnnnnnnnnnnnnnnnnnnnnnnnnnnnnnnnnnnnnnnnnnnnnnnnnnnnnnnnnnnnnnnnnnnnnnnnnnnnnnnnnnnnnnnnnnnnnnnnnnnnnnnnnnnnnnnnnnnnnnnnnnnnnnnnnnnnnnnnnnnnnnnnnnnnnnnnnnnnnnnnnnnnnnnnnnnnnnnnnnnnnnnnnnnnnnnnnnnnnnnnnnnnnnnnnnnnnnnnnnnnnnnnnnnnnnnnnnnnnnnnnnnnnnnnnnnnnnnnnnnnnnnnnnnnnnnnnnnnnnnnnnnnnnnnnnnnnnnnnnnnnnnnnnnnnnnnnnnnnnnnnnnnnnnnnnnnnnnnnnnnnnnnnnnnnnnnnnnnnnnnnnnnnnnnnnnnnnnnnnnnnnnnnnnnnnnnnnnnnnnnnnnnnnnnnnnnnnnnnnnnnnnnnnnnnnnnnnnnnnnnnnnnnnnnnnnnnnnnnnnnnnnnnnnnnnnnnnnnnnnnnnnnnnnnnnnnnnnnnnnnnnnnnnnnnnnnnnnnnnnnnnnnnnnnnnnnnnnnnnnnnnnnnnnnnnnnnnnnnnnnnnnnnnnnnnnnnnnnnnnnnnnnnnnnnnnnnnnnnnnnnnnnnnnnnnnnnnnnnnnnnnnnnnnnnnnnnnnnnnnnnnnnnnnnnnnnnnnnnnnnnnnnnnnnnnnnnnnnnnnnnnnnnnnnnnnnnnnnnnnnnnnnnnnnnnnnnnnnnnnnnnnnnnnnnnnnnnnnnnnnnnnnnnnnnnnnnnnnnnnnnnnnnnnnnnnnnnnnnnnnnnnnnnnnnnnnnnnnnnnnnnnnnnnnnnnnnnnnnnnnnnnnnnnnnnnnnnnnnnnnnnnnnnnnnnnnnnnnnnnnnnnnnnnnnnnnnnnnnnnnnnnnnnnnnnnnnnnnnnnnnnnnnnnnnnnnnnnnnnnnnnnnnnnnnnnnnnnnnnnnnnnnnnnnnnnnnnnnnnnnnnnnnnnnnnnnnnnnnnnnnnnnnnnnnnnnnnnnnnnnnnnnnnnnnnnnnnnnnnnnnnnnnnnnnnnnnnnnnnnnnnnnnnnnnnnnnnnnnnnnnnnnnnnnnnnnnnnnnnnnnnnnnnnnnnnnnnnnnnnnnnnnnnnnnnnnnnnnnnnnnnnnnnnnnnnnnnnnnnnnnnnnnnnnnnnnnnnnnnnnnnnnnnnnnnnnnnnnnnnnnnnnnnnnnnnnnnnnnnnnnnnnnnnnnnnnnnnnnnnnnnnnnnnnnnnnnnnnnnnnnnnnnnnnnnnnnnnnnnnnnnnnnnnnnnnnnnnnnnnnnnnnnnnnnnnnnnnnnnnnnnnnnnnnnnnnnnnnnnnnnnnnnnnnnnnnnnnnnnnnnnnnnnnnnnnnnnnnnnnnnnnnnnnnnnnnnnnnnnnnnnnnnnnnnnnnnnnnnnnnnnnnnnnnnnnnnnnnnnnnnnnnnnnnnnnnnnnnnnnnnnnnnnnnnnnnnnnnnnnnnnnnnnnnnnnnnnnnnnnnnnnnnnnnnnnnnnnnnnnnnnnnnnnnnnnnnnnnnnnnnnnnnnnnnnnnnnnnnnnnnnnnnnnnnnnnnnnnnnnnnnnnnnnnnnnnnnnnnnnnnnnnnnnnnnnnnnnnnnnnnnnnnnnnnnnnnnnnnnnnnnnnnnnnnnnnnnnnnnnnnnnnnnnnnnnnnnnnnnnnnnnnnnnnnnnnnnnnnnnnnnnnnnnnnnnnnnnnnnnnnnnnnnnnnnnnnnnnnnnnnnnnnnnnnnnnnnnnnnnnnnnnnnnnnnnnnnnnnnnnnnnnnnnnnnnnnnnnnnnnnnnnnnnnnnnnnnnnnnnnnnnnnnnnnnnnnnnnnnnnnnnnnnnnnnnnnnnnnnnnnnnnnnnnnnnnnnnnnnnnnnnnnnnnnnnnnnnnnnnnnnnnnnnnnnnnnnnnnnnnnnnnnnnnnnnnnnnnnnnnnnnnnnnnnnnnnnnnnnnnnnnnnnnnnnnnnnnnnnnnnnnnnnnnnnnnnnnnnnnnnnnnnnnnnnnnnnnnnnnnnnnnnnnnnnnnnnnnnnnnnnnnnnnnnnnnnnnnnnnnnnnnnnnnnnnnnnnnnnnnnnnnnnnnnnnnnnnnnnnnnnnnnnnnnnnnnnnnnnnnnnnnnnnnnnnnnnnnnnnnnnnnnnnnnnnnnnnnnnnnnnnnnnnnnnnnnnnnnnnnnnnnnnnnnnnnnnnnnnnnnnnnnnnnnnnnnnnnnnnnnnnnnnnnnnnnnnnnnnnnnnnnnnnnnnnnnnnnnnnnnnnnnnnnnnnnnnnnnnnnnnnnnnnnnnnnnnnnnnnnnnnnnnnnnnnnnnnnnnnnnnnnnnnnnnnnnnnnnnnnnnnnnnnnnnnnnnnnnnnnnnnnnnnnnnnnnnnnnnnnnnnnnnnnnnnnnnnnnnnnnnnnnnnnnnnnnnnnnnnnnnnnnnnnnnnnnnnnnnnnnnnnnnnnnnnnnnnnnnnnnnnnnnnnnnnnnnnnnnnnnnnnnnnnnnnnnnnnnnnnnnnnnnnnnnnnnnnnnnnnnnnnnnnnnnnnnnnnnnnnnnnnnnnnnnnnnnnnnnnnnnnnnnnnnnnnnnnnnnnnnnnnnnnnnnnnnnnnnnnnnnnnnnnnnnnnnnnnnnnnnnnnnnnnnnnnnnnnnnnnnnnnnnnnnnnnnnnnnnnnnnnnnnnnnnnnnnnnnnnnnnnnnnnnnnnnnnnnnnnnnnnnnnnnnnnnnnnnnnnnnnnnnnnnnnnnnnnnnnnnnnnnnnnnnnnnnnnnnnnnnnnnnnnnnnnnnnnnnnnnnnnnnnnnnnnnnnnnnnnnnnnnnnnnnnnnnnnnnnnnnnnnnnnnnnnnnnnnnnnnnnnnnnnnnnnnnnnnnnnnnnnnnnnnnnnnnnnnnnnnnnnnnnnnnnnnnnnnnnnnnnnnnnnnnnnnnnnnnnnnnnnnnnnnnnnnnnnnnnnnnnnnnnnnnnnnnnnnnnnnnnnnnnnnnnnnnnnnnnnnnnnnnnnnnnnnnnnnnnnnnnnnnnnnnnnnnnnnnnnnnnnnnnnnnnnnnnnnnnnnnnnnnnnnnnnnnnnnnnnnnnnnnnnnnnnnnnnnnnnnnnnnnnnnnnnnnnnnnnnnnnnnnnnnnnnnnnnnnnnnnnnnnnnnnnnnnnnnnnnnnnnnnnnnnnnnnnnnnnnnnnnnnnnnnnnnnnnnnnnnnnnnnnnnnnnnnnnnnnnnnnnnnnnnnnnnnnnnnnnnnnnnnnnnnnnnnnnnnnnnnnnnnnnnnnnnnnnnnnnnnnnnnnnnnnnnnnnnnnnnnnnnnnnnnnnnnnnnnnnnnnnnnnnnnnnnnnnnnnnnnnnnnnnnnnnnnnnnnnnnnnnnnnnnnnnnnnnnnnnnnnnnnnnnnnnnnnnnnnnnnnnnnnnnnnnnnnnnnnnnnnnnnnnnnnnnnnnnnnnnnnnnnnnnnnnnnnnnnnnnnnnnnnnnnnnnnnnnnnnnnnnnnnnnnnnnnnnnnnnnnnnnnnnnnnnnnnnnnnnnnnnnnnnnnnnnnnnnnnnnnnnnnnnnnnnnnnnnnnnnnnnnnnnnnnnnnnnnnnnnnnnnnnnnnnnnnnnnnnnnnnnnnnnnnnnnnnnnnnnnnnnnnnnnnnnnnnnnnnnnnnnnnnnnnnnnnnnnnnnnnnnnnnnnnnnnnnnnnnnnnnnnnnnnnnnnnnnnnnnnnnnnnnnnnnnnnnnnnnnnnnnnnnnnnnnnnnnnnnnnnnnnnnnnnnnnnnnnnnnnnnnnnnnnnnnnnnnnnnnnnnnnnnnnnnnnnnnnnnnnnnnnnnnnnnnnnnnnnnnnnnnnnnnnnnnnnnnnnnnnnnnnnnnnnnnnnnnnnnnnnnnnnnnnnnnnnnnnnnnnnnnnnnnnnnnnnnnnnnnnnnnnnnnnnnnnnnnnnnnnnnnnnnnnnnnnnnnnnnnnnnnnnnnnnnnnnnnnnnnnnnnnnnnnnnnnnnnnnnnnnnnnnnnnnnnnnnnnnnnnnnnnnnnnnnnnnnnnnnnnnnnnnnnnnnnnnnnnnnnnnnnnnnnnnnnnnnnnnnnnnnnnnnnnnnnnnnnnnnnnnnnnnnnnnnnnnnnnnnnnnnnnnnnnnnnnnnnnnnnnnnnnnnnnnnnnnnnnnnnnnnnnnnnnnnnnnnnnnnnnnnnnnnnnnnnnnnnnnnnnnnnnnnnnnnnnnnnnnnnnnnnnnnnnnnnnnnnnnnnnnnnnnnnnnnnnnnnnnnnnnnnnnnnnnnnnnnnnnnnnnnnnnnnnnnnnnnnnnnnnnnnnnnnnnnnnnnnnnnnnnnnnnnnnnnnnnnnnnnnnnnnnnnnnnnnnnnnnnnnnnnnnnnnnnnnnnnnnnnnnnnnnnnnnnnnnnnnnnnnnnnnnnnnnnnnnnnnnnnnnnnnnnnnnnnnnnnnnnnnnnnnnnnnnnnnnnnnnnnnnnnnnnnnnnnnnnnnnnnnnnnnnnnnnnnnnnnnnnnnnnnnnnnnnnnnnnnnnnnnnnnnnnnnnnnnnnnnnnnnnnnnnnnnnnnnnnnnnnnnnnnnnnnnnnnnnnnnnnnnnnnnnnnnnnnnnnnnnnnnnnnnnnnnnnnnnnnnnnnnnnnnnnnnnnnnnnnnnnnnnnnnnnnnnnnnnnnnnnnnnnnnnnnnnnnnnnnnnnnnnnnnnnnnnnnnnnnnnnnnnnnnnnnnnnnnnnnnnnnnnnnnnnnnnnnnnnnnnnnnnnnnnnnnnnnnnnnnnnnnnnnnnnnnnnnnnnnnnnnnnnnnnnnnnnnnnnnnnnnnnnnnnnnnnnnnnnnnnnnnnnnnnnnnnnnnnnnnnnnnnnnnnnnnnnnnnnnnnnnnnnnnnnnnnnnnnnnnnnnnnnnnnnnnnnnnnnnnnnnnnnnnnnnnnnnnnnnnnnnnnnnnnnnnnnnnnnnnnnnnnnnnnnnnnnnnnnnnnnnnnnnnnnnnnnnnnnnnnnnnnnnnnnnnnnnnnnnnnnnnnnnnnnnnnnnnnnnnnnnnnnnnnnnnnnnnnnnnnnnnnnnnnnnnnnnnnnnnnnnnnnnnnnnnnnnnnnnnnnnnnnnnnnnnnnnnnnnnnnnnnnnnnnnnnnnnnnnnnnnnnnnnnnnnnnnnnnnnnnnnnnnnnnnnnnnnnnnnnnnnnnnnnnnnnnnnnnnnnnnnnnnnnnnnnnnnnnnnnnnnnnnnnnnnnnnnnnnnnnnnnnnnnnnnnnnnnnnnnnnnnnnnnnnnnnnnnnnnnnnnnnnnnnnnnnnnnnnnnnnnnnnnnnnnnnnnnnnnnnnnnnnnnnnnnnnnnnnnnnnnnnnnnnnnnnnnnnnnnnnnnnnnnnnnnnnnnnnnnnnnnnnnnnnnnnnnnnnnnnnnnnnnnnnnnnnnnnnnnnnnnnnnnnnnnnnnnnnnnnnnnnnnnnnnnnnnnnnnnnnnnnnnnnnnnnnnnnnnnnnnnnnnnnnnnnnnnnnnnnnnnnnnnnnnnnnnnnnnnnnnnnnnnnnnnnnnnnnnnnnnnnnnnnnnnnnnnnnnnnnnnnnnnnnnnnnnnnnnnnnnnnnnnnnnnnnnnnnnnnnnnnnnnnnnnnnnnnnnnnnnnnnnnnnnnnnnnnnnnnnnnnnnnnnnnnnnnnnnnnnnnnnnnnnnnnnnnnnnnnnnnnnnnnnnnnnnnnnnnnnnnnnnnnnnnnnnnnnnnnnnnnnnnnnnnnnnnnnnnnnnnnnnnnnnnnnnnnnnnnnnnnnnnnnnnnnnnnnnnnnnnnnnnnnnnnnnnnnnnnnnnnnnnnnnnnnnnnnnnnnnnnnnnnnnnnnnnnnnnnnnnnnnnnnnnnnnnnnnnnnnnnnnnnnnnnnnnnnnnnnnnnnnnnnnnnnnnnnnnnnnnnnnnnnnnnnnnnnnnnnnnnnnnnnnnnnnnnnnnnnnnnnnnnnnnnnnnnnnnnnnnnnnnnnnnnnnnnnnnnnnnnnnnnnnnnnnnnnnnnnnnnnnnnnnnnnnnnnnnnnnnnnnnnnnnnnnnnnnnnnnnnnnnnnnnnnnnnnnnnnnnnnnnnnnnnnnnnnnnnnnnnnnnnnnnnnnnnnnnnnnnnnnnnnnnnnnnnnnnnnnnnnnnnnnnnnnnnnnnnnnnnnnnnnnnnnnnnnnnnnnnnnnnnnnnnnnnnnnnnnnnnnnnnnnnnnnnnnnnnnnnnnnnnnnnnnnnnnnnnnnnnnnnnnnnnnnnnnnnnnnnnnnnnnnnnnnnnnnnnnnnnnnnnnnnnnnnnnnnnnnnnnnnnnnnnnnnnnnnnnnnnnnnnnnnnnnnnnnnnnnnnnnnnnnnnnnnnnnnnnnnnnnnnnnnnnnnnnnnnnnnnnnnnnnnnnnnnnnnnnnnnnnnnnnnnnnnnnnnnnnnnnnnnnnnnnnnnnnnnnnnnnnnnnnnnnnnnnnnnnnnnnnnnnnnnnnnnnnnnnnnnnnnnnnnnnnnnnnnnnnnnnnnnnnnnnnnnnnnnnnnnnnnnnnnnnnnnnnnnnnnnnnnnnnnnnnnnnnnnnnnnnnnnnnnnnnnnnnnnnnnnnnnnnnnnnnnnnnnnnnnnnnnnnnnnnnnnnnnnnnnnnnnnnnnnnnnnnnnnnnnnnnnnnnnnnnnnnnnnnnnnnnnnnnnnnnnnnnnnnnnnnnnnnnnnnnnnnnnnnnnnnnnnnnnnnnnnnnnnnnnnnnnnnnnnnnnnnnnnnnnnnnnnnnnnnnnnnnnnnnnnnnnnnnnnnnnnnnnnnnnnnnnnnnnnnnnnnnnnnnnnnnnnnnnnnnnnnnnnnnnnnnnnnnnnnnnnnnnnnnnnnnnnnnnnnnnnnnnnnnnnnnnnnnnnnnnnnnnnnnnnnnnnnnnnnnnnnnnnnnnnnnnnnnnnnnnnnnnnnnnnnnnnnnnnnnnnnnnnnnnnnnnnnnnnnnnnnnnnnnnnnnnnnnnnnnnnnnnnnnnnnnnnnnnnnnnnnnnnnnnnnnnnnnnnnnnnnnnnnnnnnnnnnnnnnnnnnnnnnnnnnnnnnnnnnnnnnnnnnnnnnnnnnnnnnnnnnnnnnnnnnnnnnnnnnnnnnnnnnnnnnnnnnnnnnnnnnnnnnnnnnnnnnnnnnnnnnnnnnnnnnnnnnnnnnnnnnnnnnnnnnnnnnnnnnnnnnnnnnnnnnnnnnnnnnnnnnnnnnnnnnnnnnnnnnnnnnnnnnnnnnnnnnnnnnnnnnnnnnnnnnnnnnnnnnnnnnnnnnnnnnnnnnnnnnnnnnnnnnnnnnnnnnnnnnnnnnnnnnnnnnnnnnnnnnnnnnnnnnnnnnnnnnnnnnnnnnnnnnnnnnnnnnnnnnnnnnnnnnnnnnnnnnnnnnnnnnnnnnnnnnnnnnnnnnnnnnnnnnnnnnnnnnnnnnnnnnnnnnnnnnnnnnnnnnnnnnnnnnnnnnnnnnnnnnnnnnnnnnnnnnnnnnnnnnnnnnnnnnnnnnnnnnnnnnnnnnnnnnnnnnnnnnnnnnnnnnnnnnnnnnnnnnnnnnnnnnnnnnnnnnnnnnnnnnnnnnnnnnnnnnnnnnnnnnnnnnnnnnnnnnnnnnnnnnnnnnnnnnnnnnnnnnnnnnnnnnnnnnnnnnnnnnnnnnnnnnnnnnnnnnnnnnnnnnnnnnnnnnnnnnnnnnnnnnnnnnnnnnnnnnnnnnnnnnnnnnnnnnnnnnnnnnnnnnnnnnnnnnnnnnnnnnnnnnnnnnnnnnnnnnnnnnnnnnnnnnnnnnnnnnnnnnnnnnnnnnnnnnnnnnnnnnnnnnnnnnnnnnnnnnnnnnnnnnnnnnnnnnnnnnnnnnnnnnnnnnnnnnnnnnnnnnnnnnnnnnnnnnnnnnnnnnnnnnnnnnnnnnnnnnnnnnnnnnnnnnnnnnnnnnnnnnnnnnnnnnnnnnnnnnnnnnnnnnnnnnnnnnnnnnnnnnnnnnnnnnnnnnnnnnnnnnnnnnnnnnnnnnnnnnnnnnnnnnnnnnnnnnnnnnnnnnnnnnnnnnnnnnnnnnnnnnnnnnnnnnnnnnnnnnnnnnnnnnnnnnnnnnnnnnnnnnnnnnnnnnnnnnnnnnnnnnnnnnnnnnnnnnnnnnnnnnnnnnnnnnnnnnnnnnnnnnnnnnnnnnnnnnnnnnnnnnnnnnnnnnnnnnnnnnnnnnnnnnnnnnnnnnnnnnnnnnnnnnnnnnnnnnnnnnnnnnnnnnnnnnnnnnnnnnnnnnnnnnnnnnnnnnnnnnnnnnnnnnnnnnnnnnnnnnnnnnnnnnnnnnnnnnnnnnnnnnnnnnnnnnnnnnnnnnnnnnnnnnnnnnnnnnnnnnnnnnnnnnnnnnnnnnnnnnnnnnnnnnnnnnnnnnnnnnnnnnnnnnnnnnnnnnnnnnnnnnnnnnnnnnnnnnnnnnnnnnnnnnnnnnnnnnnnnnnnnnnnnnnnnnnnnnnnnnnnnnnnnnnnnnnnnnnnnnnnnnnnnnnnnnnnnnnnnnnnnnnnnnnnnnnnnnnnnnnnnnnnnnnnnnnnnnnnnnnnnnnnnnnnnnnnnnnnnnnnnnnnnnnnnnnnnnnnnnnnnnnnnnnnnnnnnnnnnnnnnnnnnnnnnnnnnnnnnnnnnnnnnnnnnnnnnnnnnnnnnnnnnnnnnnnnnnnnnnnnnnnnnnnnnnnnnnnnnnnnnnnnnnnnnnnnnnnnnnnnnnnnnnnnnnnnnnnnnnnnnnnnnnnnnnnnnnnnnnnnnnnnnnnnnnnnnnnnnnnnnnnnnnnnnnnnnnnnnnnnnnnnnnnnnnnnnnnnnnnnnnnnnnnnnnnnnnnnnnnnnnnnnnnnnnnnnnnnnnnnnnnnnnnnnnnnnnnnnnnnnnnnnnnnnnnnnnnnnnnnnnnnnnnnnnnnnnnnnnnnnnnnnnnnnnnnnnnnnnnnnnnnnnnnnnnnnnnnnnnnnnnnnnnnnnnnnnnnnnnnnnnnnnnnnnnnnnnnnnnnnnnnnnnnnnnnnnnnnnnnnnnnnnnnnnnnnnnnnnnnnnnnnnnnnnnnnnnnnnnnnnnnnnnnnnnnnnnnnnnnnnnnnnnnnnnnnnnnnnnnnnnnnnnnnnnnnnnnnnnnnnnnnnnnnnnnnnnnnnnnnnnnnnnnnnnnnnnnnnnnnnnnnnnnnnnnnnnnnnnnnnnnnnnnnnnnnnnnnnnnnnnnnnnnnnnnnnnnnnnnnnnnnnnnnnnnnnnnnnnnnnnnnnnnnnnnnnnnnnnnnnnnnnnnnnnnnnnnnnnnnnnnnnnnnnnnnnnnnnnnnnnnnnnnnnnnnnnnnnnnnnnnnnnnnnnnnnnnnnnnnnnnnnnnnnnnnnnnnnnnnnnnnnnnnnnnnnnnnnnnnnnnnnnnnnnnnnnnnnnnnnnnnnnnnnnnnnnnnnnnnnnnnnnnnnnnnnnnnnnnnnnnnnnnnnnnnnnnnnnnnnnnnnnnnnnnnnnnnnnnnnnnnnnnnnnnnnnnnnnnnnnnnnnnnnnnnnnnnnnnnnnnnnnnnnnnnnnnnnnnnnnnnnnnnnnnnnnnnnnnnnnnnnnnnnnnnnnnnnnnnnnnnnnnnnnnnnnnnnnnnnnnnnnnnnnnnnnnnnnnnnnnnnnnnnnnnnnnnnnnnnnnnnnnnnnnnnnnnnnnnnnnnnnnnnnnnnnnnnnnnnnnnnnnnnnnnnnnnnnnnnnnnnnnnnnnnnnnnnnnnnnnnnnnnnnnnnnnnnnnnnnnnnnnnnnnnnnnnnnnnnnnnnnnnnnnnnnnnnnnnnnnnnnnnnnnnnnnnnnnnnnnnnnnnnnnnnnnnnnnnnnnnnnnnnnnnnnnnnnnnnnnnnnnnnnnnnnnnnnnnnnnnnnnnnnnnnnnnnnnnnnnnnnnnnnnnnnnnnnnnnnnnnnnnnnnnnnnnnnnnnnnnnnnnnnnnnnnnnnnnnnnnnnnnnnnnnnnnnnnnnnnnnnnnnnnnnnnnnnnnnnnnnnnnnnnnnnnnnnnnnnnnnnnnnnnnnnnnnnnnnnnnnnnnnnnnnnnnnnnnnnnnnnnnnnnnnnnnnnnnnnnnnnnnnnnnnnnnnnnnnnnnnnnnnnnnnnnnnnnnnnnnnnnnnnnnnnnnnnnnnnnnnnnnnnnnnnnnnnnnnnnnnnnnnnnnnnnnnnnnnnnnnnnnnnnnnnnnnnnnnnnnnnnnnnnnnnnnnnnnnnnnnnnnnnnnnnnnnnnnnnnnnnnnnnnnnnnnnnnnnnnnnnnnnnnnnnnnnnnnnnnnnnnnnnnnnnnnnnnnnnnnnnnnnnnnnnnnnnnnnnnnnnnnnnnnnnnnnnnnnnnnnnnnnnnnnnnnnnnnnnnnnnnnnnnnnnnnnnnnnnnnnnnnnnnnnnnnnnnnnnnnnnnnnnnnnnnnnnnnnnnnnnnnnnnnnnnnnnnnnnnnnnnnnnnnnnnnnnnnnnnnnnnnnnnnnnnnnnnnnnnnnnnnnnnnnnnnnnnnnnnnnnnnnnnnnnnnnnnnnnnnnnnnnnnnnnnnnnnnnnnnnnnnnnnnnnnnnnnnnnnnnnnnnnnnnnnnnnnnnnnnnnnnnnnnnnnnnnnnnnnnnnnnnnnnnnnnnnnnnnnnnnnnnnnnnnnnnnnnnnnnnnnnnnnnnnnnnnnnnnnnnnnnnnnnnnnnnnnnnnnnnnnnnnnnnnnnnnnnnnnnnnnnnnnnnnnnnnnnnnnnnnnnnnnnnnnnnnnnnnnnnnnnnnnnnnnnnnnnnnnnnnnnnnnnnnnnnnnnnnnnnnnnnnnnnnnnnnnnnnnnnnnnnnnnnnnnnnnnnnnnnnnnnnnnnnnnnnnnnnnnnnnnnnnnnnnnnnnnnnnnnnnnnnnnnnnnnnnnnnnnnnnnnnnnnnnnnnnnnnnnnnnnnnnnnnnnnnnnnnnnnnnnnnnnnnnnnnnnnnnnnnnnnnnnnnnnnnnnnnnnnnnnnnnnnnnnnnnnnnnnnnnnnnnnnnnnnnnnnnnnnnnnnnnnnnnnnnnnnnnnnnnnnnnnnnnnnnnnnnnnnnnnnnnnnnnnnnnnnnnnnnnnnnnnnnnnnnnnnnnnnnnnnnnnnnnnnnnnnnnnnnnnnnnnnnnnnnnnnnnnnnnnnnnnnnnnnnnnnnnnnnnnnnnnnnnnnnnnnnnnnnnnnnnnnnnnnnnnnnnnnnnnnnnnnnnnnnnnnnnnnnnnnnnnnnnnnnnnnnnnnnnnnnnnnnnnnnnnnnnnnnnnnnnnnnnnnnnnnnnnnnnnnnnnnnnnnnnnnnnnnnnnnnnnnnnnnnnnnnnnnnnnnnnnnnnnnnnnnnnnnnnnnnnnnnnnnnnnnnnnnnnnnnnnnnnnnnnnnnnnnnnnnnnnnnnnnnnnnnnnnnnnnnnnnnnnnnnnnnnnnnnnnnnnnnnnnnnnnnnnnnnnnnnnnnnnnnnnnnnnnnnnnnnnnnnnnnnnnnnnnnnnnnnnnnnnnnnnnnnnnnnnnnnnnnnnnnnnnnnnnnnnnnnnnnnnnnnnnnnnnnnnnnnnnnnnnnnnnnnnnnnnnnnnnnnnnnnnnnnnnnnnnnnnnnnnnnnnnnnnnnnnnnnnnnnnnnnnnnnnnnnnnnnnnnnnnnnnnnnnnnnnnnnnnnnnnnnnnnnnnnnnnnnnnnnnnnnnnnnnnnnnnnnnnnnnnnnnnnnnnnnnnnnnnnnnnnnnnnnnnnnnnnnnnnnnnnnnnnnnnnnnnnnnnnnnnnnnnnnnnnnnnnnnnnnnnnnnnnnnnnnnnnnnnnnnnnnnnnnnnnnnnnnnnnnnnnnnnnnnnnnnnnnnnnnnnnnnnnnnnnnnnnnnnnnnnnnnnnnnnnnnnnnnnnnnnnnnnnnnnnnnnnnnnnnnnnnnnnnnnnnnnnnnnnnnnnnnnnnnnnnnnnnnnnnnnnnnnnnnnnnnnnnnnnnnnnnnnnnnnnnnnnnnnnnnnnnnnnnnnnnnnnnnnnnnnnnnnnnnnnnnnnnnnnnnnnnnnnnnnnnnnnnnnnnnnnnnnnnnnnnnnnnnnnnnnnnnnnnnnnnnnnnnnnnnnnnnnnnnnnnnnnnnnnnnnnnnnnnnnnnnnnnnnnnnnnnnnnnnnnnnnnnnnnnnnnnnnnnnnnnnnnnnnnnnnnnnnnnnnnnnnnnnnnnnnnnnnnnnnnnnnnnnnnnnnnnnnnnnnnnnnnnnnnnnnnnnnnnnnnnnnnnnnnnnnnnnnnnnnnnnnnnnnnnnnnnnnnnnnnnnnnnnnnnnnnnnnnnnnnnnnnnnnnnnnnnnnnnnnnnnnnnnnnnnnnnnnnnnnnnnnnnnnnnnnnnnnnnnnnnnnnnnnnnnnnnnnnnnnnnnnnnnnnnnnnnnnnnnnnnnnnnnnnnnnnnnnnnnnnnnnnnnnnnnnnnnnnnnnnnnnnnnnnnnnnnnnnnnnnnnnnnnnnnnnnnnnnnnnnnnnnnnnnnnnnnnnnnnnnnnnnnnnnnnnnnnnnnnnnnnnnnnnnnnnnnnnnnnnnnnnnnnnnnnnnnnnnnnnnnnnnnnnnnnnnnnnnnnnnnnnnnnnnnnnnnnnnnnnnnnnnnnnnnnnnnnnnnnnnnnnnnnnnnnnnnnnnnnnnnnnnnnnnnnnnnnnnnnnnnnnnnnnnnnnnnnnnnnnnnnnnnnnnnnnnnnnnnnnnnnnnnnnnnnnnnnnnnnnnnnnnnnnnnnnnnnnnnnnnnnnnnnnnnnnnnnnnnnnnnnnnnnnnnnnnnnnnnnnnnnnnnnnnnnnnnnnnnnnnnnnnnnnnnnnnnnnnnnnnnnnnnnnnnnnnnnnnnnnnnnnnnnnnnnnnnnnnnnnnnnnnnnnnnnnnnnnnnnnnnnnnnnnnnnnnnnnnnnnnnnnnnnnnnnnnnnnnnnnnnnnnnnnnnnnnnnnnnnnnnnnnnnnnnnnnnnnnnnnnnnnnnnnnnnnnnnnnnnnnnnnnnnnnnnnnnnnnnnnnnnnnnnnnnnnnnnnnnnnnnnnnnnnnnnnnnnnnnnnnnnnnnnnnnnnnnnnnnnnnnnnnnnnnnnnnnnnnnnnnnnnnnnnnnnnnnnnnnnnnnnnnnnnnnnnnnnnnnnnnnnnnnnnnnnnnnnnnnnnnnnnnnnnnnnnnnnnnnnnnnnnnnnnnnnnnnnnnnnnnnnnnnnnnnnnnnnnnnnnnnnnnnnnnnnnnnnnnnnnnnnnnnnnnnnnnnnnnnnnnnnnnnnnnnnnnnnnnnnnnnnnnnnnnnnnnnnnnnnnnnnnnnnnnnnnnnnnnnnnnnnnnnnnnnnnnnnnnnnnnnnnnnnnnnnnnnnnnnnnnnnnnnnnnnnnnnnnnnnnnnnnnnnnnnnnnnnnnnnnnnnnnnnnnnnnnnnnnnnnnnnnnnnnnnnnnnnnnnnnnnnnnnnnnnnnnnnnnnnnnnnnnnnnnnnnnnnnnnnnnnnnnnnnnnnnnnnnnnnnnnnnnnnnnnnnnnnnnnnnnnnnnnnnnnnnnnnnnnnnnnnnnnnnnnnnnnnnnnnnnnnnnnnnnnnnnnnnnnnnnnnnnnnnnnnnnnnnnnnnnnnnnnnnnnnnnnnnnnnnnnnnnnnnnnnnnnnnnnnnnnnnnnnnnnnnnnnnnnnnnnnnnnnnnnnnnnnnnnnnnnnnnnnnnnnnnnnnnnnnnnnnnnnnnnnnnnnnnnnnnnnnnnnnnnnnnnnnnnnnnnnnnnnnnnnnnnnnnnnnnnnnnnnnnnnnnnnnnnnnnnnnnnnnnnnnnnnnnnnnnnnnnnnnnnnnnnnnnnnnnnnnnnnnnnnnnnnnnnnnnnnnnnnnnnnnnnnnnnnnnnnnnnnnnnnnnnnnnnnnnnnnnnnnnnnnnnnnnnnnnnnnnnnnnnnnnnnnnnnnnnnnnnnnnnnnnnnnnnnnnnnnnnnnnnnnnnnnnnnnnnnnnnnnnnnnnnnnnnnnnnnnnnnnnnnnnnnnnnnnnnnnnnnnnnnnnnnnnnnnnnnnnnnnnnnnnnnnnnnnnnnnnnnnnnnnnnnnnnnnnnnnnnnnnnnnnnnnnnnnnnnnnnnnnnnnnnnnnnnnnnnnnnnnnnnnnnnnnnnnnnnnnnnnnnnnnnnnnnnnnnnnnnnnnnnnnnnnnnnnnnnnnnnnnnnnnnnnnnnnnnnnnnnnnnnnnnnnnnnnnnnnnnnnnnnnnnnnnnnnnnnnnnnnnnnnnnnnnnnnnnnnnnnnnnnnnnnnnnnnnnnnnnnnnnnnnnnnnnnnnnnnnnnnnnnnnnnnnnnnnnnnnnnnnnnnnnnnnnnnnnnnnnnnnnnnnnnnnnnnnnnnnnnnnnnnnnnnnnnnnnnnnnnnnnnnnnnnnnnnnnnnnnnnnnnnnnnnnnnnnnnnnnnnnnnnnnnnnnnnnnnnnnnnnnnnnnnnnnnnnnnnnnnnnnnnnnnnnnnnnnnnnnnnnnnnnnnnnnnnnnnnnnnnnnnnnnnnnnnnnnnnnnnnnnnnnnnnnnnnnnnnnnnnnnnnnnnnnnnnnnnnnnnnnnnnnnnnnnnnnnnnnnnnnnnnnnnnnnnnnnnnnnnnnnnnnnnnnnnnnnnnnnnnnnnnnnnnnnnnnnnnnnnnnnnnnnnnnnnnnnnnnnnnnnnnnnnnnnnnnnnnnnnnnnnnnnnnnnnnnnnnnnnnnnnnnnnnnnnnnnnnnnnnnnnnnnnnnnnnnnnnnnnnnnnnnnnnnnnnnnnnnnnnnnnnnnnnnnnnnnnnnnnnnnnnnnnnnnnnnnnnnnnnnnnnnnnnnnnnnnnnnnnnnnnnnnnnnnnnnnnnnnnnnnnnnnnnnnnnnnnnnnnnnnnnnnnnnnnnnnnnnnnnnnnnnnnnnnnnnnnnnnnnnnnnnnnnnnnnnnnnnnnnnnnnnnnnnnnnnnnnnnnnnnnnnnnnnnnnnnnnnnnnnnnnnnnnnnnnnnnnnnnnnnnnnnnnnnnnnnnnnnnnnnnnnnnnnnnnnnnnnnnnnnnnnnnnnnnnnnnnnnnnnnnnnnnnnnnnnnnnnnnnnnnnnnnnnnnnnnnnnnnnnnnnnnnnnnnnnnnnnnnnnnnnnnnnnnnnnnnnnnnnnnnnnnnnnnnnnnnnnnnnnnnnnnnnnnnnnnnnnnnnnnnnnnnnnnnnnnnnnnnnnnnnnnnnnnnnnnnnnnnnnnnnnnnnnnnnnnnnnnnnnnnnnnnnnnnnnnnnnnnnnnnnnnnnnnnnnnnnnnnnnnnnnnnnnnnnnnnnnnnnnnnnnnnnnnnnnnnnnnnnnnnnnnnnnnnnnnnnnnnnnnnnnnnnnnnnnnnnnnnnnnnnnnnnnnnnnnnnnnnnnnnnnnnnnnnnnnnnnnnnnnnnnnnnnnnnnnnnnnnnnnnnnnnnnnnnnnnnnnnnnnnnnnnnnnnnnnnnnnnnnnnnnnnnnnnnnnnnnnnnnnnnnnnnnnnnnnnnnnnnnnnnnnnnnnnnnnnnnnnnnnnnnnnnnnnnnnnnnnnnnnnnnnnnnnnnnnnnnnnnnnnnnnnnnnnnnnnnnnnnnnnnnnnnnnnnnnnnnnnnnnnnnnnnnnnnnnnnnnnnnnnnnnnnnnnnnnnnnnnnnnnnnnnnnnnnnnnnnnnnnnnnnnnnnnnnnnnnnnnnnnnnnnnnnnnnnnnnnnnnnnnnnnnnnnnnnnnnnnnnnnnnnnnnnnnnnnnnnnnnnnnnnnnnnnnnnnnnnnnnnnnnnnnnnnnnnnnnnnnnnnnnnnnnnnnnnnnnnnnnnnnnnnnnnnnnnnnnnnnnnnnnnnnnnnnnnnnnnnnnnnnnnnnnnnnnnnnnnnnnnnnnnnnnnnnnnnnnnnnnnnnnnnnnnnnnnnnnnnnnnnnnnnnnnnnnnnnnnnnnnnnnnnnnnnnnnnnnnnnnnnnnnnnnnnnnnnnnnnnnnnnnnnnnnnnnnnnnnnnnnnnnnnnnnnnnnnnnnnnnnnnnnnnnnnnnnnnnnnnnnnnnnnnnnnnnnnnnnnnnnnnnnnnnnnnnnnnnnnnnnnnnnnnnnnnnnnnnnnnnnnnnnnnnnnnnnnnnnnnnnnnnnnnnnnnnnnnnnnnnnnnnnnnnnnnnnnnnnnnnnnnnnnnnnnnnnnnnnnnnnnnnnnnnnnnnnnnnnnnnnnnnnnnnnnnnnnnnnnnnnnnnnnnnnnnnnnnnnnnnnnnnnnnnnnnnnnnnnnnnnnnnnnnnnnnnnnnnnnnnnnnnnnnnnnnnnnnnnnnnnnnnnnnnnnnnnnnnnnnnnnnnnnnnnnnnnnnnnnnnnnnnnnnnnnnnnnnnnnnnnnnnnnnnnnnnnnnnnnnnnnnnnnnnnnnnnnnnnnnnnnnnnnnnnnnnnnnnnnnnnnnnnnnnnnnnnnnnnnnnnnnnnnnnnnnnnnnnnnnnnnnnnnnnnnnnnnnnnnnnnnnnnnnnnnnnnnnnnnnnnnnnnnnnnnnnnnnnnnnnnnnnnnnnnnnnnnnnnnnnnnnnnnnnnnnnnnnnnnnnnnnnnnnnnnnnnnnnnnnnnnnnnnnnnnnnnnnnnnnnnnnnnnnnnnnnnnnnnnnnnnnnnnnnnnnnnnnnnnnnnnnnnnnnnnnnnnnnnnnnnnnnnnnnnnnnnnnnnnnnnnnnnnnnnnnnnnnnnnnnnnnnnnnnnnnnnnnnnnnnnnnnnnnnnnnnnnnnnnnnnnnnnnnnnnnnnnnnnnnnnnnnnnnnnnnnnnnnnnnnnnnnnnnnnnnnnnnnnnnnnnnnnnnnnnnnnnnnnnnnnnnnnnnnnnnnnnnnnnnnnnnnnnnnnnnnnnnnnnnnnnnnnnnnnnnnnnnnnnnnnnnnnnnnnnnnnnnnnnnnnnnnnnnnnnnnnnnnnnnnnnnnnnnnnnnnnnnnnnnnnnnnnnnnnnnnnnnnnnnnnnnnnnnnnnnnnnnnnnnnnnnnnnnnnnnnnnnnnnnnnnnnnnnnnnnnnnnnnnnnnnnnnnnnnnnnnnnnnnnnnnnnnnnnnnnnnnnnnnnnnnnnnnnnnnnnnnnnnnnnnnnnnnnnnnnnnnnnnnnnnnnnnnnnnnnnnnnnnnnnnnnnnnnnnnnnnnnnnnnnnnnnnnnnnnnnnnnnnnnnnnnnnnnnnnnnnnnnnnnnnnnnnnnnnnnnnnnnnnnnnnnnnnnnnnnnnnnnnnnnnnnnnnnnnnnnnnnnnnnnnnnnnnnnnnnnnnnnnnnnnnnnnnnnnnnnnnnnnnnnnnnnnnnnnnnnnnnnnnnnnnnnnnnnnnnnnnnnnnnnnnnnnnnnnnnnnnnnnnnnnnnnnnnnnnnnnnnnnnnnnnnnnnnnnnnnnnnnnnnnnnnnnnnnnnnnnnnnnnnnnnnnnnnnnnnnnnnnnnnnnnnnnnnnnnnnnnnnnnnnnnnnnnnnnnnnnnnnnnnnnnnnnnnnnnnnnnnnnnnnnnnnnnnnnnnnnnnnnnnnnnnnnnnnnnnnnnnnnnnnnnnnnnnnnnnnnnnnnnnnnnnnnnnnnnnnnnnnnnnnnnnnnnnnnnnnnnnnnnnnnnnnnnnnnnnnnnnnnnnnnnnnnnnnnnnnnnnnnnnnnnnnnnnnnnnnnnnnnnnnnnnnnnnnnnnnnnnnnnnnnnnnnnnnnnnnnnnnnnnnnnnnnnnnnnnnnnnnnnnnnnnnnnnnnnnnnnnnnnnnnnnnnnnnnnnnnnnnnnnnnnnnnnnnnnnnnnnnnnnnnnnnnnnnnnnnnnnnnnnnnnnnnnnnnnnnnnnnnnnnnnnnnnnnnnnnnnnnnnnnnnnnnnnnnnnnnnnnnnnnnnnnnnnnnnnnnnnnnnnnnnnnnnnnnnnnnnnnnnnnnnnnnnnnnnnnnnnnnnnnnnnnnnnnnnnnnnnnnnnnnnnnnnnnnnnnnnnnnnnnnnnnnnnnnnnnnnnnnnnnnnnnnnnnnnnnnnnnnnnnnnnnnnnnnnnnnnnnnnnnnnnnnnnnnnnnnnnnnnnnnnnnnnnnnnnnnnnnnnnnnnnnnnnnnnnnnnnnnnnnnnnnnnnnnnnnnnnnnnnnnnnnnnnnnnnnnnnnnnnnnnnnnnnnnnnnnnnnnnnnnnnnnnnnnnnnnnnnnnnnnnnnnnnnnnnnnnnnnnnnnnnnnnnnnnnnnnnnnnnnnnnnnnnnnnnnnnnnnnnnnnnnnnnnnnnnnnnnnnnnnnnnnnnnnnnnnnnnnnnnnnnnnnnnnnnnnnnnnnnnnnnnnnnnnnnnnnnnnnnnnnnnnnnnnnnnnnnnnnnnnnnnnnnnnnnnnnnnnnnnnnnnnnnnnnnnnnnnnnnnnnnnnnnnnnnnnnnnnnnnnnnnnnnnnnnnnnnnnnnnnnnnnnnnnnnnnnnnnnnnnnnnnnnnnnnnnnnnnnnnnnnnnnnnnnnnnnnnnnnnnnnnnnnnnnnnnnnnnnnnnnnnnnnnnnnnnnnnnnnnnnnnnnnnnnnnnnnnnnnnnnnnnnnnnnnnnnnnnnnnnnnnnnnnnnnnnnnnnnnnnnnnnnnnnnnnnnnnnnnnnnnnnnnnnnnnnnnnnnnnnnnnnnnnnnnnnnnnnnnnnnnnnnnnnnnnnnnnnnnnnnnnnnnnnnnnnnnnnnnnnnnnnnnnnnnnnnnnnnnnnnnnnnnnnnnnnnnnnnnnnnnnnnnnnnnnnnnnnnnnnnnnnnnnnnnnnnnnnnnnnnnnnnnnnnnnnnnnnnnnnnnnnnnnnnnnnnnnnnnnnnnnnnnnnnnnnnnnnnnnnnnnnnnnnnnnnnnnnnnnnnnnnnnnnnnnnnnnnnnnnnnnnnnnnnnnnnnnnnnnnnnnnnnnnnnnnnnnnnnnnnnnnnnnnnnnnnnnnnnnnnnnnnnnnnnnnnnnnnnnnnnnnnnnnnnnnnnnnnnnnnnnnnnnnnnnnnnnnnnnnnnnnnnnnnnnnnnnnnnnnnnnnnnnnnnnnnnnnnnnnnnnnnnnnnnnnnnnnnnnnnnnnnnnnnnnnnnnnnnnnnnnnnnnnnnnnnnnnnnnnnnnnnnnnnnnnnnnnnnnnnnnnnnnnnnnnnnnnnnnnnnnnnnnnnnnnnnnnnnnnnnnnnnnnnnnnnnnnnnnnnnnnnnnnnnnnnnnnnnnnnnnnnnnnnnnnnnnnnnnnnnnnnnnnnnnnnnnnnnnnnnnnnnnnnnnnnnnnnnnnnnnnnnnnnnnnnnnnnnnnnnnnnnnnnnnnnnnnnnnnnnnnnnnnnnnnnnnnnnnnnnnnnnnnnnnnnnnnnnnnnnnnnnnnnnnnnnnnnnnnnnnnnnnnnnnnnnnnnnnnnnnnnnnnnnnnnnnnnnnnnnnnnnnnnnnnnnnnnnnnnnnnnnnnnnnnnnnnnnnnnnnnnnnnnnnnnnnnnnnnnnnnnnnnnnnnnnnnnnnnnnnnnnnnnnnnnnnnnnnnnnnnnnnnnnnnnnnnnnnnnnnnnnnnnnnnnnnnnnnnnnnnnnnnnnnnnnnnnnnnnnnnnnnnnnnnnnnnnnnnnnnnnnnnnnnnnnnnnnnnnnnnnnnnnnnnnnnnnnnnnnnnnnnnnnnnnnnnnnnnnnnnnnnnnnnnnnnnnnnnnnnnnnnnnnnnnnnnnnnnnnnnnnnnnnnnnnnnnnnnnnnnnnnnnnnnnnnnnnnnnnnnnnnnnnnnnnnnnnnnnnnnnnnnnnnnnnnnnnnnnnnnnnnnnnnnnnnnnnnnnnnnnnnnnnnnnnnnnnnnnnnnnnnnnnnnnnnnnnnnnnnnnnnnnnnnnnnnnnnnnnnnnnnnnnnnnnnnnnnnnnnnnnnnnnnnnnnnnnnnnnnnnnnnnnnnnnnnnnnnnnnnnnnnnnnnnnnnnnnnnnnnnnnnnnnnnnnnnnnnnnnnnnnnnnnnnnnnnnnnnnnnnnnnnnnnnnnnnnnnnnnnnnnnnnnnnnnnnnnnnnnnnnnnnnnnnnnnnnnnnnnnnnnnnnnnnnnnnnnnnnnnnnnnnnnnnnnnnnnnnnnnnnnnnnnnnnnnnnnnnnnnnnnnnnnnnnnnnnnnnnnnnnnnnnnnnnnnnnnnnnnnnnnnnnnnnnnnnnnnnnnnnnnnnnnnnnnnnnnnnnnnnnnnnnnnnnnnnnnnnnnnnnnnnnnnnnnnnnnnnnnnnnnnnnnnnnnnnnnnnnnnnnnnnnnnnnnnnnnnnnnnnnnnnnnnnnnnnnnnnnnnnnnnnnnnnnnnnnnnnnnnnnnnnnnnnnnnnnnnnnnnnnnnnnnnnnnnnnnnnnnnnnnnnnnnnnnnnnnnnnnnnnnnnnnnnnnnnnnnnnnnnnnnnnnnnnnnnnnnnnnnnnnnnnnnnnnnnnnnnnnnnnnnnnnnnnnnnnnnnnnnnnnnnnnnnnnnnnnnnnnnnnnnnnnnnnnnnnnnnnnnnnnnnnnnnnnnnnnnnnnnnnnnnnnnnnnnnnnnnnnnnnnnnnnnnnnnnnnnnnnnnnnnnnnnnnnnnnnnnnnnnnnnnnnnnnnnnnnnnnnnnnnnnnnnnnnnnnnnnnnnnnnnnnnnnnnnnnnnnnnnnnnnnnnnnnnnnnnnnnnnnnnnnnnnnnnnnnnnnnnnnnnnnnnnnnnnnnnnnnnnnnnnnnnnnnnnnnnnnnnnnnnnnnnnnnnnnnnnnnnnnnnnnnnnnnnnnnnnnnnnnnnnnnnnnnnnnnnnnnnnnnnnnnnnnnnnnnnnnnnnnnnnnnnnnnnnnnnnnnnnnnnnnnnnnnnnnnnnnnnnnnnnnnnnnnnnnnnnnnnnnnnnnnnnnnnnnnnnnnnnnnnnnnnnnnnnnnnnnnnnnnnnnnnnnnnnnnnnnnnnnnnnnnnnnnnnnnnnnnnnnnnnnnnnnnnnnnnnnnnnnnnnnnnnnnnnnnnnnnnnnnnnnnnnnnnnnnnnnnnnnnnnnnnnnnnnnnnnnnnnnnnnnnnnnnnnnnnnnnnnnnnnnnnnnnnnnnnnnnnnnnnnnnnnnnnnnnnnnnnnnnnnnnnnnnnnnnnnnnnnnnnnnnnnnnnnnnnnnnnnnnnnnnnnnnnnnnnnnnnnnnnnnnnnnnnnnnnnnnnnnnnnnnnnnnnnnnnnnnnnnnnnnnnnnnnnnnnnnnnnnnnnnnnnnnnnnnnnnnnnnnnnnnnnnnnnnnnnnnnnnnnnnnnnnnnnnnnnnnnnnnnnnnnnnnnnnnnnnnnnnnnnnnnnnnnnnnnnnnnnnnnnnnnnnnnnnnnnnnnnnnnnnnnnnnnnnnnnnnnnnnnnnnnnnnnnnnnnnnnnnnnnnnnnnnnnnnnnnnnnnnnnnnnnnnnnnnnnnnnnnnnnnnnnnnnnnnnnnnnnnnnnnnnnnnnnnnnnnnnnnnnnnnnnnnnnnnnnnnnnnnnnnnnnnnnnnnnnnnnnnnnnnnnnnnnnnnnnnnnnnnnnnnnnnnnnnnnnnnnnnnnnnnnnnnnnnnnnnnnnnnnnnnnnnnnnnnnnnnnnnnnnnnnnnnnnnnnnnnnnnnnnnnnnnnnnnnnnnnnnnnnnnnnnnnnnnnnnnnnnnnnnnnnnnnnnnnnnnnnnnnnnnnnnnnnnnnnnnnnnnnnnnnnnnnnnnnnnnnnnnnnnnnnnnnnnnnnnnnnnnnnnnnnnnnnnnnnnnnnnnnnnnnnnnnnnnnnnnnnnnnnnnnnnnnnnnnnnnnnnnnnnnnnnnnnnnnnnnnnnnnnnnnnnnnnnnnnnnnnnnnnnnnnnnnnnnnnnnnnnnnnnnnnnnnnnnnnnnnnnnnnnnnnnnnnnnnnnnnnnnnnnnnnnnnnnnnnnnnnnnnnnnnnnnnnnnnnnnnnnnnnnnnnnnnnnnnnnnnnnnnnnnnnnnnnnnnnnnnnnnnnnnnnnnnnnnnnnnnnnnnnnnnnnnnnnnnnnnnnnnnnnnnnnnnnnnnnnnnnnnnnnnnnnnnnnnnnnnnnnnnnnnnnnnnnnnnnnnnnnnnnnnnnnnnnnnnnnnnnnnnnnnnnnnnnnnnnnnnnnnnnnnnnnnnnnnnnnnnnnnnnnnnnnnnnnnnnnnnnnnnnnnnnnnnnnnnnnnnnnnnnnnnnnnnnnnnnnnnnnnnnnnnnnnnnnnnnnnnnnnnnnnnnnnnnnnnnnnnnnnnnnnnnnnnnnnnnnnnnnnnnnnnnnnnnnnnnnnnnnnnnnnnnnnnnnnnnnnnnnnnnnnnnnnnnnnnnnnnnnnnnnnnnnnnnnnnnnnnnnnnnnnnnnnnnnnnnnnnnnnnnnnnnnnnnnnnnnnnnnnnnnnnnnnnnnnnnnnnnnnnnnnnnnnnnnnnnnnnnnnnnnnnnnnnnnnnnnnnnnnnnnnnnnnnnnnnnnnnnnnnnnnnnnnnnnnnnnnnnnnnnnnnnnnnnnnnnnnnnnnnnnnnnnnnnnnnnnnnnnnnnnnnnnnnnnnnnnnnnnnnnnnnnnnnnnnnnnnnnnnnnnnnnnnnnnnnnnnnnnnnnnnnnnnnnnnnnnnnnnnnnnnnnnnnnnnnnnnnnnnnnnnnnnnnnnnnnnnnnnnnnnnnnnnnnnnnnnnnnnnnnnnnnnnnnnnnnnnnnnnnnnnnnnnnnnnnnnnnnnnnnnnnnnnnnnnnnnnnnnnnnnnnnnnnnnnnnnnnnnnnnnnnnnnnnnnnnnnnnnnnnnnnnnnnnnnnnnnnnnnnnnnnnnnnnnnnnnnnnnnnnnnnnnnnnnnnnnnnnnnnnnnnnnnnnnnnnnnnnnnnnnnnnnnnnnnnnnnnnnnnnnnnnnnnnnnnnnnnnnnnnnnnnnnnnnnnnnnnnnnnnnnnnnnnnnnnnnnnnnnnnnnnnnnnnnnnnnnnnnnnnnnnnnnnnnnnnnnnnnnnnnnnnnnnnnnnnnnnnnnnnnnnnnnnnnnnnnnnnnnnnnnnnnnnnnnnnnnnnnnnnnnnnnnnnnnnnnnnnnnnnnnnnnnnnnnnnnnnnnnnnnnnnnnnnnnnnnnnnnnnnnnnnnnnnnnnnnnnnnnnnnnnnnnnnnnnnnnnnnnnnnnnnnnnnnnnnnnnnnnnnnnnnnnnnnnnnnnnnnnnnnnnnnnnnnnnnnnnnnnnnnnnnnnnnnnnnnnnnnnnnnnnnnnnnnnnnnnnnnnnnnnnnnnnnnnnnnnnnnnnnnnnnnnnnnnnnnnnnnnnnnnnnnnnnnnnnnnnnnnnnnnnnnnnnnnnnnnnnnnnnnnnnnnnnnnnnnnnnnnnnnnnnnnnnnnnnnnnnnnnnnnnnnnnnnnnnnnnnnnnnnnnnnnnnnnnnnnnnnnnnnnnnnnnnnnnnnnnnnnnnnnnnnnnnnnnnnnnnnnnnnnnnnnnnnnnnnnnnnnnnnnnnnnnnnnnnnnnnnnnnnnnnnnnnnnnnnnnnnnnnnnnnnnnnnnnnnnnnnnnnnnnnnnnnnnnnnnnnnnnnnnnnnnnnnnnnnnnnnnnnnnnnnnnnnnnnnnnnnnnnnnnnnnnnnnnnnnnnnnnnnnnnnnnnnnnnnnnnnnnnnnnnnnnnnnnnnnnnnnnnnnnnnnnnnnnnnnnnnnnnnnnnnnnnnnnnnnnnnnnnnnnnnnnnnnnnnnnnnnnnnnnnnnnnnnnnnnnnnnnnnnnnnnnnnnnnnnnnnnnnnnnnnnnnnnnnnnnnnnnnnnnnnnnnnnnnnnnnnnnnnnnnnnnnnnnnnnnnnnnnnnnnnnnnnnnnnnnnnnnnnnnnnnnnnnnnnnnnnnnnnnnnnnnnnnnnnnnnnnnnnnnnnnnnnnnnnnnnnnnnnnnnnnnnnnnnnnnnnnnnnnnnnnnnnnnnnnnnnnnnnnnnnnnnnnnnnnnnnnnnnnnnnnnnnnnnnnnnnnnnnnnnnnnnnnnnnnnnnnnnnnnnnnnnnnnnnnnnnnnnnnnnnnnnnnnnnnnnnnnnnnnnnnnnnnnnnnnnnnnnnnnnnnnnnnnnnnnnnnnnnnnnnnnnnnnnnnnnnnnnnnnnnnnnnnnnnnnnnnnnnnnnnnnnnnnnnnnnnnnnnnnnnnnnnnnnnnnnnnnnnnnnnnnnnnnnnnnnnnnnnnnnnnnnnnnnnnnnnnnnnnnnnnnnnnnnnnnnnnnnnnnnnnnnnnnnnnnnnnnnnnnnnnnnnnnnnnnnnnnnnnnnnnnnnnnnnnnnnnnnnnnnnnnnnnnnnnnnnnnnnnnnnnnnnnnnnnnnnnnnnnnnnnnnnnnnnnnnnnnnnnnnnnnnnnnnnnnnnnnnnnnnnnnnnnnnnnnnnnnnnnnnnnnnnnnnnnnnnnnnnnnnnnnnnnnnnnnnnnnnnnnnnnnnnnnnnnnnnnnnnnnnnnnnnnnnnnnnnnnnnnnnnnnnnnnnnnnnnnnnnnnnnnnnnnnnnnnnnnnnnnnnnnnnnnnnnnnnnnnnnnnnnnnnnnnnnnnnnnnnnnnnnnnnnnnnnnnnnnnnnnnnnnnnnnnnnnnnnnnnnnnnnnnnnnnnnnnnnnnnnnnnnnnnnnnnnnnnnnnnnnnnnnnnnnnnnnnnnnnnnnnnnnnnnnnnnnnnnnnnnnnnnnnnnnnnnnnnnnnnnnnnnnnnnnnnnnnnnnnnnnnnnnnnnnnnnnnnnnnnnnnnnnnnnnnnnnnnnnnnnnnnnnnnnnnnnnnnnnnnnnnnnnnnnnnnnnnnnnnnnnnnnnnnnnnnnnnnnnnnnnnnnnnnnnnnnnnnnnnnnnnnnnnnnnnnnnnnnnnnnnnnnnnnnnnnnnnnnnnnnnnnnnnnnnnnnnnnnnnnnnnnnnnnnnnnnnnnnnnnnnnnnnnnnnnnnnnnnnnnnnnnnnnnnnnnnnnnnnnnnnnnnnnnnnnnnnnnnnnnnnnnnnnnnnnnnnnnnnnnnnnnnnnnnnnnnnnnnnnnnnnnnnnnnnnnnnnnnnnnnnnnnnnnnnnnnnnnnnnnnnnnnnnnnnnnnnnnnnnnnnnnnnnnnnnnnnnnnnnnnnnnnnnnnnnnnnnnnnnnnnnnnnnnnnnnnnnnnnnnnnnnnnnnnnnnnnnnnnnnnnnnnnnnnnnnnnnnnnnnnnnnnnnnnnnnnnnnnnnnnnnnnnnnnnnnnnnnnnnnnnnnnnnnnnnnnnnnnnnnnnnnnnnnnnnnnnnnnnnnnnnnnnnnnnnnnnnnnnnnnnnnnnnnnnnnnnnnnnnnnnnnnnnnnnnnnnnnnnnnnnnnnnnnnnnnnnnnnnnnnnnnnnnnnnnnnnnnnnnnnnnnnnnnnnnnnnnnnnnnnnnnnnnnnnnnnnnnnnnnnnnnnnnnnnnnnnnnnnnnnnnnnnnnnnnnnnnnnnnnnnnnnnnnnnnnnnnnnnnnnnnnnnnnnnnnnnnnnnnnnnnnnnnnnnnnnnnnnnnnnnnnnnnnnnnnnnnnnnnnnnnnnnnnnnnnnnnnnnnnnnnnnnnnnnnnnnnnnnnnnnnnnnnnnnnnnnnnnnnnnnnnnnnnnnnnnnnnnnnnnnnnnnnnnnnnnnnnnnnnnnnnnnnnnnnnnnnnnnnnnnnnnnnnnnnnnnnnnnnnnnnnnnnnnnnnnnnnnnnnnnnnnnnnnnnnnnnnnnnnnnnnnnnnnnnnnnnnnnnnnnnnnnnnnnnnnnnnnnnnnnnnnnnnnnnnnnnnnnnnnnnnnnnnnnnnnnnnnnnnnnnnnnnnnnnnnnnnnnnnnnnnnnnnnnnnnnnnnnnnnnnnnnnnnnnnnnnnnnnnnnnnnnnnnnnnnnnnnnnnnnnnnnnnnnnnnnnnnnnnnnnnnnnnnnnnnnnnnnnnnnnnnnnnnnnnnnnnnnnnnnnnnnnnnnnnnnnnnnnnnnnnnnnnnnnnnnnnnnnnnnnnnnnnnnnnnnnnnnnnnnnnnnnnnnnnnnnnnnnnnnnnnnnnnnnnnnnnnnnnnnnnnnnnnnnnnnnnnnnnnnnnnnnnnnnnnnnnnnnnnnnnnnnnnnnnnnnnnnnnnnnnnnnnnnnnnnnnnnnnnnnnnnnnnnnnnnnnnnnnnnnnnnnnnnnnnnnnnnnnnnnnnnnnnnnnnnnnnnnnnnnnnnnnnnnnnnnnnnnnnnnnnnnnnnnnnnnnnnnnnnnnnnnnnnnnnnnnnnnnnnnnnnnnnnnnnnnnnnnnnnnnnnnnnnnnnnnnnnnnnnnnnnnnnnnnnnnnnnnnnnnnnnnnnnnnnnnnnnnnnnnnnnnnnnnnnnnnnnnnnnnnnnnnnnnnnnnnnnnnnnnnnnnnnnnnnnnnnnnnnnnnnnnnnnnnnnnnnnnnnnnnnnnnnnnnnnnnnnnnnnnnnnnnnnnnnnnnnnnnnnnnnnnnnnnnnnnnnnnnnnnnnnnnnnnnnnnnnnnnnnnnnnnnnnnnnnnnnnnnnnnnnnnnnnnnnnnnnnnnnnnnnnnnnnnnnnnnnnnnnnnnnnnnnnnnnnnnnnnnnnnnnnnnnnnnnnnnnnnnnnnnnnnnnnnnnnnnnnnnnnnnnnnnnnnnnnnnnnnnnnnnnnnnnnnnnnnnnnnnnnnnnnnnnnnnnnnnnnnnnnnnnnnnnnnnnnnnnnnnnnnnnnnnnnnnnnnnnnnnnnnnnnnnnnnnnnnnnnnnnnnnnnnnnnnnnnnnnnnnnnnnnnnnnnnnnnnnnnnnnnnnnnnnnnnnnnnnnnnnnnnnnnnnnnnnnnnnnnnnnnnnnnnnnnnnnnnnnnnnnnnnnnnnnnnnnnnnnnnnnnnnnnnnnnnnnnnnnnnnnnnnnnnnnnnnnnnnnnnnnnnnnnnnnnnnnnnnnnnnnnnnnnnnnnnnnnnnnnnnnnnnnnnnnnnnnnnnnnnnnnnnnnnnnnnnnnnnnnnnnnnnnnnnnnnnnnnnnnnnnnnnnnnnnnnnnnnnnnnnnnnnnnnnnnnnnnnnnnnnnnnnnnnnnnnnnnnnnnnnnnnnnnnnnnnnnnnnnnnnnnnnnnnnnnnnnnnnnnnnnnnnnnnnnnnnnnnnnnnnnnnnnnnnnnnnnnnnnnnnnnnnnnnnnnnnnnnnnnnnnnnnnnnnnnnnnnnnnnnnnnnnnnnnnnnnnnnnnnnnnnnnnnnnnnnnnnnnnnnnnnnnnnnnnnnnnnnnnnnnnnnnnnnnnnnnnnnnnnnnnnnnnnnnnnnnnnnnnnnnnnnnnnnnnnnnnnnnnnnnnnnnnnnnnnnnnnnnnnnnnnnnnnnnnnnnnnnnnnnnnnnnnnnnnnnnnnnnnnnnnnnnnnnnnnnnnnnnnnnnnnnnnnnnnnnnnnnnnnnnnnnnnnnnnnnnnnnnnnnnnnnnnnnnnnnnnnnnnnnnnnnnnnnnnnnnnnnnnnnnnnnnnnnnnnnnnnnnnnnnnnnnnnnnnnnnnnnnnnnnnnnnnnnnnnnnnnnnnnnnnnnnnnnnnnnnnnnnnnnnnnnnnnnnnnnnnnnnnnnnnnnnnnnnnnnnnnnnnnnnnnnnnnnnnnnnnnnnnnnnnnnnnnnnnnnnnnnnnnnnnnnnnnnnnnnnnnnnnnnnnnnnnnnnnnnnnnnnnnnnnnnnnnnnnnnnnnnnnnnnnnnnnnnnnnnnnnnnnnnnnnnnnnnnnnnnnnnnnnnnnnnnnnnnnnnnnnnnnnnnnnnnnnnnnnnnnnnnnnnnnnnnnnnnnnnnnnnnnnnnnnnnnnnnnnnnnnnnnnnnnnnnnnnnnnnnnnnnnnnnnnnnnnnnnnnnnnnnnnnnnnnnnnnnnnnnnnnnnnnnnnnnnnnnnnnnnnnnnnnnnnnnnnnnnnnnnnnnnnnnnnnnnnnnnnnnnnnnnnnnnnnnnnnnnnnnnnnnnnnnnnnnnnnnnnnnnnnnnnnnnnnnnnnnnnnnnnnnnnnnnnnnnnnnnnnnnnnnnnnnnnnnnnnnnnnnnnnnnnnnnnnnnnnnnnnnnnnnnnnnnnnnnnnnnnnnnnnnnnnnnnnnnnnnnnnnnnnnnnnnnnnnnnnnnnnnnnnnnnnnnnnnnnnnnnnnnnnnnnnnnnnnnnnnnnnnnnnnnnnnnnnnnnnnnnnnnnnnnnnnnnnnnnnnnnnnnnnnnnnnnnnnnnnnnnnnnnnnnnnnnnnnnnnnnnnnnnnnnnnnnnnnnnnnnnnnnnnnnnnnnnnnnnnnnnnnnnnnnnnnnnnnnnnnnnnnnnnnnnnnnnnnnnnnnnnnnnnnnnnnnnnnnnnnnnnnnnnnnnnnnnnnnnnnnnnnnnnnnnnnnnnnnnnnnnnnnnnnnnnnnnnnnnnnnnnnnnnnnnnnnnnnnnnnnnnnnnnnnnnnnnnnnnnnnnnnnnnnnnnnnnnnnnnnnnnnnnnnnnnnnnnnnnnnnnnnnnnnnnnnnnnnnnnnnnnnnnnnnnnnnnnnnnnnnnnnnnnnnnnnnnnnnnnnnnnnnnnnnnnnnnnnnnnnnnnnnnnnnnnnnnnnnnnnnnnnnnnnnnnnnnnnnnnnnnnnnnnnnnnnnnnnnnnnnnnnnnnnnnnnnnnnnnnnnnnnnnnnnnnnnnnnnnnnnnnnnnnnnnnnnnnnnnnnnnnnnnnnnnnnnnnnnnnnnnnnnnnnnnnnnnnnnnnnnnnnnnnnnnnnnnnnnnnnnnnnnnnnnnnnnnnnnnnnnnnnnnnnnnnnnnnnnnnnnnnnnnnnnnnnnnnnnnnnnnnnnnnnnnnnnnnnnnnnnnnnnnnnnnnnnnnnnnnnnnnnnnnnnnnnnnnnnnnnnnnnnnnnnnnnnnnnnnnnnnnnnnnnnnnnnnnnnnnnnnnnnnnnnnnnnnnnnnnnnnnnnnnnnnnnnnnnnnnnnnnnnnnnnnnnnnnnnnnnnnnnnnnnnnnnnnnnnnnnnnnnnnnnnnnnnnnnnnnnnnnnnnnnnnnnnnnnnnnnnnnnnnnnnnnnnnnnnnnnnnnnnnnnnnnnnnnnnnnnnnnnnnnnnnnnnnnnnnnnnnnnnnnnnnnnnnnnnnnnnnnnnnnnnnnnnnnnnnnnnnnnnnnnnnnnnnnnnnnnnnnnnnnnnnnnnnnnnnnnnnnnnnnnnnnnnnnnnnnnnnnnnnnnnnnnnnnnnnnnnnnnnnnnnnnnnnnnnnnnnnnnnnnnnnnnnnnnnnnnnnnnnnnnnnnnnnnnnnnnnnnnnnnnnnnnnnnnnnnnnnnnnnnnnnnnnnnnnnnnnnnnnnnnnnnnnnnnnnnnnnnnnnnnnnnnnnnnnnnnnnnnnnnnnnnnnnnnnnnnnnnnnnnnnnnnnnnnnnnnnnnnnnnnnnnnnnnnnnnnnnnnnnnnnnnnnnnnnnnnnnnnnnnnnnnnnnnnnnnnnnnnnnnnnnnnnnnnnnnnnnnnnnnnnnnnnnnnnnnnnnnnnnnnnnnnnnnnnnnnnnnnnnnnnnnnnnnnnnnnnnnnnnnnnnnnnnnnnnnnnnnnnnnnnnnnnnnnnnnnnnnnnnnnnnnnnnnnnnnnnnnnnnnnnnnnnnnnnnnnnnnnnnnnnnnnnnnnnnnnnnnnnnnnnnnnnnnnnnnnnnnnnnnnnnnnnnnnnnnnnnnnnnnnnnnnnnnnnnnnnnnnnnnnnnnnnnnnnnnnnnnnnnnnnnnnnnnnnnnnnnnnnnnnnnnnnnnnnnnnnnnnnnnnnnnnnnnnnnnnnnnnnnnnnnnnnnnnnnnnnnnnnnnnnnnnnnnnnnnnnnnnnnnnnnnnnnnnnnnnnnnnnnnnnnnnnnnnnnnnnnnnnnnnnnnnnnnnnnnnnnnnnnnnnnnnnnnnnnnnnnnnnnnnnnnnnnnnnnnnnnnnnnnnnnnnnnnnnnnnnnnnnnnnnnnnnnnnnnnnnnnnnnnnnnnnnnnnnnnnnnnnnnnnnnnnnnnnnnnnnnnnnnnnnnnnnnnnnnnnnnnnnnnnnnnnnnnnnnnnnnnnnnnnnnnnnnnnnnnnnnnnnnnnnnnnnnnnnnnnnnnnnnnnnnnnnnnnnnnnnnnnnnnnnnnnnnnnnnnnnnnnnnnnnnnnnnnnnnnnnnnnnnnnnnnnnnnnnnnnnnnnnnnnnnnnnnnnnnnnnnnnnnnnnnnnnnnnnnnnnnnnnnnnnnnnnnnnnnnnnnnnnnnnnnnnnnnnnnnnnnnnnnnnnnnnnnnnnnnnnnnnnnnnnnnnnnnnnnnnnnnnnnnnnnnnnnnnnnnnnnnnnnnnnnnnnnnnnnnnnnnnnnnnnnnnnnnnnnnnnnnnnnnnnnnnnnnnnnnnnnnnnnnnnnnnnnnnnnnnnnnnnnnnnnnnnnnnnnnnnnnnnnnnnnnnnnnnnnnnnnnnnnnnnnnnnnnnnnnnnnnnnnnnnnnnnnnnnnnnnnnnnnnnnnnnnnnnnnnnnnnnnnnnnnnnnnnnnnnnnnnnnnnnnnnnnnnnnnnnnnnnnnnnnnnnnnnnnnnnnnnnnnnnnnnnnnnnnnnnnnnnnnnnnnnnnnnnnnnnnnnnnnnnnnnnnnnnnnnnnnnnnnnnnnnnnnnnnnnnnnnnnnnnnnnnnnnnnnnnnnnnnnnnnnnnnnnnnnnnnnnnnnnnnnnnnnnnnnnnnnnnnnnnnnnnnnnnnnnnnnnnnnnnnnnnnnnnnnnnnnnnnnnnnnnnnnnnnnnnnnnnnnnnnnnnnnnnnnnnnnnnnnnnnnnnnnnnnnnnnnnnnnnnnnnnnnnnnnnnnnnnnnnnnnnnnnnnnnnnnnnnnnnnnnnnnnnnnnnnnnnnnnnnnnnnnnnnnnnnnnnnnnnnnnnnnnnnnnnnnnnnnnnnnnnnnnnnnnnnnnnnnnnnnnnnnnnnnnnnnnnnnnnnnnnnnnnnnnnnnnnnnnnnnnnnnnnnnnnnnnnnnnnnnnnnnnnnnnnnnnnnnnnnnnnnnnnnnnnnnnnnnnnnnnnnnnnnnnnnnnnnnnnnnnnnnnnnnnnnnnnnnnnnnnnnnnnnnnnnnnnnnnnnnnnnnnnnnnnnnnnnnnnnnnnnnnnnnnnnnnnnnnnnnnnnnnnnnnnnnnnnnnnnnnnnnnnnnnnnnnnnnnnnnnnnnnnnnnnnnnnnnnnnnnnnnnnnnnnnnnnnnnnnnnnnnnnnnnnnnnnnnnnnnnnnnnnnnnnnnnnnnnnnnnnnnnnnnnnnnnnnnnnnnnnnnnnnnnnnnnnnnnnnnnnnnnnnnnnnnnnnnnnnnnnnnnnnnnnnnnnnnnnnnnnnnnnnnnnnnnnnnnnnnnnnnnnnnnnnnnnnnnnnnnnnnnnnnnnnnnnnnnnnnnnnnnnnnnnnnnnnnnnnnnnnnnnnnnnnnnnnnnnnnnnnnnnnnnnnnnnnnnnnnnnnnnnnnnnnnnnnnnnnnnnnnnnnnnnnnnnnnnnnnnnnnnnnnnnnnnnnnnnnnnnnnnnnnnnnnnnnnnnnnnnnnnnnnnnnnnnnnnnnnnnnnnnnnnnnnnnnnnnnnnnnnnnnnnnnnnnnnnnnnnnnnnnnnnnnnnnnnnnnnnnnnnnnnnnnnnnnnnnnnnnnnnnnnnnnnnnnnnnnnnnnnnnnnnnnnnnnnnnnnnnnnnnnnnnnnnnnnnnnnnnnnnnnnnnnnnnnnnnnnnnnnnnnnnnnnnnnnnnnnnnnnnnnnnnnnnnnnnnnnnnnnnnnnnnnnnnnnnnnnnnnnnnnnnnnnnnnnnnnnnnnnnnnnnnnnnnnnnnnnnnnnnnnnnnnnnnnnnnnnnnnnnnnnnnnnnnnnnnnnnnnnnnnnnnnnnnnnnnnnnnnnnnnnnnnnnnnnnnnnnnnnnnnnnnnnnnnnnnnnnnnnnnnnnnnnnnnnnnnnnnnnnnnnnnnnnnnnnnnnnnnnnnnnnnnnnnnnnnnnnnnnnnnnnnnnnnnnnnnnnnnnnnnnnnnnnnnnnnnnnnnnnnnnnnnnnnnnnnnnnnnnnnnnnnnnnnnnnnnnnnnnnnnnnnnnnnnnnnnnnnnnnnnnnnnnnnnnnnnnnnnnnnnnnnnnnnnnnnnnnnnnnnnnnnnnnnnnnnnnnnnnnnnnnnnnnnnnnnnnnnnnnnnnnnnnnnnnnnnnnnnnnnnnnnnnnnnnnnnnnnnnnnnnnnnnnnnnnnnnnnnnnnnnnnnnnnnnnnnnnnnnnnnnnnnnnnnnnnnnnnnnnnnnnnnnnnnnnnnnnnnnnnnnnnnnnnnnnnnnnnnnnnnnnnnnnnnnnnnnnnnnnnnnnnnnnnnnnnnnnnnnnnnnnnnnnnnnnnnnnnnnnnnnnnnnnnnnnnnnnnnnnnnnnnnnnnnnnnnnnnnnnnnnnnnnnnnnnnnnnnnnnnnnnnnnnnnnnnnnnnnnnnnnnnnnnnnnnnnnnnnnnnnnnnnnnnnnnnnnnnnnnnnnnnnnnnnnnnnnnnnnnnnnnnnnnnnnnnnnnnnnnnnnnnnnnnnnnnnnnnnnnnnnnnnnnnnnnnnnnnnnnnnnnnnnnnnnnnnnnnnnnnnnnnnnnnnnnnnnnnnnnnnnnnnnnnnnnnnnnnnnnnnnnnnnnnnnnnnnnnnnnnnnnnnnnnnnnnnnnnnnnnnnnnnnnnnnnnnnnnnnnnnnnnnnnnnnnnnnnnnnnnnnnnnnnnnnnnnnnnnnnnnnnnnnnnnnnnnnnnnnnnnnnnnnnnnnnnnnnnnnnnnnnnnnnnnnnnnnnnnnnnnnnnnnnnnnnnnnnnnnnnnnnnnnnnnnnnnnnnnnnnnnnnnnnnnnnnnnnnnnnnnnnnnnnnnnnnnnnnnnnnnnnnnnnnnnnnnnnnnnnnnnnnnnnnnnnnnnnnnnnnnnnnnnnnnnnnnnnnnnnnnnnnnnnnnnnnnnnnnnnnnnnnnnnnnnnnnnnnnnnnnnnnnnnnnnnnnnnnnnnnnnnnnnnnnnnnnnnnnnnnnnnnnnnnnnnnnnnnnnnnnnnnnnnnnnnnnnnnnnnnnnnnnnnnnnnnnnnnnnnnnnnnnnnnnnnnnnnnnnnnnnnnnnnnnnnnnnnnnnnnnnnnnnnnnnnnnnnnnnnnnnnnnnnnnnnnnnnnnnnnnnnnnnnnnnnnnnnnnnnnnnnnnnnnnnnnnnnnnnnnnnnnnnnnnnnnnnnnnnnnnnnnnnnnnnnnnnnnnnnnnnnnnnnnnnnnnnnnnnnnnnnnnnnnnnnnnnnnnnnnnnnnnnnnnnnnnnnnnnnnnnnnnnnnnnnnnnnnnnnnnnnnnnnnnnnnnnnnnnnnnnnnnnnnnnnnnnnnnnnnnnnnnnnnnnnnnnnnnnnnnnnnnnnnnnnnnnnnnnnnnnnnnnnnnnnnnnnnnnnnnnnnnnnnnnnnnnnnnnnnnnnnnnnnnnnnnnnnnnnnnnnnnnnnnnnnnnnnnnnnnnnnnnnnnnnnnnnnnnnnnnnnnnnnnnnnnnnnnnnnnnnnnnnnnnnnnnnnnnnnnnnnnnnnnnnnnnnnnnnnnnnnnnnnnnnnnnnnnnnnnnnnnnnnnnnnnnnnnnnnnnnnnnnnnnnnnnnnnnnnnnnnnnnnnnnnnnnnnnnnnnnnnnnnnnnnnnnnnnnnnnnnnnnnnnnnnnnnnnnnnnnnnnnnnnnnnnnnnnnnnnnnnnnnnnnnnnnnnnnnnnnnnnnnnnnnnnnnnnnnnnnnnnnnnnnnnnnnnnnnnnnnnnnnnnnnnnnnnnnnnnnnnnnnnnnnnnnnnnnnnnnnnnnnnnnnnnnnnnnnnnnnnnnnnnnnnnnnnnnnnnnnnnnnnnnnnnnnnnnnnnnnnnnnnnnnnnnnnnnnnnnnnnnnnnnnnnnnnnnnnnnnnnnnnnnnnnnnnnnnnnnnnnnnnnnnnnnnnnnnnnnnnnnnnnnnnnnnnnnnnnnnnnnnnnnnnnnnnnnnnnnnnnnnnnnnnnnnnnnnnnnnnnnnnnnnnnnnnnnnnnnnnnnnnnnnnnnnnnnnnnnnnnnnnnnnnnnnnnnnnnnnnnnnnnnnnnnnnnnnnnnnnnnnnnnnnnnnnnnnnnnnnnnnnnnnnnnnnnnnnnnnnnnnnnnnnnnnnnnnnnnnnnnnnnnnnnnnnnnnnnnnnnnnnnnnnnnnnnnnnnnnnnnnnnnnnnnnnnnnnnnnnnnnnnnnnnnnnnnnnnnnnnnnnnnnnnnnnnnnnnnnnnnnnnnnnnnnnnnnnnnnnnnnnnnnnnnnnnnnnnnnnnnnnnnnnnnnnnnnnnnnnnnnnnnnnnnnnnnnnnnnnnnnnnnnnnnnnnnnnnnnnnnnnnnnnnnnnnnnnnnnnnnnnnnnnnnnnnnnnnnnnnnnnnnnnnnnnnnnnnnnnnnnnnnnnnnnnnnnnnnnnnnnnnnnnnnnnnnnnnnnnnnnnnnnnnnnnnnnnnnnnnnnnnnnnnnnnnnnnnnnnnnnnnnnnnnnnnnnnnnnnnnnnnnnnnnnnnnnnnnnnnnnnnnnnnnnnnnnnnnnnnnnnnnnnnnnnnnnnnnnnnnnnnnnnnnnnnnnnnnnnnnnnnnnnnnnnnnnnnnnnnnnnnnnnnnnnnnnnnnnnnnnnnnnnnnnnnnnnnnnnnnnnnnnnnnnnnnnnnnnnnnnnnnnnnnnnnnnnnnnnnnnnnnnnnnnnnnnnnnnnnnnnnnnnnnnnnnnnnnnnnnnnnnnnnnnnnnnnnnnnnnnnnnnnnnnnnnnnnnnnnnnnnnnnnnnnnnnnnnnnnnnnnnnnnnnnnnnnnnnnnnnnnnnnnnnnnnnnnnnnnnnnnnnnnnnnnnnnnnnnnnnnnnnnnnnnnnnnnnnnnnnnnnnnnnnnnnnnnnnnnnnnnnnnnnnnnnnnnnnnnnnnnnnnnnnnnnnnnnnnnnnnnnnnnnnnnnnnnnnnnnnnnnnnnnnnnnnnnnnnnnnnnnnnnnnnnnnnnnnnnnnnnnnnnnnnnnnnnnnnnnnnnnnnnnnnnnnnnnnnnnnnnnnnnnnnnnnnnnnnnnnnnnnnnnnnnnnnnnnnnnnnnnnnnnnnnnnnnnnnnnnnnnnnnnnnnnnnnnnnnnnnnnnnnnnnnnnnnnnnnnnnnnnnnnnnnnnnnnnnnnnnnnnnnnnnnnnnnnnnnnnnnnnnnnnnnnnnnnnnnnnnnnnnnnnnnnnnnnnnnnnnnnnnnnnnnnnnnnnnnnnnnnnnnnnnnnnnnnnnnnnnnnnnnnnnnnnnnnnnnnnnnnnnnnnnnnnnnnnnnnnnnnnnnnnnnnnnnnnnnnnnnnnnnnnnnnnnnnnnnnnnnnnnnnnnnnnnnnnnnnnnnnnnnnnnnnnnnnnnnnnnnnnnnnnnnnnnnnnnnnnnnnnnnnnnnnnnnnnnnnnnnnnnnnnnnnnnnnnnnnnnnnnnnnnnnnnnnnnnnnnnnnnnnnnnnnnnnnnnnnnnnnnnnnnnnnnnnnnnnnnnnnnnnnnnnnnnnnnnnnnnnnnnnnnnnnnnnnnnnnnnnnnnnnnnnnnnnnnnnnnnnnnnnnnnnnnnnnnnnnnnnnnnnnnnnnnnnnnnnnnnnnnnnnnnnnnnnnnnnnnnnnnnnnnnnnnnnnnnnnnnnnnnnnnnnnnnnnnnnnnnnnnnnnnnnnnnnnnnnnnnnnnnnnnnnnnnnnnnnnnnnnnnnnnnnnnnnnnnnnnnnnnnnnnnnnnnnnnnnnnnnnnnnnnnnnnnnnnnnnnnnnnnnnnnnnnnnnnnnnnnnnnnnnnnnnnnnnnnnnnnnnnnnnnnnnnnnnnnnnnnnnnnnnnnnnnnnnnnnnnnnnnnnnnnnnnnnnnnnnnnnnnnnnnnnnnnnnnnnnnnnnnnnnnnnnnnnnnnnnnnnnnnnnnnnnnnnnnnnnnnnnnnnnnnnnnnnnnnnnnnnnnnnnnnnnnnnnnnnnnnnnnnnnnnnnnnnnnnnnnnnnnnnnnnnnnnnnnnnnnnnnnnnnnnnnnnnnnnnnnnnnnnnnnnnnnnnnnnnnnnnnnnnnnnnnnnnnnnnnnnnnnnnnnnnnnnnnnnnnnnnnnnnnnnnnnnnnnnnnnnnnnnnnnnnnnnnnnnnnnnnnnnnnnnnnnnnnnnnnnnnnnnnnnnnnnnnnnnnnnnnnnnnnnnnnnnnnnnnnnnnnnnnnnnnnnnnnnnnnnnnnnnnnnnnnnnnnnnnnnnnnnnnnnnnnnnnnnnnnnnnnnnnnnnnnnnnnnnnnnnnnnnnnnnnnnnnnnnnnnnnnnnnnnnnnnnnnnnnnnnnnnnnnnnnnnnnnnnnnnnnnnnnnnnnnnnnnnnnnnnnnnnnnnnnnnnnnnnnnnnnnnnnnnnnnnnnnnnnnnnnnnnnnnnnnnnnnnnnnnnnnnnnnnnnnnnnnnnnnnnnnnnnnnnnnnnnnnnnnnnnnnnnnnnnnnnnnnnnnnnnnnnnnnnnnnnnnnnnnnnnnnnnnnnnnnnnnnnnnnnnnnnnnnnnnnnnnnnnnnnnnnnnnnnnnnnnnnnnnnnnnnnnnnnnnnnnnnnnnnnnnnnnnnnnnnnnnnnnnnnnnnnnnnnnnnnnnnnnnnnnnnnnnnnnnnnnnnnnnnnnnnnnnnnnnnnnnnnnnnnnnnnnnnnnnnnnnnnnnnnnnnnnnnnnnnnnnnnnnnnnnnnnnnnnnnnnnnnnnnnnnnnnnnnnnnnnnnnnnnnnnnnnnnnnnnnnnnnnnnnnnnnnnnnnnnnnnnnnnnnnnnnnnnnnnnnnnnnnnnnnnnnnnnnnnnnnnnnnnnnnnnnnnnnnnnnnnnnnnnnnnnnnnnnnnnnnnnnnnnnnnnnnnnnnnnnnnnnnnnnnnnnnnnnnnnnnnnnnnnnnnnnnnnnnnnnnnnnnnnnnnnnnnnnnnnnnnnnnnnnnnnnnnnnnnnnnnnnnnnnnnnnnnnnnnnnnnnnnnnnnnnnnnnnnnnnnnnnnnnnnnnnnnnnnnnnnnnnnnnnnnnnnnnnnnnnnnnnnnnnnnnnnnnnnnnnnnnnnnnnnnnnnnnnnnnnnnnnnnnnnnnnnnnnnnnnnnnnnnnnnnnnnnnnnnnnnnnnnnnnnnnnnnnnnnnnnnnnnnnnnnnnnnnnnnnnnnnnnnnnnnnnnnnnnnnnnnnnnnnnnnnnnnnnnnnnnnnnnnnnnnnnnnnnnnnnnnnnnnnnnnnnnnnnnnnnnnnnnnnnnnnnnnnnnnnnnnnnnnnnnnnnnnnnnnnnnnnnnnnnnnnnnnnnnnnnnnnnnnnnnnnnnnnnnnnnnnnnnnnnnnnnnnnnnnnnnnnnnnnnnnnnnnnnnnnnnnnnnnnnnnnnnnnnnnnnnnnnnnnnnnnnnnnnnnnnnnnnnnnnnnnnnnnnnnnnnnnnnnnnnnnnnnnnnnnnnnnnnnnnnnnnnnnnnnnnnnnnnnnnnnnnnnnnnnnnnnnnnnnnnnnnnnnnnnnnnnnnnnnnnnnnnnnnnnnnnnnnnnnnnnnnnnnnnnnnnnnnnnnnnnnnnnnnnnnnnnnnnnnnnnnnnnnnnnnnnnnnnnnnnnnnnnnnnnnnnnnnnnnnnnnnnnnnnnnnnnnnnnnnnnnnnnnnnnnnnnnnnnnnnnnnnnnnnnnnnnnnnnnnnnnnnnnnnnnnnnnnnnnnnnnnnnnnnnnnnnnnnnnnnnnnnnnnnnnnnnnnnnnnnnnnnnnnnnnnnnnnnnnnnnnnnnnnnnnnnnnnnnnnnnnnnnnnnnnnnnnnnnnnnnnnnnnnnnnnnnnnnnnnnnnnnnnnnnnnnnnnnnnnnnnnnnnnnnnnnnnnnnnnnnnnnnnnnnnnnnnnnnnnnnnnnnnnnnnnnnnnnnnnnnnnnnnnnnnnnnnnnnnnnnnnnnnnnnnnnnnnnnnnnnnnnnnnnnnnnnnnnnnnnnnnnnnnnnnnnnnnnnnnnnnnnnnnnnnnnnnnnnnnnnnnnnnnnnnnnnnnnnnnnnnnnnnnnnnnnnnnnnnnnnnnnnnnnnnnnnnnnnnnnnnnnnnnnnnnnnnnnnnnnnnnnnnnnnnnnnnnnnnnnnnnnnnnnnnnnnnnnnnnnnnnnnnnnnnnnnnnnnnnnnnnnnnnnnnnnnnnnnnnnnnnnnnnnnnnnnnnnnnnnnnnnnnnnnnnnnnnnnnnnnnnnnnnnnnnnnnnnnnnnnnnnnnnnnnnnnnnnnnnnnnnnnnnnnnnnnnnnnnnnnnnnnnnnnnnnnnnnnnnnnnnnnnnnnnnnnnnnnnnnnnnnnnnnnnnnnnnnnnnnnnnnnnnnnnnnnnnnnnnnnnnnnnnnnnnnnnnnnnnnnnnnnnnnnnnnnnnnnnnnnnnnnnnnnnnnnnnnnnnnnnnnnnnnnnnnnnnnnnnnnnnnnnnnnnnnnnnnnnnnnnnnnnnnnnnnnnnnnnnnnnnnnnnnnnnnnnnnnnnnnnnnnnnnnnnnnnnnnnnnnnnnnnnnnnnnnnnnnnnnnnnnnnnnnnnnnnnnnnnnnnnnnnnnnnnnnnnnnnnnnnnnnnnnnnnnnnnnnnnnnnnnnnnnnnnnnnnnnnnnnnnnnnnnnnnnnnnnnnnnnnnnnnnnnnnnnnnnnnnnnnnnnnnnnnnnnnnnnnnnnnnnnnnnnnnnnnnnnnnnnnnnnnnnnnnnnnnnnnnnnnnnnnnnnnnnnnnnnnnnnnnnnnnnnnnnnnnnnnnnnnnnnnnnnnnnnnnnnnnnnnnnnnnnnnnnnnnnnnnnnnnnnnnnnnnnnnnnnnnnnnnnnnnnnnnnnnnnnnnnnnnnnnnnnnnnnnnnnnnnnnnnnnnnnnnnnnnnnnnnnnnnnnnnnnnnnnnnnnnnnnnnnnnnnnnnnnnnnnnnnnnnnnnnnnnnnnnnnnnnnnnnnnnnnnnnnnnnnnnnnnnnnnnnnnnnnnnnnnnnnnnnnnnnnnnnnnnnnnnnnnnnnnnnnnnnnnnnnnnnnnnnnnnnnnnnnnnnnnnnnnnnnnnnnnnnnnnnnnnnnnnnnnnnnnnnnnnnnnnnnnnnnnnnnnnnnnnnnnnnnnnnnnnnnnnnnnnnnnnnnnnnnnnnnnnnnnnnnnnnnnnnnnnnnnnnnnnnnnnnnnnnnnnnnnnnnnnnnnnnnnnnnnnnnnnnnnnnnnnnnnnnnnnnnnnnnnnnnnnnnnnnnnnnnnnnnnnnnnnnnnnnnnnnnnnnnnnnnnnnnnnnnnnnnnnnnnnnnnnnnnnnnnnnnnnnnnnnnnnnnnnnnnnnnnnnnnnnnnnnnnnnnnnnnnnnnnnnnnnnnnnnnnnnnnnnnnnnnnnnnnnnnnnnnnnnnnnnnnnnnnnnnnnnnnnnnnnnnnnnnnnnnnnnnnnnnnnnnnnnnnnnnnnnnnnnnnnnnnnnnnnnnnnnnnnnnnnnnnnnnnnnnnnnnnnnnnnnnnnnnnnnnnnnnnnnnnnnnnnnnnnnnnnnnnnnnnnnnnnnnnnnnnnnnnnnnnnnnnnnnnnnnnnnnnnnnnnnnnnnnnnnnnnnnnnnnnnnnnnnnnnnnnnnnnnnnnnnnnnnnnnnnnnnnnnnnnnnnnnnnnnnnnnnnnnnnnnnnnnnnnnnnnnnnnnnnnnnnnnnnnnnnnnnnnnnnnnnnnnnnnnnnnnnnnnnnnnnnnnnnnnnnnnnnnnnnnnnnnnnnnnnnnnnnnnnnnnnnnnnnnnnnnnnnnnnnnnnnnnnnnnnnnnnnnnnnnnnnnnnnnnnnnnnnnnnnnnnnnnnnnnnnnnnnnnnnnnnnnnnnnnnnnnnnnnnnnnnnnnnnnnnnnnnnnnnnnnnnnnnnnnnnnnnnnnnnnnnnnnnnnnnnnnnnnnnnnnnnnnnnnnnnnnnnnnnnnnnnnnnnnnnnnnnnnnnnnnnnnnnnnnnnnnnnnnnnnnnnnnnnnnnnnnnnnnnnnnnnnnnnnnnnnnnnnnnnnnnnnnnnnnnnnnnnnnnnnnnnnnnnnnnnnnnnnnnnnnnnnnnnnnnnnnnnnnnnnnnnnnnnnnnnnnnnnnnnnnnnnnnnnnnnnnnnnnnnnnnnnnnnnnnnnnnnnnnnnnnnnnnnnnnnnnnnnnnnnnnnnnnnnnnnnnnnnnnnnnnnnnnnnnnnnnnnnnnnnnnnnnnnnnnnnnnnnnnnnnnnnnnnnnnnnnnnnnnnnnnnnnnnnnnnnnnnnnnnnnnnnnnnnnnnnnnnnnnnnnnnnnnnnnnnnnnnnnnnnnnnnnnnnnnnnnnnnnnnnnnnnnnnnnnnnnnnnnnnnnnnnnnnnnnnnnnnnnnnnnnnnnnnnnnnnnnnnnnnnnnnnnnnnnnnnnnnnnnnnnnnnnnnnnnnnnnnnnnnnnnnnnnnnnnnnnnnnnnnnnnnnnnnnnnnnnnnnnnnnnnnnnnnnnnnnnnnnnnnnnnnnnnnnnnnnnnnnnnnnnnnnnnnnnnnnnnnnnnnnnnnnnnnnnnnnnnnnnnnnnnnnnnnnnnnnnnnnnnnnnnnnnnnnnnnnnnnnnnnnnnnnnnnnnnnnnnnnnnnnnnnnnnnnnnnnnnnnnnnnnnnnnnnnnnnnnnnnnnnnnnnnnnnnnnnnnnnnnnnnnnnnnnnnnnnnnnnnnnnnnnnnnnnnnnnnnnnnnnnnnnnnnnnnnnnnnnnnnnnnnnnnnnnnnnnnnnnnnnnnnnnnnnnnnnnnnnnnnnnnnnnnnnnnnnnnnnnnnnnnnnnnnnnnnnnnnnnnnnnnnnnnnnnnnnnnnnnnnnnnnnnnnnnnnnnnnnnnnnnnnnnnnnnnnnnnnnnnnnnnnnnnnnnnnnnnnnnnnnnnnnnnnnnnnnnnnnnnnnnnnnnnnnnnnnnnnnnnnnnnnnnnnnnnnnnnnnnnnnnnnnnnnnnnnnnnnnnnnnnnnnnnnnnnnnnnnnnnnnnnnnnnnnnnnnnnnnnnnnnnnnnnnnnnnnnnnnnnnnnnnnnnnnnnnnnnnnnnnnnnnnnnnnnnnnnnnnnnnnnnnnnnnnnnnnnnnnnnnnnnnnnnnnnnnnnnnnnnnnnnnnnnnnnnnnnnnnnnnnnnnnnnnnnnnnnnnnnnnnnnnnnnnnnnnnnnnnnnnnnnnnnnnnnnnnnnnnnnnnnnnnnnnnnnnnnnnnnnnnnnnnnnnnnnnnnnnnnnnnnnnnnnnnnnnnnnnnnnnnnnnnnnnnnnnnnnnnnnnnnnnnnnnnnnnnnnnnnnnnnnnnnnnnnnnnnnnnnnnnnnnnnnnnnnnnnnnnnnnnnnnnnnnnnnnnnnnnnnnnnnnnnnnnnnnnnnnnnnnnnnnnnnnnnnnnnnnnnnnnnnnnnnnnnnnnnnnnnnnnnnnnnnnnnnnnnnnnnnnnnnnnnnnnnnnnnnnnnnnnnnnnnnnnnnnnnnnnnnnnnnnnnnnnnnnnnnnnnnnnnnnnnnnnnnnnnnnnnnnnnnnnnnnnnnnnnnnnnnnnnnnnnnnnnnnnnnnnnnnnnnnnnnnnnnnnnnnnnnnnnnnnnnnnnnnnnnnnnnnnnnnnnnnnnnnnnnnnnnnnnnnnnnnnnnnnnnnnnnnnnnnnnnnnnnnnnnnnnnnnnnnnnnnnnnnnnnnnnnnnnnnnnnnnnnnnnnnnnnnnnnnnnnnnnnnnnnnnnnnnnnnnnnnnnnnnnnnnnnnnnnnnnnnnnnnnnnnnnnnnnnnnnnnnnnnnnnnnnnnnnnnnnnnnnnnnnnnnnnnnnnnnnnnnnnnnnnnnnnnnnnnnnnnnnnnnnnnnnnnnnnnnnnnnnnnnnnnnnnnnnnnnnnnnnnnnnnnnnnnnnnnnnnnnnnnnnnnnnnnnnnnnnnnnnnnnnnnnnnnnnnnnnnnnnnnnnnnnnnnnnnnnnnnnnnnnnnnnnnnnnnnnnnnnnnnnnnnnnnnnnnnnnnnnnnnnnnnnnnnnnnnnnnnnnnnnnnnnnnnnnnnnnnnnnnnnnnnnnnnnnnnnnnnnnnnnnnnnnnnnnnnnnnnnnnnnnnnnnnnnnnnnnnnnnnnnnnnnnnnnnnnnnnnnnnnnnnnnnnnnnnnnnnnnnnnnnnnnnnnnnnnnnnnnnnnnnnnnnnnnnnnnnnnnnnnnnnnnnnnnnnnnnnnnnnnnnnnnnnnnnnnnnnnnnnnnnnnnnnnnnnnnnnnnnnnnnnnnnnnnnnnnnnnnnnnnnnnnnnnnnnnnnnnnnnnnnnnnnnnnnnnnnnnnnnnnnnnnnnnnnnnnnnnnnnnnnnnnnnnnnnnnnnnnnnnnnnnnnnnnnnnnnnnnnnnnnnnnnnnnnnnnnnnnnnnnnnnnnnnnnnnnnnnnnnnnnnnnnnnnnnnnnnnnnnnnnnnnnnnnnnnnnnnnnnnnnnnnnnnnnnnnnnnnnnnnnnnnnnnnnnnnnnnnnnnnnnnnnnnnnnnnnnnnnnnnnnnnnnnnnnnnnnnnnnnnnnnnnnnnnnnnnnnnnnnnnnnnnnnnnnnnnnnnnnnnnnnnnnnnnnnnnnnnnnnnnnnnnnnnnnnnnnnnnnnnnnnnnnnnnnnnnnnnnnnnnnnnnnnnnnnnnnnnnnnnnnnnnnnnnnnnnnnnnnnnnnnnnnnnnnnnnnnnnnnnnnnnnnnnnnnnnnnnnnnnnnnnnnnnnnnnnnnnnnnnnnnnnnnnnnnnnnnnnnnnnnnnnnnnnnnnnnnnnnnnnnnnnnnnnnnnnnnnnnnnnnnnnnnnnnnnnnnnnnnnnnnnnnnnnnnnnnnnnnnnnnnnnnnnnnnnnnnnnnnnnnnnnnnnnnnnnnnnnnnnnnnnnnnnnnnnnnnnnnnnnnnnnnnnnnnnnnnnnnnnnnnnnnnnnnnnnnnnnnnnnnnnnnnnnnnnnnnnnnnnnnnnnnnnnnnnnnnnnnnnnnnnnnnnnnnnnnnnnnnnnnnnnnnnnnnnnnnnnnnnnnnnnnnnnnnnnnnnnnnnnnnnnnnnnnnnnnnnnnnnnnnnnnnnnnnnnnnnnnnnnnnnnnnnnnnnnnnnnnnnnnnnnnnnnnnnnnnnnnnnnnnnnnnnnnnnnnnnnnnnnnnnnnnnnnnnnnnnnnnnnnnnnnnnnnnnnnnnnnnnnnnnnnnnnnnnnnnnnnnnnnnnnnnnnnnnnnnnnnnnnnnnnnnnnnnnnnnnnnnnnnnnnnnnnnnnnnnnnnnnnnnnnnnnnnnnnnnnnnnnnnnnnnnnnnnnnnnnnnnnnnnnnnnnnnnnnnnnnnnnnnnnnnnnnnnnnnnnnnnnnnnnnnnnnnnnnnnnnnnnnnnnnnnnnnnnnnnnnnnnnnnnnnnnnnnnnnnnnnnnnnnnnnnnnnnnnnnnnnnnnnnnnnnnnnnnnnnnnnnnnnnnnnnnnnnnnnnnnnnnnnnnnnnnnnnnnnnnnnnnnnnnnnnnnnnnnnnnnnnnnnnnnnnnnnnnnnnnnnnnnnnnnnnnnnnnnnnnnnnnnnnnnnnnnnnnnnnnnnnnnnnnnnnnnnnnnnnnnnnnnnnnnnnnnnnnnnnnnnnnnnnnnnnnnnnnnnnnnnnnnnnnnnnnnnnnnnnnnnnnnnnnnnnnnnnnnnnnnnnnnnnnnnnnnnnnnnnnnnnnnnnnnnnnnnnnnnnnnnnnnnnnnnnnnnnnnnnnnnnnnnnnnnnnnnnnnnnnnnnnnnnnnnnnnnnnnnnnnnnnnnnnnnnnnnnnnnnnnnnnnnnnnnnnnnnnnnnnnnnnnnnnnnnnnnnnnnnnnnnnnnnnnnnnnnnnnnnnnnnnnnnnnnnnnnnnnnnnnnnnnnnnnnnnnnnnnnnnnnnnnnnnnnnnnnnnnnnnnnnnnnnnnnnnnnnnnnnnnnnnnnnnnnnnnnnnnnnnnnnnnnnnnnnnnnnnnnnnnnnnnnnnnnnnnnnnnnnnnnnnnnnnnnnnnnnnnnnnnnnnnnnnnnnnnnnnnnnnnnnnnnnnnnnnnnnnnnnnnnnnnnnnnnnnnnnnnnnnnnnnnnnnnnnnnnnnnnnnnnnnnnnnnnnnnnnnnnnnnnnnnnnnnnnnnnnnnnnnnnnnnnnnnnnnnnnnnnnnnnnnnnnnnnnnnnnnnnnnnnnnnnnnnnnnnnnnnnnnnnnnnnnnnnnnnnnnnnnnnnnnnnnnnnnnnnnnnnnnnnnnnnnnnnnnnnnnnnnnnnnnnnnnnnnnnnnnnnnnnnnnnnnnnnnnnnnnnnnnnnnnnnnnnnnnnnnnnnnnnnnnnnnnnnnnnnnnnnnnnnnnnnnnnnnnnnnnnnnnnnnnnnnnnnnnnnnnnnnnnnnnnnnnnnnnnnnnnnnnnnnnnnnnnnnnnnnnnnnnnnnnnnnnnnnnnnnnnnnnnnnnnnnnnnnnnnnnnnnnnnnnnnnnnnnnnnnnnnnnnnnnnnnnnnnnnnnnnnnnnnnnnnnnnnnnnnnnnnnnnnnnnnnnnnnnnnnnnnnnnnnnnnnnnnnnnnnnnnnnnnnnnnnnnnnnnnnnnnnnnnnnnnnnnnnnnnnnnnnnnnnnnnnnnnnnnnnnnnnnnnnnnnnnnnnnnnnnnnnnnnnnnnnnnnnnnnnnnnnnnnnnnnnnnnnnnnnnnnnnnnnnnnnnnnnnnnnnnnnnnnnnnnnnnnnnnnnnnnnnnnnnnnnnnnnnnnnnnnnnnnnnnnnnnnnnnnnnnnnnnnnnnnnnnnnnnnnnnnnnnnnnnnnnnnnnnnnnnnnnnnnnnnnnnnnnnnnnnnnnnnnnnnnnnnnnnnnnnnnnnnnnnnnnnnnnnnnnnnnnnnnnnnnnnnnnnnnnnnnnnnnnnnnnnnnnnnnnnnnnnnnnnnnnnnnnnnnnnnnnnnnnnnnnnnnnnnnnnnnnnnnnnnnnnnnnnnnnnnnnnnnnnnnnnnnnnnnnnnnnnnnnnnnnnnnnnnnnnnnnnnnnnnnnnnnnnnnnnnnnnnnnnnnnnnnnnnnnnnnnnnnnnnnnnnnnnnnnnnnnnnnnnnnnnnnnnnnnnnnnnnnnnnnnnnnnnnnnnnnnnnnnnnnnnnnnnnnnnnnnnnnnnnnnnnnnnnnnnnnnnnnnnnnnnnnnnnnnnnnnnnnnnnnnnnnnnnnnnnnnnnnnnnnnnnnnnnnnnnnnnnnnnnnnnnnnnnnnnnnnnnnnnnnnnnnnnnnnnnnnnnnnnnnnnnnnnnnnnnnnnnnnnnnnnnnnnnnnnnnnnnnnnnnnnnnnnnnnnnnnnnnnnnnnnnnnnnnnnnnnnnnnnnnnnnnnnnnnnnnnnnnnnnnnnnnnnnnnnnnnnnnnnnnnnnnnnnnnnnnnnnnnnnnnnnnnnnnnnnnnnnnnnnnnnnnnnnnnnnnnnnnnnnnnnnnnnnnnnnnnnnnnnnnnnnnnnnnnnnnnnnnnnnnnnnnnnnnnnnnnnnnnnnnnnnnnnnnnnnnnnnnnnnnnnnnnnnnnnnnnnnnnnnnnnnnnnnnnnnnnnnnnnnnnnnnnnnnnnnnnnnnnnnnnnnnnnnnnnnnnnnnnnnnnnnnnnnnnnnnnnnnnnnnnnnnnnnnnnnnnnnnnnnnnnnnnnnnnnnnnnnnnnnnnnnnnnnnnnnnnnnnnnnnnnnnnnnnnnnnnnnnnnnnnnnnnnnnnnnnnnnnnnnnnnnnnnnnnnnnnnnnnnnnnnnnnnnnnnnnnnnnnnnnnnnnnnnnnnnnnnnnnnnnnnnnnnnnnnnnnnnnnnnnnnnnnnnnnnnnnnnnnnnnnnnnnnnnnnnnnnnnnnnnnnnnnnnnnnnnnnnnnnnnnnnnnnnnnnnnnnnnnnnnnnnnnnnnnnnnnnnnnnnnnnnnnnnnnnnnnnnnnnnnnnnnnnnnnnnnnnnnnnnnnnnnnnnnnnnnnnnnnnnnnnnnnnnnnnnnnnnnnnnnnnnnnnnnnnnnnnnnnnnnnnnnnnnnnnnnnnnnnnnnnnnnnnnnnnnnnnnnnnnnnnnnnnnnnnnnnnnnnnnnnnnnnnnnnnnnnnnnnnnnnnnnnnnnnnnnnnnnnnnnnnnnnnnnnnnnnnnnnnnnnnnnnnnnnnnnnnnnnnnnnnnnnnnnnnnnnnnnnnnnnnnnnnnnnnnnnnnnnnnnnnnnnnnnnnnnnnnnnnnnnnnnnnnnnnnnnnnnnnnnnnnnnnnnnnnnnnnnnnnnnnnnnnnnnnnnnnnnnnnnnnnnnnnnnnnnnnnnnnnnnnnnnnnnnnnnnnnnnnnnnnnnnnnnnnnnnnnnnnnnnnnnnnnnnnnnnnnnnnnnnnnnnnnnnnnnnnnnnnnnnnnnnnnnnnnnnnnnnnnnnnnnnnnnnnnnnnnnnnnnnnnnnnnnnnnnnnnnnnnnnnnnnnnnnnnnnnnnnnnnnnnnnnnnnnnnnnnnnnnnnnnnnnnnnnnnnnnnnnnnnnnnnnnnnnnnnnnnnnnnnnnnnnnnnnnnnnnnnnnnnnnnnnnnnnnnnnnnnnnnnnnnnnnnnnnnnnnnnnnnnnnnnnnnnnnnnnnnnnnnnnnnnnnnnnnnnnnnnnnnnnnnnnnnnnnnnnnnnnnnnnnnnnnnnnnnnnnnnnnnnnnnnnnnnnnnnnnnnnnnnnnnnnnnnnnnnnnnnnnnnnnnnnnnnnnnnnnnnnnnnnnnnnnnnnnnnnnnnnnnnnnnnnnnnnnnnnnnnnnnnnnnnnnnnnnnnnnnnnnnnnnnnnnnnnnnnnnnnnnnnnnnnnnnnnnnnnnnnnnnnnnnnnnnnnnnnnnnnnnnnnnnnnnnnnnnnnnnnnnnnnnnnnnnnnnnnnnnnnnnnnnnnnnnnnnnnnnnnnnnnnnnnnnnnnnnnnnnnnnnnnnnnnnnnnnnnnnnnnnnnnnnnnnnnnnnnnnnnnnnnnnnnnnnnnnnnnnnnnnnnnnnnnnnnnnnnnnnnnnnnnnnnnnnnnnnnnnnnnnnnnnnnnnnnnnnnnnnnnnnnnnnnnnnnnnnnnnnnnnnnnnnnnnnnnnnnnnnnnnnnnnnnnnnnnnnnnnnnnnnnnnnnnnnnnnnnnnnnnnnnnnnnnnnnnnnnnnnnnnnnnnnnnnnnnnnnnnnnnnnnnnnnnnnnnnnnnnnnnnnnnnnnnnnnnnnnnnnnnnnnnnnnnnnnnnnnnnnnnnnnnnnnnnnnnnnnnnnnnnnnnnnnnnnnnnnnnnnnnnnnnnnnnnnnnnnnnnnnnnnnnnnnnnnnnnnnnnnnnnnnnnnnnnnnnnnnnnnnnnnnnnnnnnnnnnnnnnnnnnnnnnnnnnnnnnnnnnnnnnnnnnnnnnnnnnnnnnnnnnnnnnnnnnnnnnnnnnnnnnnnnnnnnnnnnnnnnnnnnnnnnnnnnnnnnnnnnnnnnnnnnnnnnnnnnnnnnnnnnnnnnnnnnnnnnnnnnnnnnnnnnnnnnnnnnnnnnnnnnnnnnnnnnnnnnnnnnnnnnnnnnnnnnnnnnnnnnnnnnnnnnnnnnnnnnnnnnnnnnnnnnnnnnnnnnnnnnnnnnnnnnnnnnnnnnnnnnnnnnnnnnnnnnnnnnnnnnnnnnnnnnnnnnnnnnnnnnnnnnnnnnnnnnnnnnnnnnnnnnnnnnnnnnnnnnnnnnnnnnnnnnnnnnnnnnnnnnnnnnnnnnnnnnnnnnnnnnnnnnnnnnnnnnnnnnnnnnnnnnnnnnnnnnnnnnnnnnnnnnnnnnnnnnnnnnnnnnnnnnnnnnnnnnnnnnnnnnnnnnnnnnnnnnnnnnnnnnnnnnnnnnnnnnnnnnnnnnnnnnnnnnnnnnnnnnnnnnnnnnnnnnnnnnnnnnnnnnnnnnnnnnnnnnnnnnnnnnnnnnnnnnnnnnnnnnnnnnnnnnnnnnnnnnnnnnnnnnnnnnnnnnnnnnnnnnnnnnnnnnnnnnnnnnnnnnnnnnnnnnnnnnnnnnnnnnnnnnnnnnnnnnnnnnnnnnnnnnnnnnnnnnnnnnnnnnnnnnnnnnnnnnnnnnnnnnnnnnnnnnnnnnnnnnnnnnnnnnnnnnnnnnnnnnnnnnnnnnnnnnnnnnnnnnnnnnnnnnnnnnnnnnnnnnnnnnnnnnnnnnnnnnnnnnnnnnnnnnnnnnnnnnnnnnnnnnnnnnnnnnnnnnnnnnnnnnnnnnnnnnnnnnnnnnnnnnnnnnnnnnnnnnnnnnnnnnnnnnnnnnnnnnnnnnnnnnnnnnnnnnnnnnnnnnnnnnnnnnnnnnnnnnnnnnnnnnnnnnnnnnnnnnnnnnnnnnnnnnnnnnnnnnnnnnnnnnnnnnnnnnnnnnnnnnnnnnnnnnnnnnnnnnnnnnnnnnnnnnnnnnnnnnnnnnnnnnnnnnnnnnnnnnnnnnnnnnnnnnnnnnnnnnnnnnnnnnnnnnnnnnnnnnnnnnnnnnnnnnnnnnnnnnnnnnnnnnnnnnnnnnnnnnnnnnnnnnnnnnnnnnnnnnnnnnnnnnnnnnnnnnnnnnnnnnnnnnnnnnnnnnnnnnnnnnnnnnnnnnnnnnnnnnnnnnnnnnnnnnnnnnnnnnnnnnnnnnnnnnnnnnnnnnnnnnnnnnnnnnnnnnnnnnnnnnnnnnnnnnnnnnnnnnnnnnnnnnnnnnnnnnnnnnnnnnnnnnnnnnnnnnnnnnnnnnnnnnnnnnnnnnnnnnnnnnnnnnnnnnnnnnnnnnnnnnnnnnnnnnnnnnnnnnnnnnnnnnnnnnnnnnnnnnnnnnnnnnnnnnnnnnnnnnnnnnnnnnnnnnnnnnnnnnnnnnnnnnnnnnnnnnnnnnnnnnnnnnnnnnnnnnnnnnnnnnnnnnnnnnnnnnnnnnnnnnnnnnnnnnnnnnnnnnnnnnnnnnnnnnnnnnnnnnnnnnnnnnnnnnnnnnnnnnnnnnnnnnnnnnnnnnnnnnnnnnnnnnnnnnnnnnnnnnnnnnnnnnnnnnnnnnnnnnnnnnnnnnnnnnnnnnnnnnnnnnnnnnnnnnnnnnnnnnnnnnnnnnnnnnnnnnnnnnnnnnnnnnnnnnnnnnnnnnnnnnnnnnnnnnnnnnnnnnnnnnnnnnnnnnnnnnnnnnnnnnnnnnnnnnnnnnnnnnnnnnnnnnnnnnnnnnnnnnnnnnnnnnnnnnnnnnnnnnnnnnnnnnnnnnnnnnnnnnnnnnnnnnnnnnnnnnnnnnnnnnnnnnnnnnnnnnnnnnnnnnnnnnnnnnnnnnnnnnnnnnnnnnnnnnnnnnnnnnnnnnnnnnnnnnnnnnnnnnnnnnnnnnnnnnnnnnnnnnnnnnnnnnnnnnnnnnnnnnnnnnnnnnnnnnnnnnnnnnnnnnnnnnnnnnnnnnnnnnnnnnnnnnnnnnnnnnnnnnnnnnnnnnnnnnnnnnnnnnnnnnnnnnnnnnnnnnnnnnnnnnnnnnnnnnnnnnnnnnnnnnnnnnnnnnnnnnnnnnnnnnnnnnnnnnnnnnnnnnnnnnnnnnnnnnnnnnnnnnnnnnnnnnnnnnnnnnnnnnnnnnnnnnnnnnnnnnnnnnnnnnnnnnnnnnnnnnnnnnnnnnnnnnnnnnnnnnnnnnnnnnnnnnnnnnnnnnnnnnnnnnnnnnnnnnnnnnnnnnnnnnnnnnnnnnnnnnnnnnnnnnnnnnnnnnnnnnnnnnnnnnnnnnnnnnnnnnnnnnnnnnnnnnnnnnnnnnnnnnnnnnnnnnnnnnnnnnnnnnnnnnnnnnnnnnnnnnnnnnnnnnnnnnnnnnnnnnnnnnnnnnnnnnnnnnnnnnnnnnnnnnnnnnnnnnnnnnnnnnnnnnnnnnnnnnnnnnnnnnnnnnnnnnnnnnnnnnnnnnnnnnnnnnnnnnnnnnnnnnnnnnnnnnnnnnnnnnnnnnnnnnnnnnnnnnnnnnnnnnnnnnnnnnnnnnnnnnnnnnnnnnnnnnnnnnnnnnnnnnnnnnnnnnnnnnnnnnnnnnnnnnnnnnnnnnnnnnnnnnnnnnnnnnnnnnnnnnnnnnnnnnnnnnnnnnnnnnnnnnnnnnnnnnnnnnnnnnnnnnnnnnnnnnnnnnnnnnnnnnnnnnnnnnnnnnnnnnnnnnnnnnnnnnnnnnnnnnnnnnnnnnnnnnnnnnnnnnnnnnnnnnnnnnnnnnnnnnnnnnnnnnnnnnnnnnnnnnnnnnnnnnnnnnnnnnnnnnnnnnnnnnnnnnnnnnnnnnnnnnnnnnnnnnnnnnnnnnnnnnnnnnnnnnnnnnnnnnnnnnnnnnnnnnnnnnnnnnnnnnnnnnnnnnnnnnnnnnnnnnnnnnnnnnnnnnnnnnnnnnnnnnnnnnnnnnnnnnnnnnnnnnnnnnnnnnnnnnnnnnnnnnnnnnnnnnnnnnnnnnnnnnnnnnnnnnnnnnnnnnnnnnnnnnnnnnnnnnnnnnnnnnnnnnnnnnnnnnnnnnnnnnnnnnnnnnnnnnnnnnnnnnnnnnnnnnnnnnnnnnnnnnnnnnnnnnnnnnnnnnnnnnnnnnnnnnnnnnnnnnnnnnnnnnnnnnnnnnnnnnnnnnnnnnnnnnnnnnnnnnnnnnnnnnnnnnnnnnnnnnnnnnnnnnnnnnnnnnnnnnnnnnnnnnnnnnnnnnnnnnnnnnnnnnnnnnnnnnnnnnnnnnnnnnnnnnnnnnnnnnnnnnnnnnnnnnnnnnnnnnnnnnnnnnnnnnnnnnnnnnnnnnnnnnnnnnnnnnnnnnnnnnnnnnnnnnnnnnnnnnnnnnnnnnnnnnnnnnnnnnnnnnnnnnnnnnnnnnnnnnnnnnnnnnnnnnnnnnnnnnnnnnnnnnnnnnnnnnnnnnnnnnnnnnnnnnnnnnnnnnnnnnnnnnnnnnnnnnnnnnnnnnnnnnnnnnnnnnnnnnnnnnnnnnnnnnnnnnnnnnnnnnnnnnnnnnnnnnnnnnnnnnnnnnnnnnnnnnnnnnnnnnnnnnnnnnnnnnnnnnnnnnnnnnnnnnnnnnnnnnnnnnnnnnnnnnnnnnnnnnnnnnnnnnnnnnnnnnnnnnnnnnnnnnnnnnnnnnnnnnnnnnnnnnnnnnnnnnnnnnnnnnnnnnnnnnnnnnnnnnnnnnnnnnnnnnnnnnnnnnnnnnnnnnnnnnnnnnnnnnnnnnnnnnnnnnnnnnnnnnnnnnnnnnnnnnnnnnnnnnnnnnnnnnnnnnnnnnnnnnnnnnnnnnnnnnnnnnnnnnnnnnnnnnnnnnnnnnnnnnnnnnnnnnnnnnnnnnnnnnnnnnnnnnnnnnnnnnnnnnnnnnnnnnnnnnnnnnnnnnnnnnnnnnnnnnnnnnnnnnnnnnnnnnnnnnnnnnnnnnnnnnnnnnnnnnnnnnnnnnnnnnnnnnnnnnnnnnnnnnnnnnnnnnnnnnnnnnnnnnnnnnnnnnnnnnnnnnnnnnnnnnnnnnnnnnnnnnnnnnnnnnnnnnnnnnnnnnnnnnnnnnnnnnnnnnnnnnnnnnnnnnnnnnnnnnnnnnnnnnnnnnnnnnnnnnnnnnnnnnnnnnnnnnnnnnnnnnnnnnnnnnnnnnnnnnnnnnnnnnnnnnnnnnnnnnnnnnnnnnnnnnnnnnnnnnnnnnnnnnnnnnnnnnnnnnnnnnnnnnnnnnnnnnnnnnnnnnnnnnnnnnnnnnnnnnnnnnnnnnnnnnnnnnnnnnnnnnnnnnnnnnnnnnnnnnnnnnnnnnnnnnnnnnnnnnnnnnnnnnnnnnnnnnnnnnnnnnnnnnnnnnnnnnnnnnnnnnnnnnnnnnnnnnnnnnnnnnnnnnnnnnnnnnnnnnnnnnnnnnnnnnnnnnnnnnnnnnnnnnnnnnnnnnnnnnnnnnnnnnnnnnnnnnnnnnnnnnnnnnnnnnnnnnnnnnnnnnnnnnnnnnnnnnnnnnnnnnnnnnnnnnnnnnnnnnnnnnnnnnnnnnnnnnnnnnnnnnnnnnnnnnnnnnnnnnnnnnnnnnnnnnnnnnnnnnnnnnnnnnnnnnnnnnnnnnnnnnnnnnnnnnnnnnnnnnnnnnnnnnnnnnnnnnnnnnnnnnnnnnnnnnnnnnnnnnnnnnnnnnnnnnnnnnnnnnnnnnnnnnnnnnnnnnnnnnnnnnnnnnnnnnnnnnnnnnnnnnnnnnnnnnnnnnnnnnnnnnnnnnnnnnnnnnnnnnnnnnnnnnnnnnnnnnnnnnnnnnnnnnnnnnnnnnnnnnnnnnnnnnnnnnnnnnnnnnnnnnnnnnnnnnnnnnnnnnnnnnnnnnnnnnnnnnnnnnnnnnnnnnnnnnnnnnnnnnnnnnnnnnnnnnnnnnnnnnnnnnnnnnnnnnnnnnnnnnnnnnnnnnnnnnnnnnnnnnnnnnnnnnnnnnnnnnnnnnnnnnnnnnnnnnnnnnnnnnnnnnnnnnnnnnnnnnnnnnnnnnnnnnnnnnnnnnnnnnnnnnnnnnnnnnnnnnnnnnnnnnnnnnnnnnnnnnnnnnnnnnnnnnnnnnnnnnnnnnnnnnnnnnnnnnnnnnnnnnnnnnnnnnnnnnnnnnnnnnnnnnnnnnnnnnnnnnnnnnnnnnnnnnnnnnnnnnnnnnnnnnnnnnnnnnnnnnnnnnnnnnnnnnnnnnnnnnnnnnnnnnnnnnnnnnnnnnnnnnnnnnnnnnnnnnnnnnnnnnnnnnnnnnnnnnnnnnnnnnnnnnnnnnnnnnnnnnnnnnnnnnnnnnnnnnnnnnnnnnnnnnnnnnnnnnnnnnnnnnnnnnnnnnnnnnnnnnnnnnnnnnnnnnnnnnnnnnnnnnnnnnnnnnnnnnnnnnnnnnnnnnnnnnnnnnnnnnnnnnnnnnnnnnnnnnnnnnnnnnnnnnnnnnnnnnnnnnnnnnnnnnnnnnnnnnnnnnnnnnnnnnnnnnnnnnnnnnnnnnnnnnnnnnnnnnnnnnnnnnnnnnnnnnnnnnnnnnnnnnnnnnnnnnnnnnnnnnnnnnnnnnnnnnnnnnnnnnnnnnnnnnnnnnnnnnnnnnnnnnnnnnnnnnnnnnnnnnnnnnnnnnnnnnnnnnnnnnnnnnnnnnnnnnnnnnnnnnnnnnnnnnnnnnnnnnnnnnnnnnnnnnnnnnnnnnnnnnnnnnnnnnnnnnnnnnnnnnnnnnnnnnnnnnnnnnnnnnnnnnnnnnnnnnnnnnnnnnnnnnnnnnnnnnnnnnnnnnnnnnnnnnnnnnnnnnnnnnnnnnnnnnnnnnnnnnnnnnnnnnnnnnnnnnnnnnnnnnnnnnnnnnnnnnnnnnnnnnnnnnnnnnnnnnnnnnnnnnnnnnnnnnnnnnnnnnnnnnnnnnnnnnnnnnnnnnnnnnnnnnnnnnnnnnnnnnnnnnnnnnnnnnnnnnnnnnnnnnnnnnnnnnnnnnnnnnnnnnnnnnnnnnnnnnnnnnnnnnnnnnnnnnnnnnnnnnnnnnnnnnnnnnnnnnnnnnnnnnnnnnnnnnnnnnnnnnnnnnnnnnnnnnnnnnnnnnnnnnnnnnnnnnnnnnnnnnnnnnnnnnnnnnnnnnnnnnnnnnnnnnnnnnnnnnnnnnnnnnnnnnnnnnnnnnnnnnnnnnnnnnnnnnnnnnnnnnnnnnnnnnnnnnnnnnnnnnnnnnnnnnnnnnnnnnnnnnnnnnnnnnnnnnnnnnnnnnnnnnnnnnnnnnnnnnnnnnnnnnnnnnnnnnnnnnnnnnnnnnnnnnnnnnnnnnnnnnnnnnnnnnnnnnnnnnnnnnnnnnnnnnnnnnnnnnnnnnnnnnnnnnnnnnnnnnnnnnnnnnnnnnnnnnnnnnnnnnnnnnnnnnnnnnnnnnnnnnnnnnnnnnnnnnnnnnnnnnnnnnnnnnnnnnnnnnnnnnnnnnnnnnnnnnnnnnnnnnnnnnnnnnnnnnnnnnnnnnnnnnnnnnnnnnnnnnnnnnnnnnnnnnnnnnnnnnnnnnnnnnnnnnnnnnnnnnnnnnnnnnnnnnnnnnnnnnnnnnnnnnnnnnnnnnnnnnnnnnnnnnnnnnnnnnnnnnnnnnnnnnnnnnnnnnnnnnnnnnnnnnnnnnnnnnnnnnnnnnnnnnnnnnnnnnnnnnnnnnnnnnnnnnnnnnnnnnnnnnnnnnnnnnnnnnnnnnnnnnnnnnnnnnnnnnnnnnnnnnnnnnnnnnnnnnnnnnnnnnnnnnnnnnnnnnnnnnnnnnnnnnnnnnnnnnnnnnnnnnnnnnnnnnnnnnnnnnnnnnnnnnnnnnnnnnnnnnnnnnnnnnnnnnnnnnnnnnnnnnnnnnnnnnnnnnnnnnnnnnnnnnnnnnnnnnnnnnnnnnnnnnnnnnnnnnnnnnnnnnnnnnnnnnnnnnnnnnnnnnnnnnnnnnnnnnnnnnnnnnnnnnnnnnnnnnnnnnnnnnnnnnnnnnnnnnnnnnnnnnnnnnnnnnnnnnnnnnnnnnnnnnnnnnnnnnnnnnnnnnnnnnnnnnnnnnnnnnnnnnnnnnnnnnnnnnnnnnnnnnnnnnnnnnnnnnnnnnnnnnnnnnnnnnnnnnnnnnnnnnnnnnnnnnnnnnnnnnnnnnnnnnnnnnnnnnnnnnnnnnnnnnnnnnnnnnnnnnnnnnnnnnnnnnnnnnnnnnnnnnnnnnnnnnnnnnnnnnnnnnnnnnnnnnnnnnnnnnnnnnnnnnnnnnnnnnnnnnnnnnnnnnnnnnnnnnnnnnnnnnnnnnnnnnnnnnnnnnnnnnnnnnnnnnnnnnnnnnnnnnnnnnnnnnnnnnnnnnnnnnnnnnnnnnnnnnnnnnnnnnnnnnnnnnnnnnnnnnnnnnnnnnnnnnnnnnnnnnnnnnnnnnnnnnnnnnnnnnnnnnnnnnnnnnnnnnnnnnnnnnnnnnnnnnnnnnnnnnnnnnnnnnnnnnnnnnnnnnnnnnnnnnnnnnnnnnnnnnnnnnnnnnnnnnnnnnnnnnnnnnnnnnnnnnnnnnnnnnnnnnnnnnnnnnnnnnnnnnnnnnnnnnnnnnnnnnnnnnnnnnnnnnnnnnnnnnnnnnnnnnnnnnnnnnnnnnnnnnnnnnnnnnnnnnnnnnnnnnnnnnnnnnnnnnnnnnnnnnnnnnnnnnnnnnnnnnnnnnnnnnnnnnnnnnnnnnnnnnnnnnnnnnnnnnnnnnnnnnnnnnnnnnnnnnnnnnnnnnnnnnnnnnnnnnnnnnnnnnnnnnnnnnnnnnnnnnnnnnnnnnnnnnnnnnnnnnnnnnnnnnnnnnnnnnnnnnnnnnnnnnnnnnnnnnnnnnnnnnnnnnnnnnnnnnnnnnnnnnnnnnnnnnnnnnnnnnnnnnnnnnnnnnnnnnnnnnnnnnnnnnnnnnnnnnnnnnnnnnnnnnnnnnnnnnnnnnnnnnnnnnnnnnnnnnnnnnnnnnnnnnnnnnnnnnnnnnnnnnnnnnnnnnnnnnnnnnnnnnnnnnnnnnnnnnnnnnnnnnnnnnnnnnnnnnnnnnnnnnnnnnnnnnnnnnnnnnnnnnnnnnnnnnnnnnnnnnnnnnnnnnnnnnnnnnnnnnnnnnnnnnnnnnnnnnnnnnnnnnnnnnnnnnnnnnnnnnnnnnnnnnnnnnnnnnnnnnnnnnnnnnnnnnnnnnnnnnnnnnnnnnnnnnnnnnnnnnnnnnnnnnnnnnnnnnnnnnnnnnnnnnnnnnnnnnnnnnnnnnnnnnnnnnnnnnnnnnnnnnnnnnnnnnnnnnnnnnnnnnnnnnnnnnnnnnnnnnnnnnnnnnnnnnnnnnnnnnnnnnnnnnnnnnnnnnnnnnnnnnnnnnnnnnnnnnnnnnnnnnnnnnnnnnnnnnnnnnnnnnnnnnnnnnnnnnnnnnnnnnnnnnnnnnnnnnnnnnnnnnnnnnnnnnnnnnnnnnnnnnnnnnnnnnnnnnnnnnnnnnnnnnnnnnnnnnnnnnnnnnnnnnnnnnnnnnnnnnnnnnnnnnnnnnnnnnnnnnnnnnnnnnnnnnnnnnnnnnnnnnnnnnnnnnnnnnnnnnnnnnnnnnnnnnnnnnnnnnnnnnnnnnnnnnnnnnnnnnnnnnnnnnnnnnnnnnnnnnnnnnnnnnnnnnnnnnnnnnnnnnnnnnnnnnnnnnnnnnnnnnnnnnnnnnnnnnnnnnnnnnnnnnnnnnnnnnnnnnnnnnnnnnnnnnnnnnnnnnnnnnnnnnnnnnnnnnnnnnnnnnnnnnnnnnnnnnnnnnnnnnnnnnnnnnnnnnnnnnnnnnnnnnnnnnnnnnnnnnnnnnnnnnnnnnnnnnnnnnnnnnnnnnnnnnnnnnnnnnnnnnnnnnnnnnnnnnnnnnnnnnnnnnnnnnnnnnnnnnnnnnnnnnnnnnnnnnnnnnnnnnnnnnnnnnnnnnnnnnnnnnnnnnnnnnnnnnnnnnnnnnnnnnnnnnnnnnnnnnnnnnnnnnnnnnnnnnnnnnnnnnnnnnnnnnnnnnnnnnnnnnnnnnnnnnnnnnnnnnnnnnnnnnnnnnnnnnnnnnnnnnnnnnnnnnnnnnnnnnnnnnnnnnnnnnnnnnnnnnnnnnnnnnnnnnnnnnnnnnnnnnnnnnnnnnnnnnnnnnnnnnnnnnnnnnnnnnnnnnnnnnnnnnnnnnnnnnnnnnnnnnnnnnnnnnnnnnnnnnnnnnnnnnnnnnnnnnnnnnnnnnnnnnnnnnnnnnnnnnnnnnnnnnnnnnnnnnnnnnnnnnnnnnnnnnnnnnnnnnnnnnnnnnnnnnnnnnnnnnnnnnnnnnnnnnnnnnnnnnnnnnnnnnnnnnnnnnnnnnnnnnnnnnnnnnnnnnnnnnnnnnnnnnnnnnnnnnnnnnnnnnnnnnnnnnnnnnnnnnnnnnnnnnnnnnnnnnnnnnnnnnnnnnnnnnnnnnnnnnnnnnnnnnnnnnnnnnnnnnnnnnnnnnnnnnnnnnnnnnnnnnnnnnnnnnnnnnnnnnnnnnnnnnnnnnnnnnnnnnnnnnnnnnnnnnnnnnnnnnnnnnnnnnnnnnnnnnnnnnnnnnnnnnnnnnnnnnnnnnnnnnnnnnnnnnnnnnnnnnnnnnnnnnnnnnnnnnnnnnnnnnnnnnnnnnnnnnnnnnnnnnnnnnnnnnnnnnnnnnnnnnnnnnnnnnnnnnnnnnnnnnnnnnnnnnnnnnnnnnnnnnnnnnnnnnnnnnnnnnnnnnnnnnnnnnnnnnnnnnnnnnnnnnnnnnnnnnnnnnnnnnnnnnnnnnnnnnnnnnnnnnnnnnnnnnnnnnnnnnnnnnnnnnnnnnnnnnnnnnnnnnnnnnnnnnnnnnnnnnnnnnnnnnnnnnnnnnnnnnnnnnnnnnnnnnnnnnnnnnnnnnnnnnnnnnnnnnnnnnnnnnnnnnnnnnnnnnnnnnnnnnnnnnnnnnnnnnnnnnnnnnnnnnnnnnnnnnnnnnnnnnnnnnnnnnnnnnnnnnnnnnnnnnnnnnnnnnnnnnnnnnnnnnnnnnnnnnnnnnnnnnnnnnnnnnnnnnnnnnnnnnnnnnnnnnnnnnnnnnnnnnnnnnnnnnnnnnnnnnnnnnnnnnnnnnnnnnnnnnnnnnnnnnnnnnnnnnnnnnnnnnnnnnnnnnnnnnnnnnnnnnnnnnnnnnnnnnnnnnnnnnnnnnnnnnnnnnnnnnnnnnnnnnnnnnnnnnnnnnnnnnnnnnnnnnnnnnnnnnnnnnnnnnnnnnnnnnnnnnnnnnnnnnnnnnnnnnnnnnnnnnnnnnnnnnnnnnnnnnnnnnnnnnnnnnnnnnnnnnnnnnnnnnnnnnnnnnnnnnnnnnnnnnnnnnnnnnnnnnnnnnnnnnnnnnnnnnnnnnnnnnnnnnnnnnnnnnnnnnnnnnnnnnnnnnnnnnnnnnnnnnnnnnnnnnnnnnnnnnnnnnnnnnnnnnnnnnnnnnnnnnnnnnnnnnnnnnnnnnnnnnnnnnnnnnnnnnnnnnnnnnnnnnnnnnnnnnnnnnnnnnnnnnnnnnnnnnnnnnnnnnnnnnnnnnnnnnnnnnnnnnnnnnnnnnnnnnnnnnnnnnnnnnnnnnnnnnnnnnnnnnnnnnnnnnnnnnnnnnnnnnnnnnnnnnnnnnnnnnnnnnnnnnnnnnnnnnnnnnnnnnnnnnnnnnnnnnnnnnnnnnnnnnnnnnnnnnnnnnnnnnnnnnnnnnnnnnnnnnnnnnnnnnnnnnnnnnnnnnnnnnnnnnnnnnnnnnnnnnnnnnnnnnnnnnnnnnnnnnnnnnnnnnnnnnnnnnnnnnnnnnnnnnnnnnnnnnnnnnnnnnnnnnnnnnnnnnnnnnnnnnnnnnnnnnnnnnnnnnnnnnnnnnnnnnnnnnnnnnnnnnnnnnnnnnnnnnnnnnnnnnnnnnnnnnnnnnnnnnnnnnnnnnnnnnnnnnnnnnnnnnnnnnnnnnnnnnnnnnnnnnnnnnnnnnnnnnnnnnnnnnnnnnnnnnnnnnnnnnnnnnnnnnnnnnnnnnnnnnnnnnnnnnnnnnnnnnnnnnnnnnnnnnnnnnnnnnnnnnnnnnnnnnnnnnnnnnnnnnnnnnnnnnnnnnnnnnnnnnnnnnnnnnnnnnnnnnnnnnnnnnnnnnnnnnnnnnnnnnnnnnnnnnnnnnnnnnnnnnnnnnnnnnnnnnnnnnnnnnnnnnnnnnnnnnnnnnnnnnnnnnnnnnnnnnnnnnnnnnnnnnnnnnnnnnnnnnnnnnnnnnnnnnnnnnnnnnnnnnnnnnnnnnnnnnnnnnnnnnnnnnnnnnnnnnnnnnnnnnnnnnnnnnnnnnnnnnnnnnnnnnnnnnnnnnnnnnnnnnnnnnnnnnnnnnnnnnnnnnnnnnnnnnnnnnnnnnnnnnnnnnnnnnnnnnnnnnnnnnnnnnnnnnnnnnnnnnnnnnnnnnnnnnnnnnnnnnnnnnnnnnnnnnnnnnnnnnnnnnnnnnnnnnnnnnnnnnnnnnnnnnnnnnnnnnnnnnnnnnnnnnnnnnnnnnnnnnnnnnnnnnnnnnnnnnnnnnnnnnnnnnnnnnnnnnnnnnnnnnnnnnnnnnnnnnnnnnnnnnnnnnnnnnnnnnnnnnnnnnnnnnnnnnnnnnnnnnnnnnnnnnnnnnnnnnnnnnnnnnnnnnnnnnnnnnnnnnnnnnnnnnnnnnnnnnnnnnnnnnnnnnnnnnnnnnnnnnnnnnnnnnnnnnnnnnnnnnnnnnnnnnnnnnnnnnnnnnnnnnnnnnnnnnnnnnnnnnnnnnnnnnnnnnnnnnnnnnnnnnnnnnnnnnnnnnnnnnnnnnnnnnnnnnnnnnnnnnnnnnnnnnnnnnnnnnnnnnnnnnnnnnnnnnnnnnnnnnnnnnnnnnnnnnnnnnnnnnnnnnnnnnnnnnnnnnnnnnnnnnnnnnnnnnnnnnnnnnnnnnnnnnnnnnnnnnnnnnnnnnnnnnnnnnnnnnnnnnnnnnnnnnnnnnnnnnnnnnnnnnnnnnnnnnnnnnnnnnnnnnnnnnnnnnnnnnnnnnnnnnnnnnnnnnnnnnnnnnnnnnnnnnnnnnnnnnnnnnnnnnnnnnnnnnnnnnnnnnnnnnnnnnnnnnnnnnnnnnnnnnnnnnnnnnnnnnnnnnnnnnnnnnnnnnnnnnnnnnnnnnnnnnnnnnnnnnnnnnnnnnnnnnnnnnnnnnnnnnnnnnnnnnnnnnnnnnnnnnnnnnnnnnnnnnnnnnnnnnnnnnnnnnnnnnnnnnnnnnnnnnnnnnnnnnnnnnnnnnnnnnnnnnnnnnnnnnnnnnnnnnnnnnnnnnnnnnnnnnnnnnnnnnnnnnnnnnnnnnnnnnnnnnnnnnnnnnnnnnnnnnnnnnnnnnnnnnnnnnnnnnnnnnnnnnnnnnnnnnnnnnnnnnnnnnnnnnnnnnnnnnnnnnnnnnnnnnnnnnnnnnnnnnnnnnnnnnnnnnnnnnnnnnnnnnnnnnnnnnnnnnnnnnnnnnnnnnnnnnnnnnnnnnnnnnnnnnnnnnnnnnnnnnnnnnnnnnnnnnnnnnnnnnnnnnnnnnnnnnnnnnnnnnnnnnnnnnnnnnnnnnnnnnnnnnnnnnnnnnnnnnnnnnnnnnnnnnnnnnnnnnnnnnnnnnnnnnnnnnnnnnnnnnnnnnnnnnnnnnnnnnnnnnnnnnnnnnnnnnnnnnnnnnnnnnnnnnnnnnnnnnnnnnnnnnnnnnnnnnnnnnnnnnnnnnnnnnnnnnnnnnnnnnnnnnnnnnnnnnnnnnnnnnnnnnnnnnnnnnnnnnnnnnnnnnnnnnnnnnnnnnnnnnnnnnnnnnnnnnnnnnnnnnnnnnnnnnnnnnnnnnnnnnnnnnnnnnnnnnnnnnnnnnnnnnnnnnnnnnnnnnnnnnnnnnnnnnnnnnnnnnnnnnnnnnnnnnnnnnnnnnnnnnnnnnnnnnnnnnnnnnnnnnnnnnnnnnnnnnnnnnnnnnnnnnnnnnnnnnnnnnnnnnnnnnnnnnnnnnnnnnnnnnnnnnnnnnnnnnnnnnnnnnnnnnnnnnnnnnnnnnnnnnnnnnnnnnnnnnnnnnnnnnnnnnnnnnnnnnnnnnnnnnnnnnnnnnnnnnnnnnnnnnnnnnnnnnnnnnnnnnnnnnnnnnnnnnnnnnnnnnnnnnnnnnnnnnnnnnnnnnnnnnnnnnnnnnnnnnnnnnnnnnnnnnnnnnnnnnnnnnnnnnnnnnnnnnnnnnnnnnnnnnnnnnnnnnnnnnnnnnnnnnnnnnnnnnnnnnnnnnnnnnnnnnnnnnnnnnnnnnnnnnnnnnnnnnnnnnnnnnnnnnnnnnnnnnnnnnnnnnnnnnnnnnnnnnnnnnnnnnnnnnnnnnnnnnnnnnnnnnnnnnnnnnnnnnnnnnnnnnnnnnnnnnnnnnnnnnnnnnnnnnnnnnnnnnnnnnnnnnnnnnnnnnnnnnnnnnnnnnnnnnnnnnnnnnnnnnnnnnnnnnnnnnnnnnnnnnnnnnnnnnnnnnnnnnnnnnnnnnnnnnnnnnnnnnnnnnnnnnnnnnnnnnnnnnnnnnnnnnnnnnnnnnnnnnnnnnnnnnnnnnnnnnnnnnnnnnnnnnnnnnnnnnnnnnnnnnnnnnnnnnnnnnnnnnnnnnnnnnnnnnnnnnnnnnnnnnnnnnnnnnnnnnnnnnnnnnnnnnnnnnnnnnnnnnnnnnnnnnnnnnnnnnnnnnnnnnnnnnnnnnnnnnnnnnnnnnnnnnnnnnnnnnnnnnnnnnnnnnnnnnnnnnnnnnnnnnnnnnnnnnnnnnnnnnnnnnnnnnnnnnnnnnnnnnnnnnnnnnnnnnnnnnnnnnnnnnnnnnnnnnnnnnnnnnnnnnnnnnnnnnnnnnnnnnnnnnnnnnnnnnnnnnnnnnnnnnnnnnnnnnnnnnnnnnnnnnnnnnnnnnnnnnnnnnnnnnnnnnnnnnnnnnnnnnnnnnnnnnnnnnnnnnnnnnnnnnnnnnnnnnnnnnnnnnnnnnnnnnnnnnnnnnnnnnnnnnnnnnnnnnnnnnnnnnnnnnnnnnnnnnnnnnnnnnnnnnnnnnnnnnnnnnnnnnnnnnnnnnnnnnnnnnnnnnnnnnnnnnnnnnnnnnnnnnnnnnnnnnnnnnnnnnnnnnnnnnnnnnnnnnnnnnnnnnnnnnnnnnnnnnnnnnnnnnnnnnnnnnnnnnnnnnnnnnnnnnnnnnnnnnnnnnnnnnnnnnnnnnnnnnnnnnnnnnnnnnnnnnnnnnnnnnnnnnnnnnnnnnnnnnnnnnnnnnnnnnnnnnnnnnnnnnnnnnnnnnnnnnnnnnnnnnnnnnnnnnnnnnnnnnnnnnnnnnnnnnnnnnnnnnnnnnnnnnnnnnnnnnnnnnnnnnnnnnnnnnnnnnnnnnnnnnnnnnnnnnnnnnnnnnnnnnnnnnnnnnnnnnnnnnnnnnnnnnnnnnnnnnnnnnnnnnnnnnnnnnnnnnnnnnnnnnnnnnnnnnnnnnnnnnnnnnnnnnnnnnnnnnnnnnnnnnnnnnnnnnnnnnnnnnnnnnnnnnnnnnnnnnnnnnnnnnnnnnnnnnnnnnnnnnnnnnnnnnnnnnnnnnnnnnnnnnnnnnnnnnnnnnnnnnnnnnnnnnnnnnnnnnnnnnnnnnnnnnnnnnnnnnnnnnnnnnnnnnnnnnnnnnnnnnnnnnnnnnnnnnnnnnnnnnnnnnnnnnnnnnnnnnnnnnnnnnnnnnnnnnnnnnnnnnnnnnnnnnnnnnnnnnnnnnnnnnnnnnnnnnnnnnnnnnnnnnnnnnnnnnnnnnnnnnnnnnnnnnnnnnnnnnnnnnnnnnnnnnnnnnnnnnnnnnnnnnnnnnnnnnnnnnnnnnnnnnnnnnnnnnnnnnnnnnnnnnnnnnnnnnnnnnnnnnnnnnnnnnnnnnnnnnnnnnnnnnnnnnnnnnnnnnnnnnnnnnnnnnnnnnnnnnnnnnnnnnnnnnnnnnnnnnnnnnnnnnnnnnnnnnnnnnnnnnnnnnnnnnnnnnnnnnnnnnnnnnnnnnnnnnnnnnnnnnnnnnnnnnnnnnnnnnnnnnnnnnnnnnnnnnnnnnnnnnnnnnnnnnnnnnnnnnnnnnnnnnnnnnnnnnnnnnnnnnnnnnnnnnnnnnnnnnnnnnnnnnnnnnnnnnnnnnnnnnnnnnnnnnnnnnnnnnnnnnnnnnnnnnnnnnnnnnnnnnnnnnnnnnnnnnnnnnnnnnnnnnnnnnnnnnnnnnnnnnnnnnnnnnnnnnnnnnnnnnnnnnnnnnnnnnnnnnnnnnnnnnnnnnnnnnnnnnnnnnnnnnnnnnnnnnnnnnnnnnnnnnnnnnnnnnnnnnnnnnnnnnnnnnnnnnnnnnnnnnnnnnnnnnnnnnnnnnnnnnnnnnnnnnnnnnnnnnnnnnnnnnnnnnnnnnnnnnnnnnnnnnnnnnnnnnnnnnnnnnnnnnnnnnnnnnnnnnnnnnnnnnnnnnnnnnnnnnnnnnnnnnnnnnnnnnnnnnnnnnnnnnnnnnnnnnnnnnnnnnnnnnnnnnnnnnnnnnnnnnnnnnnnnnnnnnnnnnnnnnnnnnnnnnnnnnnnnnnnnnnnnnnnnnnnnnnnnnnnnnnnnnnnnnnnnnnnnnnnnnnnnnnnnnnnnnnnnnnnnnnnnnnnnnnnnnnnnnnnnnnnnnnnnnnnnnnnnnnnnnnnnnnnnnnnnnnnnnnnnnnnnnnnnnnnnnnnnnnnnnnnnnnnnnnnnnnnnnnnnnnnnnnnnnnnnnnnnnnnnnnnnnnnnnnnnnnnnnnnnnnnnnnnnnnnnnnnnnnnnnnnnnnnnnnnnnnnnnnnnnnnnnnnnnnnnnnnnnnnnnnnnnnnnnnnnnnnnnnnnnnnnnnnnnnnnnnnnnnnnnnnnnnnnnnnnnnnnnnnnnnnnnnnnnnnnnnnnnnnnnnnnnnnnnnnnnnnnnnnnnnnnnnnnnnnnnnnnnnnnnnnnnnnnnnnnnnnnnnnnnnnnnnnnnnnnnnnnnnnnnnnnnnnnnnnnnnnnnnnnnnnnnnnnnnnnnnnnnnnnnnnnnnnnnnnnnnnnnnnnnnnnnnnnnnnnnnnnnnnnnnnnnnnnnnnnnnnnnnnnnnnnnnnnnnnnnnnnnnnnnnnnnnnnnnnnnnnnnnnnnnnnnnnnnnnnnnnnnnnnnnnnnnnnnnnnnnnnnnnnnnnnnnnnnnnnnnnnnnnnnnnnnnnnnnnnnnnnnnnnnnnnnnnnnnnnnnnnnnnnnnnnnnnnnnnnnnnnnnnnnnnnnnnnnnnnnnnnnnnnnnnnnnnnnnnnnnnnnnnnnnnnnnnnnnnnnnnnnnnnnnnnnnnnnnnnnnnnnnnnnnnnnnnnnnnnnnnnnnnnnnnnnnnnnnnnnnnnnnnnnnnnnnnnnnnnnnnnnnnnnnnnnnnnnnnnnnnnnnnnnnnnnnnnnnnnnnnnnnnnnnnnnnnnnnnnnnnnnnnnnnnnnnnnnnnnnnnnnnnnnnnnnnnnnnnnnnnnnnnnnnnnnnnnnnnnnnnnnnnnnnnnnnnnnnnnnnnnnnnnnnnnnnnnnnnnnnnnnnnnnnnnnnnnnnnnnnnnnnnnnnnnnnnnnnnnnnnnnnnnnnnnnnnnnnnnnnnnnnnnnnnnnnnnnnnnnnnnnnnnnnnnnnnnnnnnnnnnnnnnnnnnnnnnnnnnnnnnnnnnnnnnnnnnnnnnnnnnnnnnnnnnnnnnnnnnnnnnnnnnnnnnnnnnnnnnnnnnnnnnnnnnnnnnnnnnnnnnnnnnnnnnnnnnnnnnnnnnnnnnnnnnnnnnnnnnnnnnnnnnnnnnnnnnnnnnnnnnnnnnnnnnnnnnnnnnnnnnnnnnnnnnnnnnnnnnnnnnnnnnnnnnnnnnnnnnnnnnnnnnnnnnnnnnnnnnnnnnnnnnnnnnnnnnnnnnnnnnnnnnnnnnnnnnnnnnnnnnnnnnnnnnnnnnnnnnnnnnnnnnnnnnnnnnnnnnnnnnnnnnnnnnnnnnnnnnnnnnnnnnnnnnnnnnnnnnnnnnnnnnnnnnnnnnnnnnnnnnnnnnnnnnnnnnnnnnnnnnnnnnnnnnnnnnnnnnnnnnnnnnnnnnnnnnnnnnnnnnnnnnnnnnnnnnnnnnnnnnnnnnnnnnnnnnnnnnnnnnnnnnnnnnnnnnnnnnnnnnnnnnnnnnnnnnnnnnnnnnnnnnnnnnnnnnnnnnnnnnnnnnnnnnnnnnnnnnnnnnnnnnnnnnnnnnnnnnnnnnnnnnnnnnnnnnnnnnnnnnnnnnnnnnnnnnnnnnnnnnnnnnnnnnnnnnnnnnnnnnnnnnnnnnnnnnnnnnnnnnnnnnnnnnnnnnnnnnnnnnnnnnnnnnnnnnnnnnnnnnnnnnnnnnnnnnnnnnnnnnnnnnnnnnnnnnnnnnnnnnnnnnnnnnnnnnnnnnnnnnnnnnnnnnnnnnnnnnnnnnnnnnnnnnnnnnnnnnnnnnnnnnnnnnnnnnnnnnnnnnnnnnnnnnnnnnnnnnnnnnnnnnnnnnnnnnnnnnnnnnnnnnnnnnnnnnnnnnnnnnnnnnnnnnnnnnnnnnnnnnnnnnnnnnnnnnnnnnnnnnnnnnnnnnnnnnnnnnnnnnnnnnnnnnnnnnnnnnnnnnnnnnnnnnnnnnnnnnnnnnnnnnnnnnnnnnnnnnnnnnnnnnnnnnnnnnnnnnnnnnnnnnnnnnnnnnnnnnnnnnnnnnnnnnnnnnnnnnnnnnnnnnnnnnnnnnnnnnnnnnnnnnnnnnnnnnnnnnnnnnnnnnnnnnnnnnnnnnnnnnnnnnnnnnnnnnnnnnnnnnnnnnnnnnnnnnnnnnnnnnnnnnnnnnnnnnnnnnnnnnnnnnnnnnnnnnnnnnnnnnnnnnnnnnnnnnnnnnnnnnnnnnnnnnnnnnnnnnnnnnnnnnnnnnnnnnnnnnnnnnnnnnnnnnnnnnnnnnnnnnnnnnnnnnnnnnnnnnnnnnnnnnnnnnnnnnnnnnnnnnnnnnnnnnnnnnnnnnnnnnnnnnnnnnnnnnnnnnnnnnnnnnnnnnnnnnnnnnnnnnnnnnnnnnnnnnnnnnnnnnnnnnnnnnnnnnnnnnnnnnnnnnnnnnnnnnnnnnnnnnnnnnnnnnnnnnnnnnnnnnnnnnnnnnnnnnnnnnnnnnnnnnnnnnnnnnnnnnnnnnnnnnnnnnnnnnnnnnnnnnnnnnnnnnnnnnnnnnnnnnnnnnnnnnnnnnnnnnnnnnnnnnnnnnnnnnnnnnnnnnnnnnnnnnnnnnnnnnnnnnnnnnnnnnnnnnnnnnnnnnnnnnnnnnnnnnnnnnnnnnnnnnnnnnnnnnnnnnnnnnnnnnnnnnnnnnnnnnnnnnnnnnnnnnnnnnnnnnnnnnnnnnnnnnnnnnnnnnnnnnnnnnnnnnnnnnnnnnnnnnnnnnnnnnnnnnnnnnnnnnnnnnnnnnnnnnnnnnnnnnnnnnnnnnnnnnnnnnnnnnnnnnnnnnnnnnnnnnnnnnnnnnnnnnnnnnnnnnnnnnnnnnnnnnnnnnnnnnnnnnnnnnnnnnnnnnnnnnnnnnnnnnnnnnnnnnnnnnnnnnnnnnnnnnnnnnnnnnnnnnnnnnnnnnnnnnnnnnnnnnnnnnnnnnnnnnnnnnnnnnnnnnnnnnnnnnnnnnnnnnnnnnnnnnnnnnnnnnnnnnnnnnnnnnnnnnnnnnnnnnnnnnnnnnnnnnnnnnnnnnnnnnnnnnnnnnnnnnnnnnnnnnnnnnnnnnnnnnnnnnnnnnnnnnnnnnnnnnnnnnnnnnnnnnnnnnnnnnnnnnnnnnnnnnnnnnnnnnnnnnnnnnnnnnnnnnnnnnnnnnnnnnnnnnnnnnnnnnnnnnnnnnnnnnnnnnnnnnnnnnnnnnnnnnnnnnnnnnnnnnnnnnnnnnnnnnnnnnnnnnnnnnnnnnnnnnnnnnnnnnnnnnnnnnnnnnnnnnnnnnnnnnnnnnnnnnnnnnnnnnnnnnnnnnnnnnnnnnnnnnnnnnnnnnnnnnnnnnnnnnnnnnnnnnnnnnnnnnnnnnnnnnnnnnnnnnnnnnnnnnnnnnnnnnnnnnnnnnnnnnnnnnnnnnnnnnnnnnnnnnnnnnnnnnnnnnnnnnnnnnnnnnnnnnnnnnnnnnnnnnnnnnnnnnnnnnnnnnnnnnnnnnnnnnnnnnnnnnnnnnnnnnnnnnnnnnnnnnnnnnnnnnnnnnnnnnnnnnnnnnnnnnnnnnnnnnnnnnnnnnnnnnnnnnnnnnnnnnnnnnnnnnnnnnnnnnnnnnnnnnnnnnnnnnnnnnnnnnnnnnnnnnnnnnnnnnnnnnnnnnnnnnnnnnnnnnnnnnnnnnnnnnnnnnnnnnnnnnnnnnnnnnnnnnnnnnnnnnnnnnnnnnnnnnnnnnnnnnnnnnnnnnnnnnnnnnnnnnnnnnnnnnnnnnnnnnnnnnnnnnnnnnnnnnnnnnnnnnnnnnnnnnnnnnnnnnnnnnnnnnnnnnnnnnnnnnnnnnnnnnnnnnnnnnnnnnnnnnnnnnnnnnnnnnnnnnnnnnnnnnnnnnnnnnnnnnnnnnnnnnnnnnnnnnnnnnnnnnnnnnnnnnnnnnnnnnnnnnnnnnnnnnnnnnnnnnnnnnnnnnnnnnnnnnnnnnnnnnnnnnnnnnnnnnnnnnnnnnnnnnnnnnnnnnnnnnnnnnnnnnnnnnnnnnnnnnnnnnnnnnnnnnnnnnnnnnnnnnnnnnnnnnnnnnnnnnnnnnnnnnnnnnnnnnnnnnnnnnnnnnnnnnnnnnnnnnnnnnnnnnnnnnnnnnnnnnnnnnnnnnnnnnnnnnnnnnnnnnnnnnnnnnnnnnnnnnnnnnnnnnnnnnnnnnnnnnnnnnnnnnnnnnnnnnnnnnnnnnnnnnnnnnnnnnnnnnnnnnnnnnnnnnnnnnnnnnnnnnnnnnnnnnnnnnnnnnnnnnnnnnnnnnnnnnnnnnnnnnnnnnnnnnnnnnnnnnnnnnnnnnnnnnnnnnnnnnnnnnnnnnnnnnnnnnnnnnnnnnnnnnnnnnnnnnnnnnnnnnnnnnnnnnnnnnnnnnnnnnnnnnnnnnnnnnnnnnnnnnnnnnnnnnnnnnnnnnnnnnnnnnnnnnnnnnnnnnnnnnnnnnnnnnnnnnnnnnnnnnnnnnnnnnnnnnnnnnnnnnnnnnnnnnnnnnnnnnnnnnnnnnnnnnnnnnnnnnnnnnnnnnnnnnnnnnnnnnnnnnnnnnnnnnnnnnnnnnnnnnnnnnnnnnnnnnnnnnnnnnnnnnnnnnnnnnnnnnnnnnnnnnnnnnnnnnnnnnnnnnnnnnnnnnnnnnnnnnnnnnnnnnnnnnnnnnnnnnnnnnnnnnnnnnnnnnnnnnnnnnnnnnnnnnnnnnnnnnnnnnnnnnnnnnnnnnnnnnnnnnnnnnnnnnnnnnnnnnnnnnnnnnnnnnnnnnnnnnnnnnnnnnnnnnnnnnnnnnnnnnnnnnnnnnnnnnnnnnnnnnnnnnnnnnnnnnnnnnnnnnnnnnnnnnnnnnnnnnnnnnnnnnnnnnnnnnnnnnnnnnnnnnnnnnnnnnnnnnnnnnnnnnnnnnnnnnnnnnnnnnnnnnnnnnnnnnnnnnnnnnnnnnnnnnnnnnnnnnnnnnnnnnnnnnnnnnnnnnnnnnnnnnnnnnnnnnnnnnnnnnnnnnnnnnnnnnnnnnnnnnnnnnnnnnnnnnnnnnnnnnnnnnnnnnnnnnnnnnnnnnnnnnnnnnnnnnnnnnnnnnnnnnnnnnnnnnnnnnnnnnnnnnnnnnnnnnnnnnnnnnnnnnnnnnnnnnnnnnnnnnnnnnnnnnnnnnnnnnnnnnnnnnnnnnnnnnnnnnnnnnnnnnnnnnnnnnnnnnnnnnnnnnnnnnnnnnnnnnnnnnnnnnnnnnnnnnnnnnnnnnnnnnnnnnnnnnnnnnnnnnnnnnnnnnnnnnnnnnnnnnnnnnnnnnnnnnnnnnnnnnnnnnnnnnnnnnnnnnnnnnnnnnnnnnnnnnnnnnnnnnnnnnnnnnnnnnnnnnnnnnnnnnnnnnnnnnnnnnnnnnnnnnnnnnnnnnnnnnnnnnnnnnnnnnnnnnnnnnnnnnnnnnnnnnnnnnnnnnnnnnnnnnnnnnnnnnnnnnnnnnnnnnnnnnnnnnnnnnnnnnnnnnnnnnnnnnnnnnnnnnnnnnnnnnnnnnnnnnnnnnnnnnnnnnnnnnnnnnnnnnnnnnnnnnnnnnnnnnnnnnnnnnnnnnnnnnnnnnnnnnnnnnnnnnnnnnnnnnnnnnnnnnnnnnnnnnnnnnnnnnnnnnnnnnnnnnnnnnnnnnnnnnnnnnnnnnnnnnnnnnnnnnnnnnnnnnnnnnnnnnnnnnnnnnnnnnnnnnnnnnnnnnnnnnnnnnnnnnnnnnnnnnnnnnnnnnnnnnnnnnnnnnnnnnnnnnnnnnnnnnnnnnnnnnnnnnnnnnnnnnnnnnnnnnnnnnnnnnnnnnnnnnnnnnnnnnnnnnnnnnnnnnnnnctgacgcccagttgctgcgaggcctggtggtaggtggtcccgccctcgacgatgagcttggcggcctggagccggaactcctcactgtagcgtttcggtcgtgtactcttgtctgccatagatagttcctttcgtgtctatggcagcccagtctatcaagctcgccccgcgcccaccatccgtagggcaggtcaacgctcgcgtttgctgcgggctgggcaacacctctaacggaaagtcaggcgttcgccaaacgcgtggagcaacatctcaagaacctggggcataatgcaaaggattccaagacaaagaaggaggtgaaagccgcgtggatcatcctcaactgcagactggccgagttgcagaaggcatgcagtgacaaactgcgaggaacacttgacgcaggcttaccaagagaacaactcgcggaatcgatagcgaacgcccttgatgatgtcttgaagacaaacgagaagatgttccaggacctcgttaagaagccgaacaaaaaggaagaagcggcaatcggacaagaagacctccggcagaagaagttctggggatcggatccccagcttctggtgtcgaagaatgaggcgcttgcgcttccccgcttggaagccgatgccgaagcgcacgccaggttctggaggtcggcgtttcgtgccgccgcaggaaagcagggacgcaagcgcattgcgataggccccgtggtcaaccagtttgtgtatcaagacgcaacgacgctttccattcccgatacgtctgccgagtcacaggtgcgtctttcaggcgatgttggcgacgaattgctagacctgttgaagcagctcacaccgaatcataaacgcgagcatcctgaaatccgcgctgccttggcgttgctcgcaccagaaacagaagaccgaatccgcgccatcttggacaaaagcaatgtcgcgggcgatgacagggacttcctccgctcaacgttcaagccggtcgtacagaagatcattgcgtccactgctcgcggttcttcgtttcagcgccgcgtggcgatgaccgaggcgtacgccgaacttgagaagctcatcaacaagaagacaagagcaaggaagtcaggcgcgtgtcgcaagaagggagctacgctatgaccccgaccattgaattcatcaacagactggagaatctcaaagaaggcgatcgttctcgcctgcgttggctggcgggccagccgctggacaagacgctttcgggatttgatctgttcaccggcctgtggtggccgctgcgtgcgacaaatgcgcgaactccgcggcgtgaaatctcatggctcatcgccaagctgtattgtgcatcctcggttccgtatgttcggcctgaatcggatgttggggtatcactcccggcggtgcttggcagatgcgaaccgtgcgatccgccggattaccgcgcccgcaatacctttcgccggcgattcgacgccgtgatttgctcaagcctttctgacatcgaaccacgactacagtggggcttgcgcgaggttgccaaggcagttgcgggtcgtgtggtccacgcggagactgtgaccggcatcgactgggcgctgctgctcgacgacctgtcgctctgggacagggagttcaacatggacgacacatggcagaagagccggttgaatgctcaccaacggctcgctcgttgccgtgaaactcaccgcacgccgcaggacctgtgggcgtgcgagtacctgaacgcaactgttcaaccacaaggaggcgactatgctgattgaaatccacatgattcagaaccacagtccgtcgaacctcaaccgggacgatctgggtgcccccaagacgtgcatcttcggcggcgtcacccgcgcgcgcatttccagccaatgcctcaaacgaagcatccgacgcagcccggaattcgcagcggcactggagaaagacggcggggttcgcacgcgccgactgattgaggagattgcgaaagcggccggccgtgatggcaacgagcccaaagaagaacacctcaaagccgtccgggaagtcttcaaagagggcggtgtcggcctgaaggatgagaacacttttgacatcctcttcttcctgcctcgatcagccatcaaagaaatgggggtcgccgtgagcgccggtaacggtgatttaggtaagaagttcgccgaagtcatcggcaagttcgtcaagacgccggacatcgccttgtgcggacgcatgacggagtttgatgcgaagggcccgttcgaaggtctgaagggcaaatttaccgtcgaagctgcactgtccgcagcacacgccatctccactcacgcggtcgtaaacgaggtggattacttcacggcagcagacgacattcccggccaggacgcgggggcgggacacgtcagcgaggcgatgttcaattcggcctgcttctacaagcatttctgcatcgactgggagcagctgctcaagaatcttggcggcgatgtggagcttgccacgacgaccgtcaggtgcttcctcgaaggcgccgcaaaggcgaacccctctggaaagcaacacgcatacggcgcgttcaactaccctgacggcatcttggttgaggtcaaggccgagaccgccacccctgtaagttatgcaaatgcctttgccgacccggttccggagaagtctgtgcgaggtctgatcggcgagagcatcgcgcgccttggccagtatgcacatgatctcatcgacggctatgccctctcggctgaacgcttctggttttccccgagctcacgccatcgcctgacatggatcgacaaaagcaagagggagcctgagcaagagcagtccgttgtggacgagaagaaggaattcggaaagttcccggacttcgtgaccgctatcatggaggaggtcggcaaaagaagcacggcgccggcgggagggagactatgacagactctcggacgatcttcctgcgtttcgaaggcccgctccaggcgtggggtgatacatccaagtttgtgattcgtcgaagcatggactcgccgacgaaatcgggtgtgctggggctgatttgctgcgccatgggtttatcgcgaccgggggcgcgcgagaagcttccagccttgaacacgcttacgatgggtgtacggatcgaccggcccggcgctcgctggtgggactatcacaccgttggggcgggtattggcttgacgacagcggcaggtgggctcaagaccggtgcgcagggtacggtcatcaaacgactggaatatctggctgatgccagttttctggtcgctttgcagggcgatgcgatattgatcgccacggtcgcagaagcgttgcgatccccgaagtggccgttgtacctcggtcgcaagtcgtgtccaccgtccatgccggtattcgcccagccgcgcaaggatgagacatggaccaacccaatggcggtcgatggtgatatcgaggctgcgctccagataatgccgtggcatccgcgatatgccgacgatgccccgcgcgatcagcatgggaaacgctacgagaacattgagttgccctgcctgatcgagtggcgcagaagaaatgacaaggatacagctccgcctgacgccgaggtctggtacgacacacccttttcgttcgacccgccggtgcatcatccgcgattggtaagacgaggtcaggtcacggtcacggtcggcgatgcgctccagcagcatacgccgccaccacctcgtccccgcgcggactacaataacgaccagtacaagaagcatcgtgctgagcgtctacaatccgatcagggcctctgcgtcttctgcaagtcgccggccacgactgtccagcacgtgacctatcgccgcgccgggggcaatgaggcacaggaagacctgcggtctctctgccggctctgccacgatgccgtgaccatgatcgagtacggcatgggcatgggcctggaccggattgacccgtgcgacgtgcggtggcgcgatgacattctccggacccgcgccgacattatccgtttccgcagcgaggaaacccggcggcgagcactgcgcagtgctcccgagaagattcgccgcgaggctttggaagaagaggatatctgaatcatgtaccactcccacctgctcatcaatgttggtgacaaccctgaccgcccggattggagcatcacccggcgctggctgcgaaatctgtatcgagttcaccagcgcttgtgtatggcctttccgtcgaaggtcccggtgtcacataaggaacgccttgcagcgtactgcgcaccctacagcggcacaggactggaccatctgcgtaacttgcccggggagccggatacagcggacgtgcaccattcccgtagcgatcaggccggattcctcttccgcatcgattaccctgtcgatcacagccggggcgtccgacgacccctcatcatcgtccagtcggcggggaacgagccgccggattggcactatgccttcgggttgaatgaagatgccgtggatgatggcggacgcccgattggcaatgccggattcttgttggccgcgccaccacagaccagaaggatcaccatgagccttgagaatgacgatgtgtttgtaattggcagcccaaaggagaatcatcgaatcgctcccggcgatctggtgcgtttccgcctgcgcgccaatccaacgcggaaagtgcaggacggatcgccgaacggcagccgcaaacgcatttgcccgacgctggtcgatcacgccgactggttgaaaggcaagttgggagatgcggcggattccccggtctgtttggagaacttcgtcaccggttgggcttacggatggcgttcaaagcacgaaccgcagcccagccagcgcatgcagtggtggtccgtactgtttgaggggagcttccgggtaggtaatctgaaggtgctgaagcagttgctcgaatgcggaatcggtccagccaaggcgttcggtttcgggctcttgtccatcgcgccggtcaggtagagtttcccggtcgaatagccgatgggtgtaatgcggatggcgtatctgcccatcgaatcgcgatctttgctgtccagtacgaagggattctggaaatgacggatacgcagaagttttttcagacgctctgctctggcattggcccggccaagggactggggatgggtctgctaagcattgcccgcgcttaggagaacctatggctgatctgcacgaactgccgaagttcgaggaccgctggacgcacctctacctggagcgcggcggcctggacaaggacaaagaaggcctggtctttcgtcagggcgaaggacgaacgctcattccgatagaccagttgtccctggtcatgctggggccgggcacgtcgatcacccagcaagcagccaaggcgctggcggccaacaactgcctgatgtgcttcgtcggtgaggagggcgtcaagatgtacgccttcggcacgggaggaacgcacagcgcccaccgactgctccggcaggccgaattgtatgcctctccgcagcagcgggaactcgtcgcacgccggatgtacctgaagcgattcccgtctccagtctcggcggatgtgaccatccagcagctcagggggatggaaggggcgcgggtccgcaagacctacgagcaaatggcggcaacctgcggcgtgaagtgggaagggcgcgactacgatcagagcagttggtacaccgccgacccgctgaatcgggcgctgtcgtctgccaattcttgcctctacagcttgtgccacgccgcgattctgtccgccggttacagccccgccatcggcttcatccacacaggcaaggtgctgagcttcgtctacgatgtggccgacctgtacaagacggagatcacgattccgctggcgttccagaccgtatccggctccaaggacgacgttgaaagacgaacccgactggcctgtcgagacatgttcaaacaggccaagctgatacggcgtatcttgcctgatattgcggaggtgctcgatgctcgtgatgatgttggagaacgtgccgatgagcttgaggggcgagctatctcgctggctgatcgagcccaaggctggggttttccttggaagtccgacggccagaatacgggataagctgtggcagaacgccctgaagaagcgcaagggcggctacgtccttcagatatggtctgattccagcccgcagggctacagcttccggtccgaaggcgaatcgtctcgccaactgcaagacttcgagggcattgccttggtggcttacaaagacaagcgtaggccgagccaggtatcaacatcttgaggtctgcccagtcccggcatacaatgccgtggtattgtccccacgcacgtgggggtgaaccgatatggcaatacttcttttaatgcagacacagattgtccccacgcacgtgggggtgaaccggcactgcaagcgatgtacacacggcgactgctattgtccccacgcacgtgggggtgaaccgtccacgactgttattacccgcccgatccacagattgtccccacgcacgtgggggtgaaccgacggtttctctgcctgtgggtgctccgtatctattgtccccacgcacgtgggggtgaaccgcgtgctgagtgtgctggatgggagttttcggtcattgtccccacgcacgtgggggtgaaccggtgtgggccgggcggccataaggggagatttgattgtccccacgcacgtgggggtgaaccgctcagccagcttctccaagcaatcaccacaaaattctccccacgcacgtgggggtgaaccggtgatcccggccgacgagaacgtcgcacacggattgtccccacgcacgtgggggtgaaccgaccgccgccgccgtgctcccggcggcgagacattgtccccacgcacgtgggggtgaaccgccagatgaacatggactgggagggctccgcggattgtccccacgcacgtgggggtgaaccggggagttgttcgtatcctcgcacagccgcaattcgacttcccactcggcctgcgtaaagcccgtcactccattctgcatgtcctcgaacggcacgtcgacacacaggttgcctctggatgctgtgagggatgaggattccctcatccggggcaatttggccatctgatctccgtggggcagcatttgtcaagacaccccgcgtcgtaggggacccgtccaccatacgccgctgggcgtcagcccgcctccgggccaaacggacggaatcaccacaggtcccggaccaagtatcggggcttctgcgtcagctcgatctcggccgccaccttcgccttgaagtgctcatcgtactcatcggtccgcagatcgagcacccaggtgctcacaaacatcacgctggcgagcaggtcctggcagccttgttcgacttcgagttccaggtggtcgatgtgctctccctgcggcggggacgccacccctttcagcccgcccgccagcaggaatagatcccgcccttcccccacgagcggctggcggcgccctttggccgccatcaatgcctccgctctgtccttgtcgaaactgacctcacgcatgaagccaccatcctttcgccggcgtcctggcccgaccgccgcctgtgaatcctaccttgccttgcccttcgcagaaccaacccgccccgtgcgaaacataccgtaccgcatgggacccgctccacagaggcccacagagctcgccacgggccttctgggcgttccaattcacagagacggcccttgggtcgggtccgggccagatcgtggctaattccgtcgcgaatcgcacacgtattcgagttggggcgacgctgtgagtcgtctcgacggccgtgggcgtcttgcgccccgtcagtctgtaggcgaacaaggggcagcccgtgtcggtgcagtcccgaaccgcgttcgccacgtaagccatgcactccagacacaacgaccggatggcagcactttggctgcgtccggtcatggccagccggtagagcctctgaaaacgtcttggcacatctctgtccgtcatgctgttggatctccttcggccgttccgtcaaaaggggccgatgccccatgtccgtcgtctttgctgatgtcactggctctcgtcggcggcatcgccggcctgattccacatctcgggcggccggacgtaccactgggggcgtttccctccctggcgccggacccggctaatcatgcctgcttcgctcagctttcgaagatggcgtttgatggcctttgtgcgtagcatcccttgctccggtggtgcgcagagccgagccagcctcatgatcggcgcttcacacggttgtcttccgccgtccgtccattcacagagccagccaaacacccgcagtgccccgattccgacgcatcggctggcggcctcgcgccacgccggcggaatcagaagctccgcgcgtgggaaggcccccggtctttggtcgggttggcttctgctcgcggcagcgtcctcgtggggcttggacgggggctcgggtacaggcctgtccagcgcagggtttcgcctgattctcgtagggaagctcaaacgccagtcttggccgctcggcttgtacacatcttcccggcgcccgtagtagcccttccggtaggtcgtcacacgagcatcgaactccacgcagtccccctggtgcagcacgcccagggcccggaaccccttcgtctccgtgaaccagagatgatcggtcacacggacgcccccatccacagggcacacctcacgaaacaaaagcgtcttgaggggcgctcctcgataggcactcttctggccataccgctcgaagatggcacggaacctcattcgttgaccgtccagattcttccattcgtctcttggcatgttggctcctctctgaggcccgatctcgggccgttcgtcaaccacagcgattcacaaaccgtccgcgcattaccagatccgcaccgcaagagcgagagatagtactgtggggccgggggtgccgggggggctccccccggtggggtccgggccgcaatcgtgaagcccgttgccgggccgggaccgaaacacgacaaaacgtgttgtcttttcccgttgcctcctcgcgcgcccgggcgcgagacttcttggctccgagagccagggaacggcacatccccgggataccttcttactcgcccgtcagtgcctccgccgccatccatgccccgagcatcatcctgctttcctcgtccagctccgcagcgccctgcttggccgcctccatcagggcctcgtggtacttgtcgagcacagcattgagcaagtccgggtcgccgtggtcgccgtccgacagggcccaggacaggctcacggccagcatcgtctccagcggccgctgctccagccacgtcgcgatcaggtctttcggctgcctctgcggggtcatcgtgtctcgttcactttccatcgctcagcctccgtcaaaaggggttccgcgccgccggctgctcgcacgagaggcccggccggcacagggttacgttctatgcaggcgcctcaggggtcggcctgtggctcctgaccaggtgcaggatcttccgcttcacatcctccggcaggtccggccaggccgccacgatctgagccaagtcggggtcacccgacgcaatctcgcgcaccaaatgcgcacctattctgtgttcgggagtatcatttcgctgttcgggaagtgcaagagtctgtccctcgaaatccccttcaaatggctttcggtcgcattctgtgcaggaattggagcggtcctgtggtgattctgttaccccacgaatcgggttcaaatcctgtctccccgatttcccctcttgttctgccgcttgccgcattcgatctcgtcgcaggggccagcggcagcttgccgatgggtcccacgtccaagtactcagaccagagccgtttatggaacttgcctcggccctggggcgacggtatagttagaggtcctcgcggctgctccgtgggagctatgtatgtaagtgggctcgccgcgcgggccgtgagagtgcggcgccgcctgggcgcgttggaacatggatgggaagaagggttctgggcaaggaaagctgtggtagattcgggtgcggcaagtctggactacgagcaatttgaagaacgcggattgcgtcttgtcctaaaggggacgttgaacgccgccgacgcacagcggttctggccccaggttatgcagaaggtggcgcagtgtgacccttccgccatcgaagtcgatgccggaggtgtggaaagcttggatacggcgggcatggcccttctgctcgaattgaaggctggacaggagcagcggcagcgaggttttcggattcagggcctgcgggacgatctgaccgaactgatgaggcggttcgatccgggcccgcccgcgccgcctaagccagcgccgccgtggctggtccgcgcgatccatcgtgtcggtgagatctcgcatggatcccttgtgggctttcacacgcaggtcgctttcctgggggagattttcgtccgcctgctgagtgttctggttcgcccgcgtcgtctgcgctgggccgatacattcctgatcgccgagaaggcgggagccaatgcggtcggaatcgtcgcattgatgggttttctgatcgggctgatcctggcctttcagtcggccatcggtatgcgcaagttcggcgccgagatctacgtggccgacctcgttgtgctggtgctgtttcgcgagctgggacctttaatcactgcgttcatcctgaccagccgcagcggatcagcctttgcggccgaattgggcacgatgaaggtcaacgaggaggtcgatgcgctggtgacgatgggcgtggaccccgttcagttcctggccttgccccggctggttgccgcgatctgcgtgatgccgctgctgacactgttcaacgagctgttcggtctgatcggctgcgggctggtcatgcgatcgttcggtttccctgtggcggcttacatcgaccagattcaggaggccgccagcctgggcgacctgttcggcgggctggtcaagacctttgtattcggcgctctgatcgccggcattgggtgtctgcgcggtttgcagacgggcaacagccccagcgccgtcggcgattcggcgacccgcgccgtcgtcagcggcatcgtcgccatcgtggttgctgacggcgtgttcgccgtgctgtactactacttgggggtatgacgatggggtccgacgcaccgccgatcattcaggtcagcgacgtgaccgtgggctacgatcatcacatcgtcctgaaggacgtgaccttcgaggtgggcgccggcgaggtcttctgtatcctgggcggttccggctgcggcaagagcacgctgctcaagcacatgatcggactgcatcggccgctgacggggcgcatcctcatcgacgggaccgatatcgtcaccgccgaaggcgaggagcggcgtgcgctgctgggccggatcggtgtggcgtaccagaacggcgcgctgttcggctccatgagcctgatcgagaacatctgcctggtcctggaagagttcacgagcctgccgcgacaggccatgcagacgatcgcccggatgaagatgaaggtggtcgggcttcaggacgccggcgatcgactgccctccgaactcagcggcggcatgcgcaagagggcggccattgcgcgggcgctggccctggacccgaagattctgtttctggacgaaccttcggccggactggacccgatcactgcggcgcagctcgacgacctgattgtcgaactgtcgcagaccctgaagatcacgttcgttatcgtgacgcatgagctggcgagcatcttcgcggtcgccgaccatgtaatcatgctcgacaaggaacggcaggcgatcgttgccaggggctcgcccgaagagcttcgtgaccgcagcgacgatccgtgggtgcggcagttcttccatcgagagtcgtcggctgcaggaatcaggaggtaggcatgtttggaaccggtcaacagagagattgggacggatcggcctgatgggaaggaaaccaagctacttcaagatcggcgtctttgtgattctcgcaacggccttgctgctgacggccgtgatcctgttcggttccggcgtgtttgcgaaggacaagctgagattcgagacctatttcgacgagtccatcacagggctgacggtcgggtcaccggtagagtttcgtggtgtgcgcatcggtcaggtcgagaccatcacattcgccggcagtgtgtatgcgatcccgccggacagcggacgattgtccgtcttccagcctatcgtccgcgtcgtctacgcggtgccgcgagagacgatgcccgaactcggcgtcgaaaaggccggtgccatgcttcaaaagatgattgctcgcggcctgcgcgttcgcgtcaattcgaatatcctgacgggccagggctacctggaggccgactatctcgatccgaatcgcttcccgatcctcgaggtgccgtggacgccggtgtacacctacatgccgtcggcgcccagtgagatcacgacgttgaaagactcgctcgaaaagattttcacccggctggaggagattgatttcgaagggctggtggattctttcgagcggaccctggtggccgccgagagggcggtgggggatgcgaatctggcccggatcagcgaggaagccacgagcctgctggcggaaacacgggagaaggtccaggccctcgacgtagcgggcatcaacgacgcgacgcagcgtttgctggcctcgctggagcggaccgtcgcggatgccaacgtgccggaactgagcgccgaactgacgcggtttgttcaggaaatccgcatcacgaacgacggccttcggcgtctgctggcgtcgccgacggggaccgcgggcgggtccaaccttccggaggttgtcgcgcggctgaaccgggtgctgtcgagcatcgaccggctggtgacgaccgagaaaccagagattgaaatcatcatcggcaatttccgggagatttccgacaatctgcgcgacctgaccgacagtctcagggagcgtccttcggagctgatcttcagcaaacccccacgtgaatcggaggcatacaaatgatatgtaaggggacccggccggccctgtttctggccctgaccatgttcgcgcttgtcctgacgggttgcgcgaggccgcagtcggccaacagccgcttctacttgcttcagacgtctcgctcgttgtccccggccgttcgcgaaggcaaggctgttctggcggttccacggttcaccatcgatgcggcgtacgccggcagggggctggtctaccggctcgacgaacatcgatacgaatccgacgcttacaacgagtttcttgtttcaccgaccgtgatgatcacggagaggacacgcgactggttgacccagtcgggtctgttcgcgcaggttctcggctcgggcagcggcgccgagcccacgcatcgaatcgaagccaatattgccgctctctacggtgactttcgcgacaggcgcgcgccgaaggcggtcatggagattcgtttcttcctgctgcggaccgaaagcggcgtagacccggagatcatcctggccaagtcctacgccgcgacggccgacgtggcgaccgccgggccggaagggctggtcgccggtctcgaccgctgccttcagacgatcctgacccagttggagaacgatttggccggtgccgtctgacgctgaaccgttcgaatcagagtcgcacgatctgacaggcgatgtcacttcgcaccaccggcacggcgacactcaatcggtcctggtcgtgtcgaacgcggtgcgtcttgatgcaagtgccctgacttgtatcccaccactgaacggcgtactcgcccggcgaaaagtctgggatttcgagggtcgcaccttcgatctcttgaggtgtctgccccgcgacgaccttccaccacgtggcgtcccggctggacagccacagataggtgcgatccgttccctgatagcccagcacgcgtagacgcgcgtcggacacagttgcgcctgtcgctctcaatccctcgaaggagatgtcccgcaggtatgccgccagcggccgatagtgacggtaggcgtcctgctggtccaattgctcccaccaccagaacatggccgtgcccgacggtccggcgaaggtcgacgcccagagagcattatggaagtgcacgccatcggtgtcttgtctcatgtgctcgctcaggccccacttgtcggtggccaggccgaactcgccgatcagcgccggtttgttcggcgcgtgctctcgcagaaaggccgccttttcgaggatggcctggacttcgtctttgaagtctgcttcgccagggcgcaagtagtggtgcagttgggcgacgtcgagggctgcgaggccacagtcgcgcgccgacggatgccatgtgctggtggtccgcaggtggcggtagatgtcgatttcgtcgaggtagccgcccacctcctcatagaagtggtccgttggcttgcccgggtcgatctcgttgaagtactcccacgcgccgacgctggtcgagtagccccaccgggcgacggcatagcgcatgaactttctggcatccgcgatggctcggtcgtaaggcacattgttcggattgccaagctcattcatgtaaagatcccgcgtcagcaggcaaagcatcagatagatgccgtgtttctcggcggcctggacgatctgatcgaccatgaagcagtcgagcggattgtagtaaccccgcacgggacgattgacatccgcttcccatagcagctccgcgctgtcgtcgctttccttcagcgacagaccggtcagccacgcagtgccttcgcccgaaagtgcaactgtggtgtggcccagccagtactcatcggggccggtggtgaattcttctgcgaagtcctgccaggtggcggtgtgtgccggcacccgccaatcgtgtctgccgacctggattcgcaaaccgtccgctccgtcggccttgaaccttccgcggagtgtgtaccgcgtgtccggccgcagcgccacccggtgcgagggcgaaacctcgatcgaagcgccgtcctggccctgcagttgtacgcacttgccctcggcttcaggcaggggaaccacgggcgattgccggttccatgaacgggtccacgcgctcttgggagcctcgacggcgagggcccagtcatggcaacacgtccaaatgcgcgcgaagttcgcgccgtttcgcgccatctccgcgaagatcgcctcggccttcgggacgttgacatactggctctcgccgatgaaggcgaggttctggccgatggcgaagaagggctggccttcggcgaattcgagaaacctcgggtcctcgcggccgacgcgcaaaaatcccttatttgtggaagggacgcactcgatccggatggtctgcgacagcgattggccctcacggtcgttcaggcgagcccggatcgtgtatgtccccgtctccgtgggtgcgaaccgtgctttccacgtcccttgaccgatcgggtagcaccaggccacggttttgccatcgctggggaaatctcgccgttggtaatcctggccgaaaaaggccggcagaacgagcgcccgcccgctcgggcaatcgatcagcagatcgatcgcaacctcacatgggtcgaagggattgtcgtacgtccgctccggcgtcagtgtcagttcgagcttgtcatacttgccgacatgggccggacaaggcccgatggcgaccagccgcggtgcggcaaggaggctgccggacgccgccagacagcccgcgaacacgtgggtaaaaaccatcctgcatcgcatgcgatgttctccttatgacctgaccattcacgaggcacagcctaccatgccgcgtccgtgcgaggaagcgcccttgcatttgcccggcgaaggccgcatactcagcgtgcggggttcggaggggatggcacgcaggcggcaagccccgattggggcgacggaggtttgcactatggcagatcgattgacaacgcggcggacgtttcttgcggatgcggttctggcgacaggggcgatcgcactttcgccggctcaagttcgtccggcggcgggctccgagggtgagcggatgcacgtcgcctgcaactcgtactcctggaccgtgttctatcagcgtcaagggcgcaatttcgaccagtcgctcgatgaaggtctggccgaggtggctgccagcggtcttgacgggtttgagccgtcgttcggcgacgtcgcacaggtcgagcgtctggcgcctctgctgaagaagcaccgcctcgggatgcggtctttttacgtcaacagcctgctgcatgaggccggccgggccgatgagagcatccggcagatcctcacgattgctccgagggcccgggacgctggagcgcggatcgtcgtgaccaaccccaatccgctcgcctggggcggcgcgcaggacaagaacgacgaacagctcaaggtccaggcggccgcactgaaccggctcggggccgaactgcggaagctcggcctgacgctggcctaccacaatcacaacatggaactgcggcaggccgcacgcgagttccaccacatgatgctcggcaccgatccggccgatgtgacactctgcctcgacgcccactgggtctatcgcggcgcgggcaactcgcaggtcgccctgttcgacatcgtcaagctctacggcaagcgcatccgcgagctgcacctgcggcagtcccagggcggcgtctggaccgagacatttggcgagggcgatatcgattaccgcgccctggccgatgccctgcgccaggagggcgttcgcccgcacatcgtcctggaacaggcgatcgaaaacggctcgcccaacaccatgccgcccctggaagcgttcaccagaagcaccgagtacgtccgccggctctttgcgggcctgggcgaaaaagcttgaacccagacgcacgttccgataaaatggccgcagtgaatcaaggttcgaaggccggccggaattgaccatcatatccgtgcttgtcgctatcatattattgtcgcatatcatcgcaccggcaccttcggagaccttgcggagatagctcagcgtggcttgagggattttcggggcacgggcggcggttccacaaactatggcggcgaacgatgattcgcccgcactatcagccaaaggtacgccccctgtctggtcgaagagaaggcaggtgctggatttacggttattatccattcattcatcccaatctaaggagcggcacaatggcacggagaatcaggtttgcagggtttctggtcctggggctggtggcggcagtcgcccgggcggggaccgtcgatgtgatgatggtcgtccccaagacgttgtacagtggcgcctcgacctcggcgacgatcacggtggtcagcgcacgccagtcgtcggcagggatcggcgtgagtctgcgcctcaaggcccatgaagggaacgtagacctcgccgccgggcagaccgatgaggcagggcggttcgtcgcccgattcgacacgcccaacttggcggatggctcctatatcctggaggcacacgtcgatggcgccgaggagactctgacaactcagatcatgatccggcggatgcccgtggtgttgatcgaaacggacaagccaatctacaagccgggccagacgatccagggccgcgtgctggtgctgacgaacgagcttcgtccgagcgcctccgacgtgaccgtgcagatcaccgacggcaagggcgtcaaaatcttccgcaaggacctcacgacgaacgccttcggtgtcgcgccgttcaacctcgatctggccagcgagctgaactacggcacgtggaagatcaccgccgaatcgggggccggccggggaaccatcgacctgcgagtcgaggagtacgtgctgccgcgattcgaggtcaagctcgacacgccacgggattacttccgcaccgacgagagaatccccgggaccgtcacggcgacgtatttcttcggcaagcccgtcgacggcgaggttcagatcagcgccagtcgctacgtcggtgtctgggaggaatacgctcgctacacggcgccgctgacggaagggcgggcggagttctcgctgcccgaggtcaagtacgtcagcgggaccacgggagccggcggtgcgggcagcgtgcagctcgacgtgaccgtcaccgacacgtcggatcaccaggagaagacgaccaagctgctgaagatcgtctcgtcgggaatcgagcaccggctgatcgcctcgtctcggtcgttcacgcccgcgcaatcgtatgacgttttggtggtggccgagacgcccgacggtgtgcccgtctccgtgacaggacagttgatcggcgagtactacgccgaatcgggtgagatgatctccaaggaggcccattcgctggcgttcgaaggctcgacctcgatcaccctgagggcgccgcagaaggcttcctgggccacactgaagagcgaggttcgaggcgatggcgaaagcgggcaggcggagttgtacgtctatgcgacatactcgcccagcgacagcttccttcatctgagtcgcgaatccaccggcgccgtcggcatgggtgacacagtcacgatcgatgtgtttcgcacgcacgatgcaaccatctactacgatgtctttgcgaacggccataccgtctggtcggacgcggtgaccggctcggcgatccggttccaggcgacgcagcagatggtgccggccgcccgggtggtggcgtacgtgatcaacccgaacaacgagatttccgccgccacgatcgagttcgaggtgacgatggaccacgcagccagcctggccctgggagtcagtgccgaagaggtcgggccgggtgagccggttcgcgtctcggttcgttcggagggtcagtcgatggtcggcctggccatcgtcgacgagtcggtctatgcgctgaacgaaggccggctcaacatgcaggaggtgttcggcgagctggaacagcggttcatggagccgcaggcggaaacgcacgaccagccgtacagctatggcgcccgcaacatatttgaggacgccgggcttgccgtggtgacttcgcgcgggctggatgttcccgagggccggcgaatcaacgggctgtggtggattggtccggtcgtccgaaggggtggcgccgacgatgttgccgagaacgccggcaaaggagatgggttggcggaggtcgatcgggtccgccagttcttccctgagacgtgggtgtggatgccggatctgctcaccgagcccaatgggaccgcgatgctggacctgacggcgccggacagcatcacgacgtggcggcttcatgcggtgtccacgagcgacaacgggcttggcgtgacggagtcgtcagtccgcgtgttccaggagttctttggcgagcccgatctgccgtatgcggtgacgcggggcgagcaattcccggtccgggtccaggtgttcaactacctcgacgaacctcaggtggtctatgtggagatggcggacgccgactggttcaacctgctcgacatcagcgaacagcaggtgcaggtaaatgcaaattccgtgtcgtctgtttcgtttgtcattgagccgacgaagctcggacatcatccgctggaggtccgtctgcgttcggtccggcgggccgatgccgtgcgcaaggaagtgctcgtggagccggaaggcacccggcgtgagctggtcaccaacggcgcgatccgagcgggcgagacggtggtcctcgacgcgaatacgccggaattcgccgtgcccgattcgcagaagattctcctgagcatcacgcccagcctggttgcccagagcatcaacggtgtggatgacctgctcggaatgccctacggctgcggcgagcagaacatgatcttcttcgccccggacgtggagattctgcgctatctcaacgcgaccggccagctcacgcccgaggtgcgggccaaggccgagcacttcatcacggtgggctaccagcgagaactgacattccgccatcaggacggttcgttctccgccttcggccagagcgatgccgagggcagcctctggctgacggcattcgtgctcggcacgttcagcgccgcgcgtgaggtgacgacgatcgacgagacgattctggccgaggcggccgcgtggatcgcctcgcaccaggcatccgacggatcgtggccgccggtggggttcgtatgccacagtgaaatggtcggcggggtgcaggggacgtacgcgctgaccgcgttcgtgtcgattgcgatggcggattacggtatggccgatccgcacgtgcagggagcggcgacgcaatatctgcgtgacaacctcgcgtcggtccgggacgatgcgtatgccctagcaattgcggcgctggccttcgcgcgggtaggtgatccggccgccgacgcggcgctcgaacggctgctggcgatcgccgtcaccgatgccgacggtctgcactggcaacctcacccggtggagacaaccgcctacgcggcgctggcgatgatcgagaaggaatggccgcaggcgaacgaagcggtcaagtggctttcgctccagcgtaacagcctgggcggctacggcagtacgcaggatacggtcatggggctgaaggccctgatgatggcggcccgcagtcagagccgcaacgtggaccttacggtgaccgccaaggcgcggggcggggaaacgctggcgcagttcaccgtgaacagcaccaacttcgacgtccttcagacggcggagctgccgctcgaatcggccgtcgaaatcagcgctgtcggctcggggcaggtgcgattccaactggttcgacggttcaacgttctgctgcgtgacgatccggtccagaaggacatgaccctggaggtgatgtacgacgccgaccacgtggaggtcgatgatatcgtcaacgtcaccgcgacggtgcggtacctcgggccaaaggactcgacaggaatgatgatcgtggatgtcggtgtgcctacaggcttcgccgctgtcgccgagtcgctcgatgcgctgcttgccgacaatctcgtcacgcggtacgaggtggccggacgcaaggtgatcttctatctcgacggcctggaacgcggcgaacaacggaccctgcacttccaagtcaaggcccgcttcccggtgcgcgcgacaattcccgacagccaggcatactcctactacgaaccacaggtgcgtgccgaggctggcggcaatgagatcaccatcgagccggccccgcagcagtaagcgaggaccgtggcgtcaagtccaggcgtactgctgcgggttgctcgcggccctacccggcccgatgccgggcggacaatatcgcatcgcccctcatgtgccgagctttagagcgttcggcgtcggcgcagccagctcaccgcactgacaccgatgccggccaagagcagggctcccggcgccggaattggtggcgtcgtgctgcagatcttcgcccagagcgggagcggaggacaggtggtacggcattcttccgtgctaagcgacgagatgatgctgctggggcaactgccgaaacccagcacgcacaactcgtagtccgcgcccccgacctcaaacgcgatgggatcgaacgacgtcggcagcgtgatgacatccgcaggatggccacccgggccgaccgtttccgtaacgcccagcgtcagggacgtgttgaccggcgtcccctcaaagtccatcgccaggtccagatcgaccgccgtgatgccggtgccgacgactatgggcgtattgtaatggcgcagcgcgcccacgacaaagggcgtatcgagcaccacgtcggtgggcgtcgcgacgggtgtgaagcccaagctgctcttgagaccaaacagataggccggagtgccccaggatatgagctgttcgcccatcaaagaagaccagtaggcaggggcaggggccaaggactgaagtacaggatcgctccaggtgccgctggcgctggaaagcgtcagcgcaccactggcggtgccgacgacggcgagcagcgccagcgccggcagtattgcaggtaaccgtctcatcttgtgtctccttacactccgtgtgtgactctgtggaaaccgtcagcttaccttgtatccgtggaacccccaggcacctcctttctccgggtttctcccacccatccgtacatctcccctttactccgtccggacaaacctcgcccgcacggattttactcatccagacactctctatgtccacatagcgtctgcgtgtagctattccgcgtgagcagaaccacacgtgtattcatcaccgccccatccgggttaaatatacgcgcaatatgggacgccctgcaagcaattccacggaggaaaatgcttattttgatgtgggaagattgggggacatgggaagactgtcggtgacattggtttcttttcgagattccgtgtcccatcggatgatgaggcgccgcacaggatcgggtcagcgtcgggtggaccagcgggccgaccggctggccgatccggactcacagaggttgccgaccacggcgcgcacggtgttgcggagaattgagagaaacccagcgacttacgactgcatcgacgcgagcacgtcttcgagtgacaatgcggcgcagcagaccgttgtgtcggaggcgccatagtagaccttcaaagtcgtctgttcgacgagcaggccgcaggtgaagaccacggggccgaagaagccggagcactcgtattcggtctgcggctcgagaatcggccgcgctgagcgggcccgcaccatccagggctggcgggcgtcgagcaggacggcgccgaggcagtaacgatggttgcggtcggcgccgtggtaaatctccagccacccctcgtcgaggcggacgggcggtgcgccggccccgatgcgggcctcgtcccagaatccgtcgcgcagccccatcaagtggcgatggcggccccagcagagcaaatcgggcgattcggcgatccacatgttgttggtgtgacaaagcggcgagtgcggccgatgcaatgcgtagtatcgtccgtcgaccgtctcggggaagaggacgacgtccttgttttccgggccgaagataacgccgtgacgttcgaaggtcgcgaaatcacacgtcgacgccagcgccgtggtcacccccagcggcgagaccgcgacgtagctgatgtaatacgtctggccgatccgcgtgatgcgcgggtcctcgacaccgaagctctcccaggggtcggccggaccaagggtgggatgctcatcgatggtgaagcggataccgtctttgcttctcgccacgcgcagatgcgatattgaggtcaggtatgtcctgccccggcgcacgatcaaccgaggatcggagaaatcgttggccgggtcgggtcgagtgaacgccttggtgacgatccggccgcaggccgggtcgagaaacgcggtctgcaccacctccgggtcagtctggatcggacgctcggctacgcgcaccagcaggacgatttcctcgccaaggcgggccaccgcgggattgaagacgccgaggacctcgaaatcgccacgcgacggcgttacgtcctgtggggtgaggatcggattggctggatcgcgaaatgctgccatggcgacattctcccgaactctgtcggcggccttggcgtcaaggccacgattgcatagcgaatcgtaaccggtcggatcgtatccggcaaggcgtcggctcgatctcgacgaggtcggcggtgtagacttggcggcccggcggggcaaataacgttgattttcaggccgcgaatggtagaatacagtctgatgcgcatgtgcgaatatgccttcacggcgggcggagtcgcgaggtcattggggatcgacgacggtcccggattctggaacaccagcgtacttgcacgcctgtcaccgcttggattgtcgggagtgaggaatgagtgtgacgcgtgaatcccgtcgggccgctcgtcttgtgctggcttcgtttcttctgagtgtcggtcctgtctcggcgaccccggcaggccggggggcgggtctgccgctggcgatcaatgagctgatggcggccaacagcagtgtcaaggccgacccccaaggccagtacgacgactgggtcgagatccataattacagcgatgcgccgatcgacctggcccgcatgtacctgacggacgatccgggcgaaccgacaaaatggcagttcccaggcggtgcctcgcagccggccaccgttccggcggggggatatctcatcgtctggctcgacggccccacaagcgacagcgggctgcatgcgtcgtttgcgctcgattccgacggggacaccctggcactgtttgcccccgatgggaccacgctcatcgacagcgttgcattcgaagaacagaggaccgacatctcctatggccgctcgcccgacggcaccgggccgtacggcttcctgctgacgcccacgcccggctcgcgcaacagcggcctgtacgacggtctcgtcgccgatacgaagttcagccatgaccgcggtttctacgatatgccgtttgacgtgacgatcacgtgcgagacgcccggcgcgaccatctactacaccctcgacggcagcgcgccgtattcgcaggctcggcaggttcctgccggcagtgtctacaacggcccgatccggatcaccaggaccacgtgcctgcgggcccaggcggtcaagccgcagtgcgtacccagcaacgcggacacgcacacgtacatcttcctggccgatgcggcgaggcgctcgcagtccgaggtgctggcacgtggctatccgagcacgtggttcggctcctacccggccgactacgagatggaccccgagatctacaacagccccgcatatgccgacgtcatggacgatgcgctgctggcgattccgacgttgtctctggtgaccgacagggaccatttgttcagcaagaccaatgatgcgcagaccggcggcatctacatctacaccgggcacagcagcacgggcggccaggattgggaacggcccgtgtccgccgagctgttcagcatcgacggcgccaaggaatttcagatcgactgcggcctgcgcatccagggcggcgaaagccgcaacccgcccaagtgtcccaagcacagtttcagcctccgctttcgcgacgtctacggctcgtcgaagctccggttcccgttgttcgacggcagccccgtggaaacgttcgattcgcttcaactgcgcggcttctttaacaacgcctggacgcactgggatcccggccagcgccagcgggcgcagtacattcgcgaccagtggatgcgcgactcgttgctcgagatggggcaggccgacgccggacgcgggttctacgtgcacttgtacctcaacgggatttactggggcctgtatctggtccaggagcggccggtcgcctcgcactacgccgcctacaacggaggcgacccggatcgactcgattcgattaacggaggacgcgacgcccacgacgtcaccccccagacctggcaacaggccaggagcatcgccgccggcggcgattgggcccggatctgccaggtcatcgacatcgacaacttcatcgacttcacgctcctgaacctgttcgccggcaaccaggatctcaagaccgacggaaactggcgcgccgccggaggcggcgccgacaacaagccctggcgcttctatagctgggacggcgaacgagttcttgagaaggcgaccgagaccgtgataagggatacgttggacccgaccggcctgtatcgccccctttcgcaaatcgaggaattccgcgttcgcttcggtgatcgcgtgcacaagcatctgttcaacggcggcgccctgacgaccgagcgcaacatcgcgcgatggacccgacgggccgacgagatcgacgccgctgtcatcgccgagtcggcccgctggggcgactatcgccgggatgtgcattcctacagttcgggcccctattacctgtacacccgcaacgatttctggatcgtggaacgtcagaatctgctcgacaactatttccctcgccgcaacgaggtggcactgtcgcagttcaaagccctggggctctacccgagcgtggaggcgccggtcttccatatcgacggtgtctatcagcacggcggccacatcgccgagggctcacggctcacaatgacttccaacgccgcaacggtctggtacacgctcgacggcagcgatccgcggcgccccggcgtcagcggcagcacgggcgctgagctggtcctcgtgccggaagcggcggccaagcgcgcgttcgtccccaccacggatatcggcagcgcctggcgcagcgaggtggatttcgacgattccgcctggatcgccggctccggcggcgtcggctacgaacgcagcaccggctacgaggcgttcttcgacatcgacgtccaggcccagatgtacaaccgcaacgagagctgctacatccgcattccgttcgacgtcacacccgaggggttgcaatacgccggcggcctgacgctcaaggcgcggtacgacgacggtttcatcgcttacctcaacggcgtcgaagtccagcgcgtcatgttcgaggggacgcccgcctggaactccggcgccaccgacaaccactccgacctcgacgcggtcgagttcgagcggttcgacctctccggccatatcagccggcttcgcctgggacgcaacctcctggcgatccaggggctcaacgcaggtgccaacagttccgacttcctgatctcggttgagctggtcgcgtcgcaggggggcgcggacgttccagccggtgtcgcgccgacggcggtccgctacgccggcccgatccggctcgatgccagcgcgatggtccgcgcccgtgcccagagcggcagcacctggagcgcgctgaacgaggcggtctacgccgtcggtccggtggccgagagcctgcggatcagcgagatcatgtatcatcctgtcgatccgaacaccgaatacgtcgagttgctcaacatcggctctcagccggttaatctccatctggtgcgcttcacgaatgggatcgacttcaccttcggcgacgtcactctcgacccgggtgcatatgccctcgttgtcaaagacatcggggcgttcgaggcgcggtatggggaccagtcgcccgtcgtcggccagtacgccggcagcctgaacaatgcgggggaaagcatcgagttgcaggatgccgccggccagatgatcctcgccttccggtacaaggacggatggtacgacctcaccgatggggctggctactcgctgacggtgattgaccccctgaccgccgattcggccaccctcgacaagaagggcgcctggcgtgccagcgccgaggtcggcggctcgcccggctacaatgactgaacagagactcgaaacacgaaatccgaaacaagcccgaaatccgcaagctaaaatgaacgaaatgctgacgctgtgccgaaccccgtttcgaattcgcagtttggtgccttcggatctatttcggatttcgtgtttcggatttcggatttaacgcaacgccgtcacttcttcggataggcgtagtaaaacgtctcggcacgggagaaggcctcgacgtgcccgtcgaggaacgcgcagttgccgcgtccgcccagcttgtcgcccgaaggggcgtggtggaaacccgcgatcacatcccagaattgcccgaccccctcgggacccgggatgatgcgacgcaggtcgcctccggtctggctgaaccaactcttgaccatcgtatcgctgccgggggccatgaacgtgtcattgagcccggacatgttgtaggccgtatcgacgatcgcgctctcctctgcgaacgaaaacgtcgtcgcaggatgcttgacgtccgtgtccttgagaacgcgggtctcctgaacgtcactgcgggcgctgcccagataggcgttcatcgtgtagttgtaccagggttcgtagttcttgacgttcttgccataggcgaggaagaactggtcgtcgctgtggcgcactgcgaggttcttgaaggttgggcagatgaatgccctggcatcgccgaggtaccgggccatcatccctccgtactccgggtgactcttcaactcgatgtcgccgttgcaccagcgcagatgcaggtactcggaaatgcctgcctcgacggggtagggtgttagttggctgaagtagcatctctgtggttccgcgaacctgcggtcgttgtcgtcgaggtacatcgccatcgcgatggtatagttcttcaggttgcccttgcaggcggcgccctgggccagctcacgggccttgcctagcgccggtatcaggatccccatgagcacggcgatgacggcgatgacgaccagcagctcgatcagtgtgaatgccttcgacttccgcatgacatggtcctccacgttctcgggaagcgcttacccagacctatcgtctcggcccacccgtctccgggcgcacccggcagggcatgccagtcagggtgcctgatcgcgttgcatcgcggcatttaccattctatcgacagaggttgccgtctgcaagagatatcggtatccgccggccgcccatcatccgtctatggggcggggatcaggcggacgagggccacgccgtgacgcgatacgttggcggcgaagcggctgtcgtacgtgcccaggtccttctgccgccaaaggtcccgcacgaggcgcttgcccgacaggcccagtagcggccagtcgaccgacatctcgcgaggcaattcggccaggttgaacaggcccaccgccagcgagccgtcggccatcgccttggccataatcagagtctcgtcgtcctgcaccagcggcctggcctggatgcccagcgggtcctgatcgacgtcgatcacctcggcattgcatagtacgttgagggtgaattcgtcgagatagcgcatgtcgcccgagtagaacagcggggcggccatcaggcaccacatcgacatgtagctgtactgctcgcttggcgtcagtggggtgggtttgggcggctcatcatgctgataggcgttgccgatgtgcccgatcaggatgtagtcggggtcgttccactgtccgggccgggcgtactcaaagtgccgggcgttgctcaggccgatccggtagaagccgggcagcaggccgccttgttcgaggcccaggtcgcccgtggtgcgccagcagtgcccgccgacctcgccaccccaggtccagacgttgcccatgccgtactggcacaggttcaggatgatgtcccggtcgagactcttgaggatgtcgcccatcaactgatatgggcgcttcaggtgctccaggtctgtgccgccggcgacctcactgtacgagcaccagtcgtgcttgaggaaatcgaaaccccgctcggcgaacttctccgcgtccacccgttcgtgttcgtagctggcgacgtacccggcgcacgtccagggtcccggccctgtgtagaggcctgccttgagacctttgctgtggatgtgatcgaccatgcccttgatgtcggggaacttggcgttgggcaggatcgcgcctttcgcgtcgcggtagggctcatcgccgcgcctcttcatccagcagtcgtcgatgttgacgtagctgtacccgtagtcggccatgccggagctgatcatgacgtcggcggcgtttcgcatgtgctcttcggtgacgtgataatagtggatgtaccaactgttccagcccatcggcggcgtcagcgcgagcgtgtcgccgacgatgatcgcgaaggtgcggcggtcgctgccgtggtcgtttttcgcttcgagtgtcacgacgtactcgcctcgcggcgtgggcacggtccccgtgatgattcccgtgctcgcgtcgagccgcagcgtctcgggcagcccggcggcgccaaacgcgatcggccgcgtccccgtgcaggggatgcggtagaggaacggatgtcccggtcggcagccgtagaccttcggcccattgatctgcggcgccgggcccggcttgggcgtcagcagcaccttctcctcggcagggggccgtggtgcgtcgacggtcgtcggcttgtcaccccccacgatgaactcggcgcccgcccagttggcgtggtcgtaatcgatgccgtcgccgccggaactgaccagcaggatcatctgcgtcacgccagccagcgagacgtcgacacgcttggcttcgtcgttgccggtcatcaggccgctgtcgaacagcaccttgccgtcgccatagaccttgaaccggaccgagccgcgaggcccggtggcgtcgtcgacgcccacccaggcgctgaaccgctcggttttgccgtccagggcgatgtagcagatcgattcggcgtgtgtcgccacgcccgtttcgaacgagcgcccgccgatcgacagcgttcgggcggtgatgctcttgttgacctggggcttgccccacccggtggacatcttcgtcaggtccagctcgcccagcggcaccgttgcgcccgaggcgactaccgcgccgagacagatcagagaacacaccggaatccatcgctgccttacgctcgaacgcatgttcacctcccgttgcctgagccccgtgtttgccgcagccacgatcgggccgcccccgaatcctaccacgatcctgtcgcggcatcaatggcggggcgagcggttcgctcacgttttcgccggcgtctttgtgcttctgtgcgttgccatgtgagcgcacaacaaaggggccggcgtcactgggacgcaggcccctgatcatggacattcgactgtggcgaaccttggcaagggttcactacggcgcgacggtgccgaggaactccacttccgcgatctgcatgttgccatcgctgttggcccgaagggtcgggaacaggatctgatagtacctgtaggcaaccgtgttggcgaactcgatcggggtg

SEQ ID NO: 979 - DNA, 128189 bp, Artificial Sequence
  Synthetic Oligonucleotide
  misc_feature (1)..(97082): n is a, c, g, or t
nnnnnnnnnnnnnnnnnnnnnnnnnnnnnnnnnnnnnnnnnnnnnnnnnnnnnnnnnnnnnnnnnnnnnnnnnnnnnnnnnnnnnnnnnnnnnnnnnnnnnnnnnnnnnnnnnnnnnnnnnnnnnnnnnnnnnnnnnnnnnnnnnnnnnnnnnnnnnnnnnnnnnnnnnnnnnnnnnnnnnnnnnnnnnnnnnnnnnnnnnnnnnnnnnnnnnnnnnnnnnnnnnnnnnnnnnnnnnnnnnnnnnnnnnnnnnnnnnnnnnnnnnnnnnnnnnnnnnnnnnnnnnnnnnnnnnnnnnnnnnnnnnnnnnnnnnnnnnnnnnnnnnnnnnnnnnnnnnnnnnnnnnnnnnnnnnnnnnnnnnnnnnnnnnnnnnnnnnnnnnnnnnnnnnnnnnnnnnnnnnnnnnnnnnnnnnnnnnnnnnnnnnnnnnnnnnnnnnnnnnnnnnnnnnnnnnnnnnnnnnnnnnnnnnnnnnnnnnnnnnnnnnnnnnnnnnnnnnnnnnnnnnnnnnnnnnnnnnnnnnnnnnnnnnnnnnnnnnnnnnnnnnnnnnnnnnnnnnnnnnnnnnnnnnnnnnnnnnnnnnnnnnnnnnnnnnnnnnnnnnnnnnnnnnnnnnnnnnnnnnnnnnnnnnnnnnnnnnnnnnnnnnnnnnnnnnnnnnnnnnnnnnnnnnnnnnnnnnnnnnnnnnnnnnnnnnnnnnnnnnnnnnnnnnnnnnnnnnnnnnnnnnnnnnnnnnnnnnnnnnnnnnnnnnnnnnnnnnnnnnnnnnnnnnnnnnnnnnnnnnnnnnnnnnnnnnnnnnnnnnnnnnnnnnnnnnnnnnnnnnnnnnnnnnnnnnnnnnnnnnnnnnnnnnnnnnnnnnnnnnnnnnnnnnnnnnnnnnnnnnnnnnnnnnnnnnnnnnnnnnnnnnnnnnnnnnnnnnnnnnnnnnnnnnnnnnnnnnnnnnnnnnnnnnnnnnnnnnnnnnnnnnnnnnnnnnnnnnnnnnnnnnnnnnnnnnnnnnnnnnnnnnnnnnnnnnnnnnnnnnnnnnnnnnnnnnnnnnnnnnnnnnnnnnnnnnnnnnnnnnnnnnnnnnnnnnnnnnnnnnnnnnnnnnnnnnnnnnnnnnnnnnnnnnnnnnnnnnnnnnnnnnnnnnnnnnnnnnnnnnnnnnnnnnnnnnnnnnnnnnnnnnnnnnnnnnnnnnnnnnnnnnnnnnnnnnnnnnnnnnnnnnnnnnnnnnnnnnnnnnnnnnnnnnnnnnnnnnnnnnnnnnnnnnnnnnnnnnnnnnnnnnnnnnnnnnnnnnnnnnnnnnnnnnnnnnnnnnnnnnnnnnnnnnnnnnnnnnnnnnnnnnnnnnnnnnnnnnnnnnnnnnnnnnnnnnnnnnnnnnnnnnnnnnnnnnnnnnnnnnnnnnnnnnnnnnnnnnnnnnnnnnnnnnnnnnnnnnnnnnnnnnnnnnnnnnnnnnnnnnnnnnnnnnnnnnnnnnnnnnnnnnnnnnnnnnnnnnnnnnnnnnnnnnnnnnnnnnnnnnnnnnnnnnnnnnnnnnnnnnnnnnnnnnnnnnnnnnnnnnnnnnnnnnnnnnnnnnnnnnnnnnnnnnnnnnnnnnnnnnnnnnnnnnnnnnnnnnnnnnnnnnnnnnnnnnnnnnnnnnnnnnnnnnnnnnnnnnnnnnnnnnnnnnnnnnnnnnnnnnnnnnnnnnnnnnnnnnnnnnnnnnnnnnnnnnnnnnnnnnnnnnnnnnnnnnnnnnnnnnnnnnnnnnnnnnnnnnnnnnnnnnnnnnnnnnnnnnnnnnnnnnnnnnnnnnnnnnnnnnnnnnnnnnnnnnnnnnnnnnnnnnnnnnnnnnnnnnnnnnnnnnnnnnnnnnnnnnnnnnnnnnnnnnnnnnnnnnnnnnnnnnnnnnnnnnnnnnnnnnnnnnnnnnnnnnnnnnnnnnnnnnnnnnnnnnnnnnnnnnnnnnnnnnnnnnnnnnnnnnnnnnnnnnnnnnnnnnnnnnnnnnnnnnnnnnnnnnnnnnnnnnnnnnnnnnnnnnnnnnnnnnnnnnnnnnnnnnnnnnnnnnnnnnnnnnnnnnnnnnnnnnnnnnnnnnnnnnnnnnnnnnnnnnnnnnnnnnnnnnnnnnnnnnnnnnnnnnnnnnnnnnnnnnnnnnnnnnnnnnnnnnnnnnnnnnnnnnnnnnnnnnnnnnnnnnnnnnnnnnnnnnnnnnnnnnnnnnnnnnnnnnnnnnnnnnnnnnnnnnnnnnnnnnnnnnnnnnnnnnnnnnnnnnnnnnnnnnnnnnnnnnnnnnnnnnnnnnnnnnnnnnnnnnnnnnnnnnnnnnnnnnnnnnnnnnnnnnnnnnnnnnnnnnnnnnnnnnnnnnnnnnnnnnnnnnnnnnnnnnnnnnnnnnnnnnnnnnnnnnnnnnnnnnnnnnnnnnnnnnnnnnnnnnnnnnnnnnnnnnnnnnnnnnnnnnnnnnnnnnnnnnnnnnnnnnnnnnnnnnnnnnnnnnnnnnnnnnnnnnnnnnnnnnnnnnnnnnnnnnnnnnnnnnnnnnnnnnnnnnnnnnnnnnnnnnnnnnnnnnnnnnnnnnnnnnnnnnnnnnnnnnnnnnnnnnnnnnnnnnnnnnnnnnnnnnnnnnnnnnnnnnnnnnnnnnnnnnnnnnnnnnnnnnnnnnnnnnnnnnnnnnnnnnnnnnnnnnnnnnnnnnnnnnnnnnnnnnnnnnnnnnnnnnnnnnnnnnnnnnnnnnnnnnnnnnnnnnnnnnnnnnnnnnnnnnnnnnnnnnnnnnnnnnnnnnnnnnnnnnnnnnnnnnnnnnnnnnnnnnnnnnnnnnnnnnnnnnnnnnnnnnnnnnnnnnnnnnnnnnnnnnnnnnnnnnnnnnnnnnnnnnnnnnnnnnnnnnnnnnnnnnnnnnnnnnnnnnnnnnnnnnnnnnnnnnnnnnnnnnnnnnnnnnnnnnnnnnnnnnnnnnnnnnnnnnnnnnnnnnnnnnnnnnnnnnnnnnnnnnnnnnnnnnnnnnnnnnnnnnnnnnnnnnnnnnnnnnnnnnnnnnnnnnnnnnnnnnnnnnnnnnnnnnnnnnnnnnnnnnnnnnnnnnnnnnnnnnnnnnnnnnnnnnnnnnnnnnnnnnnnnnnnnnnnnnnnnnnnnnnnnnnnnnnnnnnnnnnnnnnnnnnnnnnnnnnnnnnnnnnnnnnnnnnnnnnnnnnnnnnnnnnnnnnnnnnnnnnnnnnnnnnnnnnnnnnnnnnnnnnnnnnnnnnnnnnnnnnnnnnnnnnnnnnnnnnnnnnnnnnnnnnnnnnnnnnnnnnnnnnnnnnnnnnnnnnnnnnnnnnnnnnnnnnnnnnnnnnnnnnnnnnnnnnnnnnnnnnnnnnnnnnnnnnnnnnnnnnnnnnnnnnnnnnnnnnnnnnnnnnnnnnnnnnnnnnnnnnnnnnnnnnnnnnnnnnnnnnnnnnnnnnnnnnnnnnnnnnnnnnnnnnnnnnnnnnnnnnnnnnnnnnnnnnnnnnnnnnnnnnnnnnnnnnnnnnnnnnnnnnnnnnnnnnnnnnnnnnnnnnnnnnnnnnnnnnnnnnnnnnnnnnnnnnnnnnnnnnnnnnnnnnnnnnnnnnnnnnnnnnnnnnnnnnnnnnnnnnnnnnnnnnnnnnnnnnnnnnnnnnnnnnnnnnnnnnnnnnnnnnnnnnnnnnnnnnnnnnnnnnnnnnnnnnnnnnnnnnnnnnnnnnnnnnnnnnnnnnnnnnnnnnnnnnnnnnnnnnnnnnnnnnnnnnnnnnnnnnnnnnnnnnnnnnnnnnnnnnnnnnnnnnnnnnnnnnnnnnnnnnnnnnnnnnnnnnnnnnnnnnnnnnnnnnnnnnnnnnnnnnnnnnnnnnnnnnnnnnnnnnnnnnnnnnnnnnnnnnnnnnnnnnnnnnnnnnnnnnnnnnnnnnnnnnnnnnnnnnnnnnnnnnnnnnnnnnnnnnnnnnnnnnnnnnnnnnnnnnnnnnnnnnnnnnnnnnnnnnnnnnnnnnnnnnnnnnnnnnnnnnnnnnnnnnnnnnnnnnnnnnnnnnnnnnnnnnnnnnnnnnnnnnnnnnnnnnnnnnnnnnnnnnnnnnnnnnnnnnnnnnnnnnnnnnnnnnnnnnnnnnnnnnnnnnnnnnnnnnnnnnnnnnnnnnnnnnnnnnnnnnnnnnnnnnnnnnnnnnnnnnnnnnnnnnnnnnnnnnnnnnnnnnnnnnnnnnnnnnnnnnnnnnnnnnnnnnnnnnnnnnnnnnnnnnnnnnnnnnnnnnnnnnnnnnnnnnnnnnnnnnnnnnnnnnnnnnnnnnnnnnnnnnnnnnnnnnnnnnnnnnnnnnnnnnnnnnnnnnnnnnnnnnnnnnnnnnnnnnnnnnnnnnnnnnnnnnnnnnnnnnnnnnnnnnnnnnnnnnnnnnnnnnnnnnnnnnnnnnnnnnnnnnnnnnnnnnnnnnnnnnnnnnnnnnnnnnnnnnnnnnnnnnnnnnnnnnnnnnnnnnnnnnnnnnnnnnnnnnnnnnnnnnnnnnnnnnnnnnnnnnnnnnnnnnnnnnnnnnnnnnnnnnnnnnnnnnnnnnnnnnnnnnnnnnnnnnnnnnnnnnnnnnnnnnnnnnnnnnnnnnnnnnnnnnnnnnnnnnnnnnnnnnnnnnnnnnnnnnnnnnnnnnnnnnnnnnnnnnnnnnnnnnnnnnnnnnnnnnnnnnnnnnnnnnnnnnnnnnnnnnnnnnnnnnnnnnnnnnnnnnnnnnnnnnnnnnnnnnnnnnnnnnnnnnnnnnnnnnnnnnnnnnnnnnnnnnnnnnnnnnnnnnnnnnnnnnnnnnnnnnnnnnnnnnnnnnnnnnnnnnnnnnnnnnnnnnnnnnnnnnnnnnnnnnnnnnnnnnnnnnnnnnnnnnnnnnnnnnnnnnnnnnnnnnnnnnnnnnnnnnnnnnnnnnnnnnnnnnnnnnnnnnnnnnnnnnnnnnnnnnnnnnnnnnnnnnnnnnnnnnnnnnnnnnnnnnnnnnnnnnnnnnnnnnnnnnnnnnnnnnnnnnnnnnnnnnnnnnnnnnnnnnnnnnnnnnnnnnnnnnnnnnnnnnnnnnnnnnnnnnnnnnnnnnnnnnnnnnnnnnnnnnnnnnnnnnnnnnnnnnnnnnnnnnnnnnnnnnnnnnnnnnnnnnnnnnnnnnnnnnnnnnnnnnnnnnnnnnnnnnnnnnnnnnnnnnnnnnnnnnnnnnnnnnnnnnnnnnnnnnnnnnnnnnnnnnnnnnnnnnnnnnnnnnnnnnnnnnnnnnnnnnnnnnnnnnnnnnnnnnnnnnnnnnnnnnnnnnnnnnnnnnnnnnnnnnnnnnnnnnnnnnnnnnnnnnnnnnnnnnnnnnnnnnnnnnnnnnnnnnnnnnnnnnnnnnnnnnnnnnnnnnnnnnnnnnnnnnnnnnnnnnnnnnnnnnnnnnnnnnnnnnnnnnnnnnnnnnnnnnnnnnnnnnnnnnnnnnnnnnnnnnnnnnnnnnnnnnnnnnnnnnnnnnnnnnnnnnnnnnnnnnnnnnnnnnnnnnnnnnnnnnnnnnnnnnnnnnnnnnnnnnnnnnnnnnnnnnnnnnnnnnnnnnnnnnnnnnnnnnnnnnnnnnnnnnnnnnnnnnnnnnnnnnnnnnnnnnnnnnnnnnnnnnnnnnnnnnnnnnnnnnnnnnnnnnnnnnnnnnnnnnnnnnnnnnnnnnnnnnnnnnnnnnnnnnnnnnnnnnnnnnnnnnnnnnnnnnnnnnnnnnnnnnnnnnnnnnnnnnnnnnnnnnnnnnnnnnnnnnnnnnnnnnnnnnnnnnnnnnnnnnnnnnnnnnnnnnnnnnnnnnnnnnnnnnnnnnnnnnnnnnnnnnnnnnnnnnnnnnnnnnnnnnnnnnnnnnnnnnnnnnnnnnnnnnnnnnnnnnnnnnnnnnnnnnnnnnnnnnnnnnnnnnnnnnnnnnnnnnnnnnnnnnnnnnnnnnnnnnnnnnnnnnnnnnnnnnnnnnnnnnnnnnnnnnnnnnnnnnnnnnnnnnnnnnnnnnnnnnnnnnnnnnnnnnnnnnnnnnnnnnnnnnnnnnnnnnnnnnnnnnnnnnnnnnnnnnnnnnnnnnnnnnnnnnnnnnnnnnnnnnnnnnnnnnnnnnnnnnnnnnnnnnnnnnnnnnnnnnnnnnnnnnnnnnnnnnnnnnnnnnnnnnnnnnnnnnnnnnnnnnnnnnnnnnnnnnnnnnnnnnnnnnnnnnnnnnnnnnnnnnnnnnnnnnnnnnnnnnnnnnnnnnnnnnnnnnnnnnnnnnnnnnnnnnnnnnnnnnnnnnnnnnnnnnnnnnnnnnnnnnnnnnnnnnnnnnnnnnnnnnnnnnnnnnnnnnnnnnnnnnnnnnnnnnnnnnnnnnnnnnnnnnnnnnnnnnnnnnnnnnnnnnnnnnnnnnnnnnnnnnnnnnnnnnnnnnnnnnnnnnnnnnnnnnnnnnnnnnnnnnnnnnnnnnnnnnnnnnnnnnnnnnnnnnnnnnnnnnnnnnnnnnnnnnnnnnnnnnnnnnnnnnnnnnnnnnnnnnnnnnnnnnnnnnnnnnnnnnnnnnnnnnnnnnnnnnnnnnnnnnnnnnnnnnnnnnnnnnnnnnnnnnnnnnnnnnnnnnnnnnnnnnnnnnnnnnnnnnnnnnnnnnnnnnnnnnnnnnnnnnnnnnnnnnnnnnnnnnnnnnnnnnnnnnnnnnnnnnnnnnnnnnnnnnnnnnnnnnnnnnnnnnnnnnnnnnnnnnnnnnnnnnnnnnnnnnnnnnnnnnnnnnnnnnnnnnnnnnnnnnnnnnnnnnnnnnnnnnnnnnnnnnnnnnnnnnnnnnnnnnnnnnnnnnnnnnnnnnnnnnnnnnnnnnnnnnnnnnnnnnnnnnnnnnnnnnnnnnnnnnnnnnnnnnnnnnnnnnnnnnnnnnnnnnnnnnnnnnnnnnnnnnnnnnnnnnnnnnnnnnnnnnnnnnnnnnnnnnnnnnnnnnnnnnnnnnnnnnnnnnnnnnnnnnnnnnnnnnnnnnnnnnnnnnnnnnnnnnnnnnnnnnnnnnnnnnnnnnnnnnnnnnnnnnnnnnnnnnnnnnnnnnnnnnnnnnnnnnnnnnnnnnnnnnnnnnnnnnnnnnnnnnnnnnnnnnnnnnnnnnnnnnnnnnnnnnnnnnnnnnnnnnnnnnnnnnnnnnnnnnnnnnnnnnnnnnnnnnnnnnnnnnnnnnnnnnnnnnnnnnnnnnnnnnnnnnnnnnnnnnnnnnnnnnnnnnnnnnnnnnnnnnnnnnnnnnnnnnnnnnnnnnnnnnnnnnnnnnnnnnnnnnnnnnnnnnnnnnnnnnnnnnnnnnnnnnnnnnnnnnnnnnnnnnnnnnnnnnnnnnnnnnnnnnnnnnnnnnnnnnnnnnnnnnnnnnnnnnnnnnnnnnnnnnnnnnnnnnnnnnnnnnnnnnnnnnnnnnnnnnnnnnnnnnnnnnnnnnnnnnnnnnnnnnnnnnnnnnnnnnnnnnnnnnnnnnnnnnnnnnnnnnnnnnnnnnnnnnnnnnnnnnnnnnnnnnnnnnnnnnnnnnnnnnnnnnnnnnnnnnnnnnnnnnnnnnnnnnnnnnnnnnnnnnnnnnnnnnnnnnnnnnnnnnnnnnnnnnnnnnnnnnnnnnnnnnnnnnnnnnnnnnnnnnnnnnnnnnnnnnnnnnnnnnnnnnnnnnnnnnnnnnnnnnnnnnnnnnnnnnnnnnnnnnnnnnnnnnnnnnnnnnnnnnnnnnnnnnnnnnnnnnnnnnnnnnnnnnnnnnnnnnnnnnnnnnnnnnnnnnnnnnnnnnnnnnnnnnnnnnnnnnnnnnnnnnnnnnnnnnnnnnnnnnnnnnnnnnnnnnnnnnnnnnnnnnnnnnnnnnnnnnnnnnnnnnnnnnnnnnnnnnnnnnnnnnnnnnnnnnnnnnnnnnnnnnnnnnnnnnnnnnnnnnnnnnnnnnnnnnnnnnnnnnnnnnnnnnnnnnnnnnnnnnnnnnnnnnnnnnnnnnnnnnnnnnnnnnnnnnnnnnnnnnnnnnnnnnnnnnnnnnnnnnnnnnnnnnnnnnnnnnnnnnnnnnnnnnnnnnnnnnnnnnnnnnnnnnnnnnnnnnnnnnnnnnnnnnnnnnnnnnnnnnnnnnnnnnnnnnnnnnnnnnnnnnnnnnnnnnnnnnnnnnnnnnnnnnnnnnnnnnnnnnnnnnnnnnnnnnnnnnnnnnnnnnnnnnnnnnnnnnnnnnnnnnnnnnnnnnnnnnnnnnnnnnnnnnnnnnnnnnnnnnnnnnnnnnnnnnnnnnnnnnnnnnnnnnnnnnnnnnnnnnnnnnnnnnnnnnnnnnnnnnnnnnnnnnnnnnnnnnnnnnnnnnnnnnnnnnnnnnnnnnnnnnnnnnnnnnnnnnnnnnnnnnnnnnnnnnnnnnnnnnnnnnnnnnnnnnnnnnnnnnnnnnnnnnnnnnnnnnnnnnnnnnnnnnnnnnnnnnnnnnnnnnnnnnnnnnnnnnnnnnnnnnnnnnnnnnnnnnnnnnnnnnnnnnnnnnnnnnnnnnnnnnnnnnnnnnnnnnnnnnnnnnnnnnnnnnnnnnnnnnnnnnnnnnnnnnnnnnnnnnnnnnnnnnnnnnnnnnnnnnnnnnnnnnnnnnnnnnnnnnnnnnnnnnnnnnnnnnnnnnnnnnnnnnnnnnnnnnnnnnnnnnnnnnnnnnnnnnnnnnnnnnnnnnnnnnnnnnnnnnnnnnnnnnnnnnnnnnnnnnnnnnnnnnnnnnnnnnnnnnnnnnnnnnnnnnnnnnnnnnnnnnnnnnnnnnnnnnnnnnnnnnnnnnnnnnnnnnnnnnnnnnnnnnnnnnnnnnnnnnnnnnnnnnnnnnnnnnnnnnnnnnnnnnnnnnnnnnnnnnnnnnnnnnnnnnnnnnnnnnnnnnnnnnnnnnnnnnnnnnnnnnnnnnnnnnnnnnnnnnnnnnnnnnnnnnnnnnnnnnnnnnnnnnnnnnnnnnnnnnnnnnnnnnnnnnnnnnnnnnnnnnnnnnnnnnnnnnnnnnnnnnnnnnnnnnnnnnnnnnnnnnnnnnnnnnnnnnnnnnnnnnnnnnnnnnnnnnnnnnnnnnnnnnnnnnnnnnnnnnnnnnnnnnnnnnnnnnnnnnnnnnnnnnnnnnnnnnnnnnnnnnnnnnnnnnnnnnnnnnnnnnnnnnnnnnnnnnnnnnnnnnnnnnnnnnnnnnnnnnnnnnnnnnnnnnnnnnnnnnnnnnnnnnnnnnnnnnnnnnnnnnnnnnnnnnnnnnnnnnnnnnnnnnnnnnnnnnnnnnnnnnnnnnnnnnnnnnnnnnnnnnnnnnnnnnnnnnnnnnnnnnnnnnnnnnnnnnnnnnnnnnnnnnnnnnnnnnnnnnnnnnnnnnnnnnnnnnnnnnnnnnnnnnnnnnnnnnnnnnnnnnnnnnnnnnnnnnnnnnnnnnnnnnnnnnnnnnnnnnnnnnnnnnnnnnnnnnnnnnnnnnnnnnnnnnnnnnnnnnnnnnnnnnnnnnnnnnnnnnnnnnnnnnnnnnnnnnnnnnnnnnnnnnnnnnnnnnnnnnnnnnnnnnnnnnnnnnnnnnnnnnnnnnnnnnnnnnnnnnnnnnnnnnnnnnnnnnnnnnnnnnnnnnnnnnnnnnnnnnnnnnnnnnnnnnnnnnnnnnnnnnnnnnnnnnnnnnnnnnnnnnnnnnnnnnnnnnnnnnnnnnnnnnnnnnnnnnnnnnnnnnnnnnnnnnnnnnnnnnnnnnnnnnnnnnnnnnnnnnnnnnnnnnnnnnnnnnnnnnnnnnnnnnnnnnnnnnnnnnnnnnnnnnnnnnnnnnnnnnnnnnnnnnnnnnnnnnnnnnnnnnnnnnnnnnnnnnnnnnnnnnnnnnnnnnnnnnnnnnnnnnnnnnnnnnnnnnnnnnnnnnnnnnnnnnnnnnnnnnnnnnnnnnnnnnnnnnnnnnnnnnnnnnnnnnnnnnnnnnnnnnnnnnnnnnnnnnnnnnnnnnnnnnnnnnnnnnnnnnnnnnnnnnnnnnnnnnnnnnnnnnnnnnnnnnnnnnnnnnnnnnnnnnnnnnnnnnnnnnnnnnnnnnnnnnnnnnnnnnnnnnnnnnnnnnnnnnnnnnnnnnnnnnnnnnnnnnnnnnnnnnnnnnnnnnnnnnnnnnnnnnnnnnnnnnnnnnnnnnnnnnnnnnnnnnnnnnnnnnnnnnnnnnnnnnnnnnnnnnnnnnnnnnnnnnnnnnnnnnnnnnnnnnnnnnnnnnnnnnnnnnnnnnnnnnnnnnnnnnnnnnnnnnnnnnnnnnnnnnnnnnnnnnnnnnnnnnnnnnnnnnnnnnnnnnnnnnnnnnnnnnnnnnnnnnnnnnnnnnnnnnnnnnnnnnnnnnnnnnnnnnnnnnnnnnnnnnnnnnnnnnnnnnnnnnnnnnnnnnnnnnnnnnnnnnnnnnnnnnnnnnnnnnnnnnnnnnnnnnnnnnnnnnnnnnnnnnnnnnnnnnnnnnnnnnnnnnnnnnnnnnnnnnnnnnnnnnnnnnnnnnnnnnnnnnnnnnnnnnnnnnnnnnnnnnnnnnnnnnnnnnnnnnnnnnnnnnnnnnnnnnnnnnnnnnnnnnnnnnnnnnnnnnnnnnnnnnnnnnnnnnnnnnnnnnnnnnnnnnnnnnnnnnnnnnnnnnnnnnnnnnnnnnnnnnnnnnnnnnnnnnnnnnnnnnnnnnnnnnnnnnnnnnnnnnnnnnnnnnnnnnnnnnnnnnnnnnnnnnnnnnnnnnnnnnnnnnnnnnnnnnnnnnnnnnnnnnnnnnnnnnnnnnnnnnnnnnnnnnnnnnnnnnnnnnnnnnnnnnnnnnnnnnnnnnnnnnnnnnnnnnnnnnnnnnnnnnnnnnnnnnnnnnnnnnnnnnnnnnnnnnnnnnnnnnnnnnnnnnnnnnnnnnnnnnnnnnnnnnnnnnnnnnnnnnnnnnnnnnnnnnnnnnnnnnnnnnnnnnnnnnnnnnnnnnnnnnnnnnnnnnnnnnnnnnnnnnnnnnnnnnnnnnnnnnnnnnnnnnnnnnnnnnnnnnnnnnnnnnnnnnnnnnnnnnnnnnnnnnnnnnnnnnnnnnnnnnnnnnnnnnnnnnnnnnnnnnnnnnnnnnnnnnnnnnnnnnnnnnnnnnnnnnnnnnnnnnnnnnnnnnnnnnnnnnnnnnnnnnnnnnnnnnnnnnnnnnnnnnnnnnnnnnnnnnnnnnnnnnnnnnnnnnnnnnnnnnnnnnnnnnnnnnnnnnnnnnnnnnnnnnnnnnnnnnnnnnnnnnnnnnnnnnnnnnnnnnnnnnnnnnnnnnnnnnnnnnnnnnnnnnnnnnnnnnnnnnnnnnnnnnnnnnnnnnnnnnnnnnnnnnnnnnnnnnnnnnnnnnnnnnnnnnnnnnnnnnnnnnnnnnnnnnnnnnnnnnnnnnnnnnnnnnnnnnnnnnnnnnnnnnnnnnnnnnnnnnnnnnnnnnnnnnnnnnnnnnnnnnnnnnnnnnnnnnnnnnnnnnnnnnnnnnnnnnnnnnnnnnnnnnnnnnnnnnnnnnnnnnnnnnnnnnnnnnnnnnnnnnnnnnnnnnnnnnnnnnnnnnnnnnnnnnnnnnnnnnnnnnnnnnnnnnnnnnnnnnnnnnnnnnnnnnnnnnnnnnnnnnnnnnnnnnnnnnnnnnnnnnnnnnnnnnnnnnnnnnnnnnnnnnnnnnnnnnnnnnnnnnnnnnnnnnnnnnnnnnnnnnnnnnnnnnnnnnnnnnnnnnnnnnnnnnnnnnnnnnnnnnnnnnnnnnnnnnnnnnnnnnnnnnnnnnnnnnnnnnnnnnnnnnnnnnnnnnnnnnnnnnnnnnnnnnnnnnnnnnnnnnnnnnnnnnnnnnnnnnnnnnnnnnnnnnnnnnnnnnnnnnnnnnnnnnnnnnnnnnnnnnnnnnnnnnnnnnnnnnnnnnnnnnnnnnnnnnnnnnnnnnnnnnnnnnnnnnnnnnnnnnnnnnnnnnnnnnnnnnnnnnnnnnnnnnnnnnnnnnnnnnnnnnnnnnnnnnnnnnnnnnnnnnnnnnnnnnnnnnnnnnnnnnnnnnnnnnnnnnnnnnnnnnnnnnnnnnnnnnnnnnnnnnnnnnnnnnnnnnnnnnnnnnnnnnnnnnnnnnnnnnnnnnnnnnnnnnnnnnnnnnnnnnnnnnnnnnnnnnnnnnnnnnnnnnnnnnnnnnnnnnnnnnnnnnnnnnnnnnnnnnnnnnnnnnnnnnnnnnnnnnnnnnnnnnnnnnnnnnnnnnnnnnnnnnnnnnnnnnnnnnnnnnnnnnnnnnnnnnnnnnnnnnnnnnnnnnnnnnnnnnnnnnnnnnnnnnnnnnnnnnnnnnnnnnnnnnnnnnnnnnnnnnnnnnnnnnnnnnnnnnnnnnnnnnnnnnnnnnnnnnnnnnnnnnnnnnnnnnnnnnnnnnnnnnnnnnnnnnnnnnnnnnnnnnnnnnnnnnnnnnnnnnnnnnnnnnnnnnnnnnnnnnnnnnnnnnnnnnnnnnnnnnnnnnnnnnnnnnnnnnnnnnnnnnnnnnnnnnnnnnnnnnnnnnnnnnnnnnnnnnnnnnnnnnnnnnnnnnnnnnnnnnnnnnnnnnnnnnnnnnnnnnnnnnnnnnnnnnnnnnnnnnnnnnnnnnnnnnnnnnnnnnnnnnnnnnnnnnnnnnnnnnnnnnnnnnnnnnnnnnnnnnnnnnnnnnnnnnnnnnnnnnnnnnnnnnnnnnnnnnnnnnnnnnnnnnnnnnnnnnnnnnnnnnnnnnnnnnnnnnnnnnnnnnnnnnnnnnnnnnnnnnnnnnnnnnnnnnnnnnnnnnnnnnnnnnnnnnnnnnnnnnnnnnnnnnnnnnnnnnnnnnnnnnnnnnnnnnnnnnnnnnnnnnnnnnnnnnnnnnnnnnnnnnnnnnnnnnnnnnnnnnnnnnnnnnnnnnnnnnnnnnnnnnnnnnnnnnnnnnnnnnnnnnnnnnnnnnnnnnnnnnnnnnnnnnnnnnnnnnnnnnnnnnnnnnnnnnnnnnnnnnnnnnnnnnnnnnnnnnnnnnnnnnnnnnnnnnnnnnnnnnnnnnnnnnnnnnnnnnnnnnnnnnnnnnnnnnnnnnnnnnnnnnnnnnnnnnnnnnnnnnnnnnnnnnnnnnnnnnnnnnnnnnnnnnnnnnnnnnnnnnnnnnnnnnnnnnnnnnnnnnnnnnnnnnnnnnnnnnnnnnnnnnnnnnnnnnnnnnnnnnnnnnnnnnnnnnnnnnnnnnnnnnnnnnnnnnnnnnnnnnnnnnnnnnnnnnnnnnnnnnnnnnnnnnnnnnnnnnnnnnnnnnnnnnnnnnnnnnnnnnnnnnnnnnnnnnnnnnnnnnnnnnnnnnnnnnnnnnnnnnnnnnnnnnnnnnnnnnnnnnnnnnnnnnnnnnnnnnnnnnnnnnnnnnnnnnnnnnnnnnnnnnnnnnnnnnnnnnnnnnnnnnnnnnnnnnnnnnnnnnnnnnnnnnnnnnnnnnnnnnnnnnnnnnnnnnnnnnnnnnnnnnnnnnnnnnnnnnnnnnnnnnnnnnnnnnnnnnnnnnnnnnnnnnnnnnnnnnnnnnnnnnnnnnnnnnnnnnnnnnnnnnnnnnnnnnnnnnnnnnnnnnnnnnnnnnnnnnnnnnnnnnnnnnnnnnnnnnnnnnnnnnnnnnnnnnnnnnnnnnnnnnnnnnnnnnnnnnnnnnnnnnnnnnnnnnnnnnnnnnnnnnnnnnnnnnnnnnnnnnnnnnnnnnnnnnnnnnnnnnnnnnnnnnnnnnnnnnnnnnnnnnnnnnnnnnnnnnnnnnnnnnnnnnnnnnnnnnnnnnnnnnnnnnnnnnnnnnnnnnnnnnnnnnnnnnnnnnnnnnnnnnnnnnnnnnnnnnnnnnnnnnnnnnnnnnnnnnnnnnnnnnnnnnnnnnnnnnnnnnnnnnnnnnnnnnnnnnnnnnnnnnnnnnnnnnnnnnnnnnnnnnnnnnnnnnnnnnnnnnnnnnnnnnnnnnnnnnnnnnnnnnnnnnnnnnnnnnnnnnnnnnnnnnnnnnnnnnnnnnnnnnnnnnnnnnnnnnnnnnnnnnnnnnnnnnnnnnnnnnnnnnnnnnnnnnnnnnnnnnnnnnnnnnnnnnnnnnnnnnnnnnnnnnnnnnnnnnnnnnnnnnnnnnnnnnnnnnnnnnnnnnnnnnnnnnnnnnnnnnnnnnnnnnnnnnnnnnnnnnnnnnnnnnnnnnnnnnnnnnnnnnnnnnnnnnnnnnnnnnnnnnnnnnnnnnnnnnnnnnnnnnnnnnnnnnnnnnnnnnnnnnnnnnnnnnnnnnnnnnnnnnnnnnnnnnnnnnnnnnnnnnnnnnnnnnnnnnnnnnnnnnnnnnnnnnnnnnnnnnnnnnnnnnnnnnnnnnnnnnnnnnnnnnnnnnnnnnnnnnnnnnnnnnnnnnnnnnnnnnnnnnnnnnnnnnnnnnnnnnnnnnnnnnnnnnnnnnnnnnnnnnnnnnnnnnnnnnnnnnnnnnnnnnnnnnnnnnnnnnnnnnnnnnnnnnnnnnnnnnnnnnnnnnnnnnnnnnnnnnnnnnnnnnnnnnnnnnnnnnnnnnnnnnnnnnnnnnnnnnnnnnnnnnnnnnnnnnnnnnnnnnnnnnnnnnnnnnnnnnnnnnnnnnnnnnnnnnnnnnnnnnnnnnnnnnnnnnnnnnnnnnnnnnnnnnnnnnnnnnnnnnnnnnnnnnnnnnnnnnnnnnnnnnnnnnnnnnnnnnnnnnnnnnnnnnnnnnnnnnnnnnnnnnnnnnnnnnnnnnnnnnnnnnnnnnnnnnnnnnnnnnnnnnnnnnnnnnnnnnnnnnnnnnnnnnnnnnnnnnnnnnnnnnnnnnnnnnnnnnnnnnnnnnnnnnnnnnnnnnnnnnnnnnnnnnnnnnnnnnnnnnnnnnnnnnnnnnnnnnnnnnnnnnnnnnnnnnnnnnnnnnnnnnnnnnnnnnnnnnnnnnnnnnnnnnnnnnnnnnnnnnnnnnnnnnnnnnnnnnnnnnnnnnnnnnnnnnnnnnnnnnnnnnnnnnnnnnnnnnnnnnnnnnnnnnnnnnnnnnnnnnnnnnnnnnnnnnnnnnnnnnnnnnnnnnnnnnnnnnnnnnnnnnnnnnnnnnnnnnnnnnnnnnnnnnnnnnnnnnnnnnnnnnnnnnnnnnnnnnnnnnnnnnnnnnnnnnnnnnnnnnnnnnnnnnnnnnnnnnnnnnnnnnnnnnnnnnnnnnnnnnnnnnnnnnnnnnnnnnnnnnnnnnnnnnnnnnnnnnnnnnnnnnnnnnnnnnnnnnnnnnnnnnnnnnnnnnnnnnnnnnnnnnnnnnnnnnnnnnnnnnnnnnnnnnnnnnnnnnnnnnnnnnnnnnnnnnnnnnnnnnnnnnnnnnnnnnnnnnnnnnnnnnnnnnnnnnnnnnnnnnnnnnnnnnnnnnnnnnnnnnnnnnnnnnnnnnnnnnnnnnnnnnnnnnnnnnnnnnnnnnnnnnnnnnnnnnnnnnnnnnnnnnnnnnnnnnnnnnnnnnnnnnnnnnnnnnnnnnnnnnnnnnnnnnnnnnnnnnnnnnnnnnnnnnnnnnnnnnnnnnnnnnnnnnnnnnnnnnnnnnnnnnnnnnnnnnnnnnnnnnnnnnnnnnnnnnnnnnnnnnnnnnnnnnnnnnnnnnnnnnnnnnnnnnnnnnnnnnnnnnnnnnnnnnnnnnnnnnnnnnnnnnnnnnnnnnnnnnnnnnnnnnnnnnnnnnnnnnnnnnnnnnnnnnnnnnnnnnnnnnnnnnnnnnnnnnnnnnnnnnnnnnnnnnnnnnnnnnnnnnnnnnnnnnnnnnnnnnnnnnnnnnnnnnnnnnnnnnnnnnnnnnnnnnnnnnnnnnnnnnnnnnnnnnnnnnnnnnnnnnnnnnnnnnnnnnnnnnnnnnnnnnnnnnnnnnnnnnnnnnnnnnnnnnnnnnnnnnnnnnnnnnnnnnnnnnnnnnnnnnnnnnnnnnnnnnnnnnnnnnnnnnnnnnnnnnnnnnnnnnnnnnnnnnnnnnnnnnnnnnnnnnnnnnnnnnnnnnnnnnnnnnnnnnnnnnnnnnnnnnnnnnnnnnnnnnnnnnnnnnnnnnnnnnnnnnnnnnnnnnnnnnnnnnnnnnnnnnnnnnnnnnnnnnnnnnnnnnnnnnnnnnnnnnnnnnnnnnnnnnnnnnnnnnnnnnnnnnnnnnnnnnnnnnnnnnnnnnnnnnnnnnnnnnnnnnnnnnnnnnnnnnnnnnnnnnnnnnnnnnnnnnnnnnnnnnnnnnnnnnnnnnnnnnnnnnnnnnnnnnnnnnnnnnnnnnnnnnnnnnnnnnnnnnnnnnnnnnnnnnnnnnnnnnnnnnnnnnnnnnnnnnnnnnnnnnnnnnnnnnnnnnnnnnnnnnnnnnnnnnnnnnnnnnnnnnnnnnnnnnnnnnnnnnnnnnnnnnnnnnnnnnnnnnnnnnnnnnnnnnnnnnnnnnnnnnnnnnnnnnnnnnnnnnnnnnnnnnnnnnnnnnnnnnnnnnnnnnnnnnnnnnnnnnnnnnnnnnnnnnnnnnnnnnnnnnnnnnnnnnnnnnnnnnnnnnnnnnnnnnnnnnnnnnnnnnnnnnnnnnnnnnnnnnnnnnnnnnnnnnnnnnnnnnnnnnnnnnnnnnnnnnnnnnnnnnnnnnnnnnnnnnnnnnnnnnnnnnnnnnnnnnnnnnnnnnnnnnnnnnnnnnnnnnnnnnnnnnnnnnnnnnnnnnnnnnnnnnnnnnnnnnnnnnnnnnnnnnnnnnnnnnnnnnnnnnnnnnnnnnnnnnnnnnnnnnnnnnnnnnnnnnnnnnnnnnnnnnnnnnnnnnnnnnnnnnnnnnnnnnnnnnnnnnnnnnnnnnnnnnnnnnnnnnnnnnnnnnnnnnnnnnnnnnnnnnnnnnnnnnnnnnnnnnnnnnnnnnnnnnnnnnnnnnnnnnnnnnnnnnnnnnnnnnnnnnnnnnnnnnnnnnnnnnnnnnnnnnnnnnnnnnnnnnnnnnnnnnnnnnnnnnnnnnnnnnnnnnnnnnnnnnnnnnnnnnnnnnnnnnnnnnnnnnnnnnnnnnnnnnnnnnnnnnnnnnnnnnnnnnnnnnnnnnnnnnnnnnnnnnnnnnnnnnnnnnnnnnnnnnnnnnnnnnnnnnnnnnnnnnnnnnnnnnnnnnnnnnnnnnnnnnnnnnnnnnnnnnnnnnnnnnnnnnnnnnnnnnnnnnnnnnnnnnnnnnnnnnnnnnnnnnnnnnnnnnnnnnnnnnnnnnnnnnnnnnnnnnnnnnnnnnnnnnnnnnnnnnnnnnnnnnnnnnnnnnnnnnnnnnnnnnnnnnnnnnnnnnnnnnnnnnnnnnnnnnnnnnnnnnnnnnnnnnnnnnnnnnnnnnnnnnnnnnnnnnnnnnnnnnnnnnnnnnnnnnnnnnnnnnnnnnnnnnnnnnnnnnnnnnnnnnnnnnnnnnnnnnnnnnnnnnnnnnnnnnnnnnnnnnnnnnnnnnnnnnnnnnnnnnnnnnnnnnnnnnnnnnnnnnnnnnnnnnnnnnnnnnnnnnnnnnnnnnnnnnnnnnnnnnnnnnnnnnnnnnnnnnnnnnnnnnnnnnnnnnnnnnnnnnnnnnnnnnnnnnnnnnnnnnnnnnnnnnnnnnnnnnnnnnnnnnnnnnnnnnnnnnnnnnnnnnnnnnnnnnnnnnnnnnnnnnnnnnnnnnnnnnnnnnnnnnnnnnnnnnnnnnnnnnnnnnnnnnnnnnnnnnnnnnnnnnnnnnnnnnnnnnnnnnnnnnnnnnnnnnnnnnnnnnnnnnnnnnnnnnnnnnnnnnnnnnnnnnnnnnnnnnnnnnnnnnnnnnnnnnnnnnnnnnnnnnnnnnnnnnnnnnnnnnnnnnnnnnnnnnnnnnnnnnnnnnnnnnnnnnnnnnnnnnnnnnnnnnnnnnnnnnnnnnnnnnnnnnnnnnnnnnnnnnnnnnnnnnnnnnnnnnnnnnnnnnnnnnnnnnnnnnnnnnnnnnnnnnnnnnnnnnnnnnnnnnnnnnnnnnnnnnnnnnnnnnnnnnnnnnnnnnnnnnnnnnnnnnnnnnnnnnnnnnnnnnnnnnnnnnnnnnnnnnnnnnnnnnnnnnnnnnnnnnnnnnnnnnnnnnnnnnnnnnnnnnnnnnnnnnnnnnnnnnnnnnnnnnnnnnnnnnnnnnnnnnnnnnnnnnnnnnnnnnnnnnnnnnnnnnnnnnnnnnnnnnnnnnnnnnnnnnnnnnnnnnnnnnnnnnnnnnnnnnnnnnnnnnnnnnnnnnnnnnnnnnnnnnnnnnnnnnnnnnnnnnnnnnnnnnnnnnnnnnnnnnnnnnnnnnnnnnnnnnnnnnnnnnnnnnnnnnnnnnnnnnnnnnnnnnnnnnnnnnnnnnnnnnnnnnnnnnnnnnnnnnnnnnnnnnnnnnnnnnnnnnnnnnnnnnnnnnnnnnnnnnnnnnnnnnnnnnnnnnnnnnnnnnnnnnnnnnnnnnnnnnnnnnnnnnnnnnnnnnnnnnnnnnnnnnnnnnnnnnnnnnnnnnnnnnnnnnnnnnnnnnnnnnnnnnnnnnnnnnnnnnnnnnnnnnnnnnnnnnnnnnnnnnnnnnnnnnnnnnnnnnnnnnnnnnnnnnnnnnnnnnnnnnnnnnnnnnnnnnnnnnnnnnnnnnnnnnnnnnnnnnnnnnnnnnnnnnnnnnnnnnnnnnnnnnnnnnnnnnnnnnnnnnnnnnnnnnnnnnnnnnnnnnnnnnnnnnnnnnnnnnnnnnnnnnnnnnnnnnnnnnnnnnnnnnnnnnnnnnnnnnnnnnnnnnnnnnnnnnnnnnnnnnnnnnnnnnnnnnnnnnnnnnnnnnnnnnnnnnnnnnnnnnnnnnnnnnnnnnnnnnnnnnnnnnnnnnnnnnnnnnnnnnnnnnnnnnnnnnnnnnnnnnnnnnnnnnnnnnnnnnnnnnnnnnnnnnnnnnnnnnnnnnnnnnnnnnnnnnnnnnnnnnnnnnnnnnnnnnnnnnnnnnnnnnnnnnnnnnnnnnnnnnnnnnnnnnnnnnnnnnnnnnnnnnnnnnnnnnnnnnnnnnnnnnnnnnnnnnnnnnnnnnnnnnnnnnnnnnnnnnnnnnnnnnnnnnnnnnnnnnnnnnnnnnnnnnnnnnnnnnnnnnnnnnnnnnnnnnnnnnnnnnnnnnnnnnnnnnnnnnnnnnnnnnnnnnnnnnnnnnnnnnnnnnnnnnnnnnnnnnnnnnnnnnnnnnnnnnnnnnnnnnnnnnnnnnnnnnnnnnnnnnnnnnnnnnnnnnnnnnnnnnnnnnnnnnnnnnnnnnnnnnnnnnnnnnnnnnnnnnnnnnnnnnnnnnnnnnnnnnnnnnnnnnnnnnnnnnnnnnnnnnnnnnnnnnnnnnnnnnnnnnnnnnnnnnnnnnnnnnnnnnnnnnnnnnnnnnnnnnnnnnnnnnnnnnnnnnnnnnnnnnnnnnnnnnnnnnnnnnnnnnnnnnnnnnnnnnnnnnnnnnnnnnnnnnnnnnnnnnnnnnnnnnnnnnnnnnnnnnnnnnnnnnnnnnnnnnnnnnnnnnnnnnnnnnnnnnnnnnnnnnnnnnnnnnnnnnnnnnnnnnnnnnnnnnnnnnnnnnnnnnnnnnnnnnnnnnnnnnnnnnnnnnnnnnnnnnnnnnnnnnnnnnnnnnnnnnnnnnnnnnnnnnnnnnnnnnnnnnnnnnnnnnnnnnnnnnnnnnnnnnnnnnnnnnnnnnnnnnnnnnnnnnnnnnnnnnnnnnnnnnnnnnnnnnnnnnnnnnnnnnnnnnnnnnnnnnnnnnnnnnnnnnnnnnnnnnnnnnnnnnnnnnnnnnnnnnnnnnnnnnnnnnnnnnnnnnnnnnnnnnnnnnnnnnnnnnnnnnnnnnnnnnnnnnnnnnnnnnnnnnnnnnnnnnnnnnnnnnnnnnnnnnnnnnnnnnnnnnnnnnnnnnnnnnnnnnnnnnnnnnnnnnnnnnnnnnnnnnnnnnnnnnnnnnnnnnnnnnnnnnnnnnnnnnnnnnnnnnnnnnnnnnnnnnnnnnnnnnnnnnnnnnnnnnnnnnnnnnnnnnnnnnnnnnnnnnnnnnnnnnnnnnnnnnnnnnnnnnnnnnnnnnnnnnnnnnnnnnnnnnnnnnnnnnnnnnnnnnnnnnnnnnnnnnnnnnnnnnnnnnnnnnnnnnnnnnnnnnnnnnnnnnnnnnnnnnnnnnnnnnnnnnnnnnnnnnnnnnnnnnnnnnnnnnnnnnnnnnnnnnnnnnnnnnnnnnnnnnnnnnnnnnnnnnnnnnnnnnnnnnnnnnnnnnnnnnnnnnnnnnnnnnnnnnnnnnnnnnnnnnnnnnnnnnnnnnnnnnnnnnnnnnnnnnnnnnnnnnnnnnnnnnnnnnnnnnnnnnnnnnnnnnnnnnnnnnnnnnnnnnnnnnnnnnnnnnnnnnnnnnnnnnnnnnnnnnnnnnnnnnnnnnnnnnnnnnnnnnnnnnnnnnnnnnnnnnnnnnnnnnnnnnnnnnnnnnnnnnnnnnnnnnnnnnnnnnnnnnnnnnnnnnnnnnnnnnnnnnnnnnnnnnnnnnnnnnnnnnnnnnnnnnnnnnnnnnnnnnnnnnnnnnnnnnnnnnnnnnnnnnnnnnnnnnnnnnnnnnnnnnnnnnnnnnnnnnnnnnnnnnnnnnnnnnnnnnnnnnnnnnnnnnnnnnnnnnnnnnnnnnnnnnnnnnnnnnnnnnnnnnnnnnnnnnnnnnnnnnnnnnnnnnnnnnnnnnnnnnnnnnnnnnnnnnnnnnnnnnnnnnnnnnnnnnnnnnnnnnnnnnnnnnnnnnnnnnnnnnnnnnnnnnnnnnnnnnnnnnnnnnnnnnnnnnnnnnnnnnnnnnnnnnnnnnnnnnnnnnnnnnnnnnnnnnnnnnnnnnnnnnnnnnnnnnnnnnnnnnnnnnnnnnnnnnnnnnnnnnnnnnnnnnnnnnnnnnnnnnnnnnnnnnnnnnnnnnnnnnnnnnnnnnnnnnnnnnnnnnnnnnnnnnnnnnnnnnnnnnnnnnnnnnnnnnnnnnnnnnnnnnnnnnnnnnnnnnnnnnnnnnnnnnnnnnnnnnnnnnnnnnnnnnnnnnnnnnnnnnnnnnnnnnnnnnnnnnnnnnnnnnnnnnnnnnnnnnnnnnnnnnnnnnnnnnnnnnnnnnnnnnnnnnnnnnnnnnnnnnnnnnnnnnnnnnnnnnnnnnnnnnnnnnnnnnnnnnnnnnnnnnnnnnnnnnnnnnnnnnnnnnnnnnnnnnnnnnnnnnnnnnnnnnnnnnnnnnnnnnnnnnnnnnnnnnnnnnnnnnnnnnnnnnnnnnnnnnnnnnnnnnnnnnnnnnnnnnnnnnnnnnnnnnnnnnnnnnnnnnnnnnnnnnnnnnnnnnnnnnnnnnnnnnnnnnnnnnnnnnnnnnnnnnnnnnnnnnnnnnnnnnnnnnnnnnnnnnnnnnnnnnnnnnnnnnnnnnnnnnnnnnnnnnnnnnnnnnnnnnnnnnnnnnnnnnnnnnnnnnnnnnnnnnnnnnnnnnnnnnnnnnnnnnnnnnnnnnnnnnnnnnnnnnnnnnnnnnnnnnnnnnnnnnnnnnnnnnnnnnnnnnnnnnnnnnnnnnnnnnnnnnnnnnnnnnnnnnnnnnnnnnnnnnnnnnnnnnnnnnnnnnnnnnnnnnnnnnnnnnnnnnnnnnnnnnnnnnnnnnnnnnnnnnnnnnnnnnnnnnnnnnnnnnnnnnnnnnnnnnnnnnnnnnnnnnnnnnnnnnnnnnnnnnnnnnnnnnnnnnnnnnnnnnnnnnnnnnnnnnnnnnnnnnnnnnnnnnnnnnnnnnnnnnnnnnnnnnnnnnnnnnnnnnnnnnnnnnnnnnnnnnnnnnnnnnnnnnnnnnnnnnnnnnnnnnnnnnnnnnnnnnnnnnnnnnnnnnnnnnnnnnnnnnnnnnnnnnnnnnnnnnnnnnnnnnnnnnnnnnnnnnnnnnnnnnnnnnnnnnnnnnnnnnnnnnnnnnnnnnnnnnnnnnnnnnnnnnnnnnnnnnnnnnnnnnnnnnnnnnnnnnnnnnnnnnnnnnnnnnnnnnnnnnnnnnnnnnnnnnnnnnnnnnnnnnnnnnnnnnnnnnnnnnnnnnnnnnnnnnnnnnnnnnnnnnnnnnnnnnnnnnnnnnnnnnnnnnnnnnnnnnnnnnnnnnnnnnnnnnnnnnnnnnnnnnnnnnnnnnnnnnnnnnnnnnnnnnnnnnnnnnnnnnnnnnnnnnnnnnnnnnnnnnnnnnnnnnnnnnnnnnnnnnnnnnnnnnnnnnnnnnnnnnnnnnnnnnnnnnnnnnnnnnnnnnnnnnnnnnnnnnnnnnnnnnnnnnnnnnnnnnnnnnnnnnnnnnnnnnnnnnnnnnnnnnnnnnnnnnnnnnnnnnnnnnnnnnnnnnnnnnnnnnnnnnnnnnnnnnnnnnnnnnnnnnnnnnnnnnnnnnnnnnnnnnnnnnnnnnnnnnnnnnnnnnnnnnnnnnnnnnnnnnnnnnnnnnnnnnnnnnnnnnnnnnnnnnnnnnnnnnnnnnnnnnnnnnnnnnnnnnnnnnnnnnnnnnnnnnnnnnnnnnnnnnnnnnnnnnnnnnnnnnnnnnnnnnnnnnnnnnnnnnnnnnnnnnnnnnnnnnnnnnnnnnnnnnnnnnnnnnnnnnnnnnnnnnnnnnnnnnnnnnnnnnnnnnnnnnnnnnnnnnnnnnnnnnnnnnnnnnnnnnnnnnnnnnnnnnnnnnnnnnnnnnnnnnnnnnnnnnnnnnnnnnnnnnnnnnnnnnnnnnnnnnnnnnnnnnnnnnnnnnnnnnnnnnnnnnnnnnnnnnnnnnnnnnnnnnnnnnnnnnnnnnnnnnnnnnnnnnnnnnnnnnnnnnnnnnnnnnnnnnnnnnnnnnnnnnnnnnnnnnnnnnnnnnnnnnnnnnnnnnnnnnnnnnnnnnnnnnnnnnnnnnnnnnnnnnnnnnnnnnnnnnnnnnnnnnnnnnnnnnnnnnnnnnnnnnnnnnnnnnnnnnnnnnnnnnnnnnnnnnnnnnnnnnnnnnnnnnnnnnnnnnnnnnnnnnnnnnnnnnnnnnnnnnnnnnnnnnnnnnnnnnnnnnnnnnnnnnnnnnnnnnnnnnnnnnnnnnnnnnnnnnnnnnnnnnnnnnnnnnnnnnnnnnnnnnnnnnnnnnnnnnnnnnnnnnnnnnnnnnnnnnnnnnnnnnnnnnnnnnnnnnnnnnnnnnnnnnnnnnnnnnnnnnnnnnnnnnnnnnnnnnnnnnnnnnnnnnnnnnnnnnnnnnnnnnnnnnnnnnnnnnnnnnnnnnnnnnnnnnnnnnnnnnnnnnnnnnnnnnnnnnnnnnnnnnnnnnnnnnnnnnnnnnnnnnnnnnnnnnnnnnnnnnnnnnnnnnnnnnnnnnnnnnnnnnnnnnnnnnnnnnnnnnnnnnnnnnnnnnnnnnnnnnnnnnnnnnnnnnnnnnnnnnnnnnnnnnnnnnnnnnnnnnnnnnnnnnnnnnnnnnnnnnnnnnnnnnnnnnnnnnnnnnnnnnnnnnnnnnnnnnnnnnnnnnnnnnnnnnnnnnnnnnnnnnnnnnnnnnnnnnnnnnnnnnnnnnnnnnnnnnnnnnnnnnnnnnnnnnnnnnnnnnnnnnnnnnnnnnnnnnnnnnnnnnnnnnnnnnnnnnnnnnnnnnnnnnnnnnnnnnnnnnnnnnnnnnnnnnnnnnnnnnnnnnnnnnnnnnnnnnnnnnnnnnnnnnnnnnnnnnnnnnnnnnnnnnnnnnnnnnnnnnnnnnnnnnnnnnnnnnnnnnnnnnnnnnnnnnnnnnnnnnnnnnnnnnnnnnnnnnnnnnnnnnnnnnnnnnnnnnnnnnnnnnnnnnnnnnnnnnnnnnnnnnnnnnnnnnnnnnnnnnnnnnnnnnnnnnnnnnnnnnnnnnnnnnnnnnnnnnnnnnnnnnnnnnnnnnnnnnnnnnnnnnnnnnnnnnnnnnnnnnnnnnnnnnnnnnnnnnnnnnnnnnnnnnnnnnnnnnnnnnnnnnnnnnnnnnnnnnnnnnnnnnnnnnnnnnnnnnnnnnnnnnnnnnnnnnnnnnnnnnnnnnnnnnnnnnnnnnnnnnnnnnnnnnnnnnnnnnnnnnnnnnnnnnnnnnnnnnnnnnnnnnnnnnnnnnnnnnnnnnnnnnnnnnnnnnnnnnnnnnnnnnnnnnnnnnnnnnnnnnnnnnnnnnnnnnnnnnnnnnnnnnnnnnnnnnnnnnnnnnnnnnnnnnnnnnnnnnnnnnnnnnnnnnnnnnnnnnnnnnnnnnnnnnnnnnnnnnnnnnnnnnnnnnnnnnnnnnnnnnnnnnnnnnnnnnnnnnnnnnnnnnnnnnnnnnnnnnnnnnnnnnnnnnnnnnnnnnnnnnnnnnnnnnnnnnnnnnnnnnnnnnnnnnnnnnnnnnnnnnnnnnnnnnnnnnnnnnnnnnnnnnnnnnnnnnnnnnnnnnnnnnnnnnnnnnnnnnnnnnnnnnnnnnnnnnnnnnnnnnnnnnnnnnnnnnnnnnnnnnnnnnnnnnnnnnnnnnnnnnnnnnnnnnnnnnnnnnnnnnnnnnnnnnnnnnnnnnnnnnnnnnnnnnnnnnnnnnnnnnnnnnnnnnnnnnnnnnnnnnnnnnnnnnnnnnnnnnnnnnnnnnnnnnnnnnnnnnnnnnnnnnnnnnnnnnnnnnnnnnnnnnnnnnnnnnnnnnnnnnnnnnnnnnnnnnnnnnnnnnnnnnnnnnnnnnnnnnnnnnnnnnnnnnnnnnnnnnnnnnnnnnnnnnnnnnnnnnnnnnnnnnnnnnnnnnnnnnnnnnnnnnnnnnnnnnnnnnnnnnnnnnnnnnnnnnnnnnnnnnnnnnnnnnnnnnnnnnnnnnnnnnnnnnnnnnnnnnnnnnnnnnnnnnnnnnnnnnnnnnnnnnnnnnnnnnnnnnnnnnnnnnnnnnnnnnnnnnnnnnnnnnnnnnnnnnnnnnnnnnnnnnnnnnnnnnnnnnnnnnnnnnnnnnnnnnnnnnnnnnnnnnnnnnnnnnnnnnnnnnnnnnnnnnnnnnnnnnnnnnnnnnnnnnnnnnnnnnnnnnnnnnnnnnnnnnnnnnnnnnnnnnnnnnnnnnnnnnnnnnnnnnnnnnnnnnnnnnnnnnnnnnnnnnnnnnnnnnnnnnnnnnnnnnnnnnnnnnnnnnnnnnnnnnnnnnnnnnnnnnnnnnnnnnnnnnnnnnnnnnnnnnnnnnnnnnnnnnnnnnnnnnnnnnnnnnnnnnnnnnnnnnnnnnnnnnnnnnnnnnnnnnnnnnnnnnnnnnnnnnnnnnnnnnnnnnnnnnnnnnnnnnnnnnnnnnnnnnnnnnnnnnnnnnnnnnnnnnnnnnnnnnnnnnnnnnnnnnnnnnnnnnnnnnnnnnnnnnnnnnnnnnnnnnnnnnnnnnnnnnnnnnnnnnnnnnnnnnnnnnnnnnnnnnnnnnnnnnnnnnnnnnnnnnnnnnnnnnnnnnnnnnnnnnnnnnnnnnnnnnnnnnnnnnnnnnnnnnnnnnnnnnnnnnnnnnnnnnnnnnnnnnnnnnnnnnnnnnnnnnnnnnnnnnnnnnnnnnnnnnnnnnnnnnnnnnnnnnnnnnnnnnnnnnnnnnnnnnnnnnnnnnnnnnnnnnnnnnnnnnnnnnnnnnnnnnnnnnnnnnnnnnnnnnnnnnnnnnnnnnnnnnnnnnnnnnnnnnnnnnnnnnnnnnnnnnnnnnnnnnnnnnnnnnnnnnnnnnnnnnnnnnnnnnnnnnnnnnnnnnnnnnnnnnnnnnnnnnnnnnnnnnnnnnnnnnnnnnnnnnnnnnnnnnnnnnnnnnnnnnnnnnnnnnnnnnnnnnnnnnnnnnnnnnnnnnnnnnnnnnnnnnnnnnnnnnnnnnnnnnnnnnnnnnnnnnnnnnnnnnnnnnnnnnnnnnnnnnnnnnnnnnnnnnnnnnnnnnnnnnnnnnnnnnnnnnnnnnnnnnnnnnnnnnnnnnnnnnnnnnnnnnnnnnnnnnnnnnnnnnnnnnnnnnnnnnnnnnnnnnnnnnnnnnnnnnnnnnnnnnnnnnnnnnnnnnnnnnnnnnnnnnnnnnnnnnnnnnnnnnnnnnnnnnnnnnnnnnnnnnnnnnnnnnnnnnnnnnnnnnnnnnnnnnnnnnnnnnnnnnnnnnnnnnnnnnnnnnnnnnnnnnnnnnnnnnnnnnnnnnnnnnnnnnnnnnnnnnnnnnnnnnnnnnnnnnnnnnnnnnnnnnnnnnnnnnnnnnnnnnnnnnnnnnnnnnnnnnnnnnnnnnnnnnnnnnnnnnnnnnnnnnnnnnnnnnnnnnnnnnnnnnnnnnnnnnnnnnnnnnnnnnnnnnnnnnnnnnnnnnnnnnnnnnnnnnnnnnnnnnnnnnnnnnnnnnnnnnnnnnnnnnnnnnnnnnnnnnnnnnnnnnnnnnnnnnnnnnnnnnnnnnnnnnnnnnnnnnnnnnnnnnnnnnnnnnnnnnnnnnnnnnnnnnnnnnnnnnnnnnnnnnnnnnnnnnnnnnnnnnnnnnnnnnnnnnnnnnnnnnnnnnnnnnnnnnnnnnnnnnnnnnnnnnnnnnnnnnnnnnnnnnnnnnnnnnnnnnnnnnnnnnnnnnnnnnnnnnnnnnnnnnnnnnnnnnnnnnnnnnnnnnnnnnnnnnnnnnnnnnnnnnnnnnnnnnnnnnnnnnnnnnnnnnnnnnnnnnnnnnnnnnnnnnnnnnnnnnnnnnnnnnnnnnnnnnnnnnnnnnnnnnnnnnnnnnnnnnnnnnnnnnnnnnnnnnnnnnnnnnnnnnnnnnnnnnnnnnnnnnnnnnnnnnnnnnnnnnnnnnnnnnnnnnnnnnnnnnnnnnnnnnnnnnnnnnnnnnnnnnnnnnnnnnnnnnnnnnnnnnnnnnnnnnnnnnnnnnnnnnnnnnnnnnnnnnnnnnnnnnnnnnnnnnnnnnnnnnnnnnnnnnnnnnnnnnnnnnnnnnnnnnnnnnnnnnnnnnnnnnnnnnnnnnnnnnnnnnnnnnnnnnnnnnnnnnnnnnnnnnnnnnnnnnnnnnnnnnnnnnnnnnnnnnnnnnnnnnnnnnnnnnnnnnnnnnnnnnnnnnnnnnnnnnnnnnnnnnnnnnnnnnnnnnnnnnnnnnnnnnnnnnnnnnnnnnnnnnnnnnnnnnnnnnnnnnnnnnnnnnnnnnnnnnnnnnnnnnnnnnnnnnnnnnnnnnnnnnnnnnnnnnnnnnnnnnnnnnnnnnnnnnnnnnnnnnnnnnnnnnnnnnnnnnnnnnnnnnnnnnnnnnnnnnnnnnnnnnnnnnnnnnnnnnnnnnnnnnnnnnnnnnnnnnnnnnnnnnnnnnnnnnnnnnnnnnnnnnnnnnnnnnnnnnnnnnnnnnnnnnnnnnnnnnnnnnnnnnnnnnnnnnnnnnnnnnnnnnnnnnnnnnnnnnnnnnnnnnnnnnnnnnnnnnnnnnnnnnnnnnnnnnnnnnnnnnnnnnnnnnnnnnnnnnnnnnnnnnnnnnnnnnnnnnnnnnnnnnnnnnnnnnnnnnnnnnnnnnnnnnnnnnnnnnnnnnnnnnnnnnnnnnnnnnnnnnnnnnnnnnnnnnnnnnnnnnnnnnnnnnnnnnnnnnnnnnnnnnnnnnnnnnnnnnnnnnnnnnnnnnnnnnnnnnnnnnnnnnnnnnnnnnnnnnnnnnnnnnnnnnnnnnnnnnnnnnnnnnnnnnnnnnnnnnnnnnnnnnnnnnnnnnnnnnnnnnnnnnnnnnnnnnnnnnnnnnnnnnnnnnnnnnnnnnnnnnnnnnnnnnnnnnnnnnnnnnnnnnnnnnnnnnnnnnnnnnnnnnnnnnnnnnnnnnnnnnnnnnnnnnnnnnnnnnnnnnnnnnnnnnnnnnnnnnnnnnnnnnnnnnnnnnnnnnnnnnnnnnnnnnnnnnnnnnnnnnnnnnnnnnnnnnnnnnnnnnnnnnnnnnnnnnnnnnnnnnnnnnnnnnnnnnnnnnnnnnnnnnnnnnnnnnnnnnnnnnnnnnnnnnnnnnnnnnnnnnnnnnnnnnnnnnnnnnnnnnnnnnnnnnnnnnnnnnnnnnnnnnnnnnnnnnnnnnnnnnnnnnnnnnnnnnnnnnnnnnnnnnnnnnnnnnnnnnnnnnnnnnnnnnnnnnnnnnnnnnnnnnnnnnnnnnnnnnnnnnnnnnnnnnnnnnnnnnnnnnnnnnnnnnnnnnnnnnnnnnnnnnnnnnnnnnnnnnnnnnnnnnnnnnnnnnnnnnnnnnnnnnnnnnnnnnnnnnnnnnnnnnnnnnnnnnnnnnnnnnnnnnnnnnnnnnnnnnnnnnnnnnnnnnnnnnnnnnnnnnnnnnnnnnnnnnnnnnnnnnnnnnnnnnnnnnnnnnnnnnnnnnnnnnnnnnnnnnnnnnnnnnnnnnnnnnnnnnnnnnnnnnnnnnnnnnnnnnnnnnnnnnnnnnnnnnnnnnnnnnnnnnnnnnnnnnnnnnnnnnnnnnnnnnnnnnnnnnnnnnnnnnnnnnnnnnnnnnnnnnnnnnnnnnnnnnnnnnnnnnnnnnnnnnnnnnnnnnnnnnnnnnnnnnnnnnnnnnnnnnnnnnnnnnnnnnnnnnnnnnnnnnnnnnnnnnnnnnnnnnnnnnnnnnnnnnnnnnnnnnnnnnnnnnnnnnnnnnnnnnnnnnnnnnnnnnnnnnnnnnnnnnnnnnnnnnnnnnnnnnnnnnnnnnnnnnnnnnnnnnnnnnnnnnnnnnnnnnnnnnnnnnnnnnnnnnnnnnnnnnnnnnnnnnnnnnnnnnnnnnnnnnnnnnnnnnnnnnnnnnnnnnnnnnnnnnnnnnnnnnnnnnnnnnnnnnnnnnnnnnnnnnnnnnnnnnnnnnnnnnnnnnnnnnnnnnnnnnnnnnnnnnnnnnnnnnnnnnnnnnnnnnnnnnnnnnnnnnnnnnnnnnnnnnnnnnnnnnnnnnnnnnnnnnnnnnnnnnnnnnnnnnnnnnnnnnnnnnnnnnnnnnnnnnnnnnnnnnnnnnnnnnnnnnnnnnnnnnnnnnnnnnnnnnnnnnnnnnnnnnnnnnnnnnnnnnnnnnnnnnnnnnnnnnnnnnnnnnnnnnnnnnnnnnnnnnnnnnnnnnnnnnnnnnnnnnnnnnnnnnnnnnnnnnnnnnnnnnnnnnnnnnnnnnnnnnnnnnnnnnnnnnnnnnnnnnnnnnnnnnnnnnnnnnnnnnnnnnnnnnnnnnnnnnnnnnnnnnnnnnnnnnnnnnnnnnnnnnnnnnnnnnnnnnnnnnnnnnnnnnnnnnnnnnnnnnnnnnnnnnnnnnnnnnnnnnnnnnnnnnnnnnnnnnnnnnnnnnnnnnnnnnnnnnnnnnnnnnnnnnnnnnnnnnnnnnnnnnnnnnnnnnnnnnnnnnnnnnnnnnnnnnnnnnnnnnnnnnnnnnnnnnnnnnnnnnnnnnnnnnnnnnnnnnnnnnnnnnnnnnnnnnnnnnnnnnnnnnnnnnnnnnnnnnnnnnnnnnnnnnnnnnnnnnnnnnnnnnnnnnnnnnnnnnnnnnnnnnnnnnnnnnnnnnnnnnnnnnnnnnnnnnnnnnnnnnnnnnnnnnnnnnnnnnnnnnnnnnnnnnnnnnnnnnnnnnnnnnnnnnnnnnnnnnnnnnnnnnnnnnnnnnnnnnnnnnnnnnnnnnnnnnnnnnnnnnnnnnnnnnnnnnnnnnnnnnnnnnnnnnnnnnnnnnnnnnnnnnnnnnnnnnnnnnnnnnnnnnnnnnnnnnnnnnnnnnnnnnnnnnnnnnnnnnnnnnnnnnnnnnnnnnnnnnnnnnnnnnnnnnnnnnnnnnnnnnnnnnnnnnnnnnnnnnnnnnnnnnnnnnnnnnnnnnnnnnnnnnnnnnnnnnnnnnnnnnnnnnnnnnnnnnnnnnnnnnnnnnnnnnnnnnnnnnnnnnnnnnnnnnnnnnnnnnnnnnnnnnnnnnnnnnnnnnnnnnnnnnnnnnnnnnnnnnnnnnnnnnnnnnnnnnnnnnnnnnnnnnnnnnnnnnnnnnnnnnnnnnnnnnnnnnnnnnnnnnnnnnnnnnnnnnnnnnnnnnnnnnnnnnnnnnnnnnnnnnnnnnnnnnnnnnnnnnnnnnnnnnnnnnnnnnnnnnnnnnnnnnnnnnnnnnnnnnnnnnnnnnnnnnnnnnnnnnnnnnnnnnnnnnnnnnnnnnnnnnnnnnnnnnnnnnnnnnnnnnnnnnnnnnnnnnnnnnnnnnnnnnnnnnnnnnnnnnnnnnnnnnnnnnnnnnnnnnnnnnnnnnnnnnnnnnnnnnnnnnnnnnnnnnnnnnnnnnnnnnnnnnnnnnnnnnnnnnnnnnnnnnnnnnnnnnnnnnnnnnnnnnnnnnnnnnnnnnnnnnnnnnnnnnnnnnnnnnnnnnnnnnnnnnnnnnnnnnnnnnnnnnnnnnnnnnnnnnnnnnnnnnnnnnnnnnnnnnnnnnnnnnnnnnnnnnnnnnnnnnnnnnnnnnnnnnnnnnnnnnnnnnnnnnnnnnnnnnnnnnnnnnnnnnnnnnnnnnnnnnnnnnnnnnnnnnnnnnnnnnnnnnnnnnnnnnnnnnnnnnnnnnnnnnnnnnnnnnnnnnnnnnnnnnnnnnnnnnnnnnnnnnnnnnnnnnnnnnnnnnnnnnnnnnnnnnnnnnnnnnnnnnnnnnnnnnnnnnnnnnnnnnnnnnnnnnnnnnnnnnnnnnnnnnnnnnnnnnnnnnnnnnnnnnnnnnnnnnnnnnnnnnnnnnnnnnnnnnnnnnnnnnnnnnnnnnnnnnnnnnnnnnnnnnnnnnnnnnnnnnnnnnnnnnnnnnnnnnnnnnnnnnnnnnnnnnnnnnnnnnnnnnnnnnnnnnnnnnnnnnnnnnnnnnnnnnnnnnnnnnnnnnnnnnnnnnnnnnnnnnnnnnnnnnnnnnnnnnnnnnnnnnnnnnnnnnnnnnnnnnnnnnnnnnnnnnnnnnnnnnnnnnnnnnnnnnnnnnnnnnnnnnnnnnnnnnnnnnnnnnnnnnnnnnnnnnnnnnnnnnnnnnnnnnnnnnnnnnnnnnnnnnnnnnnnnnnnnnnnnnnnnnnnnnnnnnnnnnnnnnnnnnnnnnnnnnnnnnnnnnnnnnnnnnnnnnnnnnnnnnnnnnnnnnnnnnnnnnnnnnnnnnnnnnnnnnnnnnnnnnnnnnnnnnnnnnnnnnnnnnnnnnnnnnnnnnnnnnnnnnnnnnnnnnnnnnnnnnnnnnnnnnnnnnnnnnnnnnnnnnnnnnnnnnnnnnnnnnnnnnnnnnnnnnnnnnnnnnnnnnnnnnnnnnnnnnnnnnnnnnnnnnnnnnnnnnnnnnnnnnnnnnnnnnnnnnnnnnnnnnnnnnnnnnnnnnnnnnnnnnnnnnnnnnnnnnnnnnnnnnnnnnnnnnnnnnnnnnnnnnnnnnnnnnnnnnnnnnnnnnnnnnnnnnnnnnnnnnnnnnnnnnnnnnnnnnnnnnnnnnnnnnnnnnnnnnnnnnnnnnnnnnnnnnnnnnnnnnnnnnnnnnnnnnnnnnnnnnnnnnnnnnnnnnnnnnnnnnnnnnnnnnnnnnnnnnnnnnnnnnnnnnnnnnnnnnnnnnnnnnnnnnnnnnnnnnnnnnnnnnnnnnnnnnnnnnnnnnnnnnnnnnnnnnnnnnnnnnnnnnnnnnnnnnnnnnnnnnnnnnnnnnnnnnnnnnnnnnnnnnnnnnnnnnnnnnnnnnnnnnnnnnnnnnnnnnnnnnnnnnnnnnnnnnnnnnnnnnnnnnnnnnnnnnnnnnnnnnnnnnnnnnnnnnnnnnnnnnnnnnnnnnnnnnnnnnnnnnnnnnnnnnnnnnnnnnnnnnnnnnnnnnnnnnnnnnnnnnnnnnnnnnnnnnnnnnnnnnnnnnnnnnnnnnnnnnnnnnnnnnnnnnnnnnnnnnnnnnnnnnnnnnnnnnnnnnnnnnnnnnnnnnnnnnnnnnnnnnnnnnnnnnnnnnnnnnnnnnnnnnnnnnnnnnnnnnnnnnnnnnnnnnnnnnnnnnnnnnnnnnnnnnnnnnnnnnnnnnnnnnnnnnnnnnnnnnnnnnnnnnnnnnnnnnnnnnnnnnnnnnnnnnnnnnnnnnnnnnnnnnnnnnnnnnnnnnnnnnnnnnnnnnnnnnnnnnnnnnnnnnnnnnnnnnnnnnnnnnnnnnnnnnnnnnnnnnnnnnnnnnnnnnnnnnnnnnnnnnnnnnnnnnnnnnnnnnnnnnnnnnnnnnnnnnnnnnnnnnnnnnnnnnnnnnnnnnnnnnnnnnnnnnnnnnnnnnnnnnnnnnnnnnnnnnnnnnnnnnnnnnnnnnnnnnnnnnnnnnnnnnnnnnnnnnnnnnnnnnnnnnnnnnnnnnnnnnnnnnnnnnnnnnnnnnnnnnnnnnnnnnnnnnnnnnnnnnnnnnnnnnnnnnnnnnnnnnnnnnnnnnnnnnnnnnnnnnnnnnnnnnnnnnnnnnnnnnnnnnnnnnnnnnnnnnnnnnnnnnnnnnnnnnnnnnnnnnnnnnnnnnnnnnnnnnnnnnnnnnnnnnnnnnnnnnnnnnnnnnnnnnnnnnnnnnnnnnnnnnnnnnnnnnnnnnnnnnnnnnnnnnnnnnnnnnnnnnnnnnnnnnnnnnnnnnnnnnnnnnnnnnnnnnnnnnnnnnnnnnnnnnnnnnnnnnnnnnnnnnnnnnnnnnnnnnnnnnnnnnnnnnnnnnnnnnnnnnnnnnnnnnnnnnnnnnnnnnnnnnnnnnnnnnnnnnnnnnnnnnnnnnnnnnnnnnnnnnnnnnnnnnnnnnnnnnnnnnnnnnnnnnnnnnnnnnnnnnnnnnnnnnnnnnnnnnnnnnnnnnnnnnnnnnnnnnnnnnnnnnnnnnnnnnnnnnnnnnnnnnnnnnnnnnnnnnnnnnnnnnnnnnnnnnnnnnnnnnnnnnnnnnnnnnnnnnnnnnnnnnnnnnnnnnnnnnnnnnnnnnnnnnnnnnnnnnnnnnnnnnnnnnnnnnnnnnnnnnnnnnnnnnnnnnnnnnnnnnnnnnnnnnnnnnnnnnnnnnnnnnnnnnnnnnnnnnnnnnnnnnnnnnnnnnnnnnnnnnnnnnnnnnnnnnnnnnnnnnnnnnnnnnnnnnnnnnnnnnnnnnnnnnnnnnnnnnnnnnnnnnnnnnnnnnnnnnnnnnnnnnnnnnnnnnnnnnnnnnnnnnnnnnnnnnnnnnnnnnnnnnnnnnnnnnnnnnnnnnnnnnnnnnnnnnnnnnnnnnnnnnnnnnnnnnnnnnnnnnnnnnnnnnnnnnnnnnnnnnnnnnnnnnnnnnnnnnnnnnnnnnnnnnnnnnnnnnnnnnnnnnnnnnnnnnnnnnnnnnnnnnnnnnnnnnnnnnnnnnnnnnnnnnnnnnnnnnnnnnnnnnnnnnnnnnnnnnnnnnnnnnnnnnnnnnnnnnnnnnnnnnnnnnnnnnnnnnnnnnnnnnnnnnnnnnnnnnnnnnnnnnnnnnnnnnnnnnnnnnnnnnnnnnnnnnnnnnnnnnnnnnnnnnnnnnnnnnnnnnnnnnnnnnnnnnnnnnnnnnnnnnnnnnnnnnnnnnnnnnnnnnnnnnnnnnnnnnnnnnnnnnnnnnnnnnnnnnnnnnnnnnnnnnnnnnnnnnnnnnnnnnnnnnnnnnnnnnnnnnnnnnnnnnnnnnnnnnnnnnnnnnnnnnnnnnnnnnnnnnnnnnnnnnnnnnnnnnnnnnnnnnnnnnnnnnnnnnnnnnnnnnnnnnnnnnnnnnnnnnnnnnnnnnnnnnnnnnnnnnnnnnnnnnnnnnnnnnnnnnnnnnnnnnnnnnnnnnnnnnnnnnnnnnnnnnnnnnnnnnnnnnnnnnnnnnnnnnnnnnnnnnnnnnnnnnnnnnnnnnnnnnnnnnnnnnnnnnnnnnnnnnnnnnnnnnnnnnnnnnnnnnnnnnnnnnnnnnnnnnnnnnnnnnnnnnnnnnnnnnnnnnnnnnnnnnnnnnnnnnnnnnnnnnnnnnnnnnnnnnnnnnnnnnnnnnnnnnnnnnnnnnnnnnnnnnnnnnnnnnnnnnnnnnnnnnnnnnnnnnnnnnnnnnnnnnnnnnnnnnnnnnnnnnnnnnnnnnnnnnnnnnnnnnnnnnnnnnnnnnnnnnnnnnnnnnnnnnnnnnnnnnnnnnnnnnnnnnnnnnnnnnnnnnnnnnnnnnnnnnnnnnnnnnnnnnnnnnnnnnnnnnnnnnnnnnnnnnnnnnnnnnnnnnnnnnnnnnnnnnnnnnnnnnnnnnnnnnnnnnnnnnnnnnnnnnnnnnnnnnnnnnnnnnnnnnnnnnnnnnnnnnnnnnnnnnnnnnnnnnnnnnnnnnnnnnnnnnnnnnnnnnnnnnnnnnnnnnnnnnnnnnnnnnnnnnnnnnnnnnnnnnnnnnnnnnnnnnnnnnnnnnnnnnnnnnnnnnnnnnnnnnnnnnnnnnnnnnnnnnnnnnnnnnnnnnnnnnnnnnnnnnnnnnnnnnnnnnnnnnnnnnnnnnnnnnnnnnnnnnnnnnnnnnnnnnnnnnnnnnnnnnnnnnnnnnnnnnnnnnnnnnnnnnnnnnnnnnnnnnnnnnnnnnnnnnnnnnnnnnnnnnnnnnnnnnnnnnnnnnnnnnnnnnnnnnnnnnnnnnnnnnnnnnnnnnnnnnnnnnnnnnnnnnnnnnnnnnnnnnnnnnnnnnnnnnnnnnnnnnnnnnnnnnnnnnnnnnnnnnnnnnnnnnnnnnnnnnnnnnnnnnnnnnnnnnnnnnnnnnnnnnnnnnnnnnnnnnnnnnnnnnnnnnnnnnnnnnnnnnnnnnnnnnnnnnnnnnnnnnnnnnnnnnnnnnnnnnnnnnnnnnnnnnnnnnnnnnnnnnnnnnnnnnnnnnnnnnnnnnnnnnnnnnnnnnnnnnnnnnnnnnnnnnnnnnnnnnnnnnnnnnnnnnnnnnnnnnnnnnnnnnnnnnnnnnnnnnnnnnnnnnnnnnnnnnnnnnnnnnnnnnnnnnnnnnnnnnnnnnnnnnnnnnnnnnnnnnnnnnnnnnnnnnnnnnnnnnnnnnnnnnnnnnnnnnnnnnnnnnnnnnnnnnnnnnnnnnnnnnnnnnnnnnnnnnnnnnnnnnnnnnnnnnnnnnnnnnnnnnnnnnnnnnnnnnnnnnnnnnnnnnnnnnnnnnnnnnnnnnnnnnnnnnnnnnnnnnnnnnnnnnnnnnnnnnnnnnnnnnnnnnnnnnnnnnnnnnnnnnnnnnnnnnnnnnnnnnnnnnnnnnnnnnnnnnnnnnnnnnnnnnnnnnnnnnnnnnnnnnnnnnnnnnnnnnnnnnnnnnnnnnnnnnnnnnnnnnnnnnnnnnnnnnnnnnnnnnnnnnnnnnnnnnnnnnnnnnnnnnnnnnnnnnnnnnnnnnnnnnnnnnnnnnnnnnnnnnnnnnnnnnnnnnnnnnnnnnnnnnnnnnnnnnnnnnnnnnnnnnnnnnnnnnnnnnnnnnnnnnnnnnnnnnnnnnnnnnnnnnnnnnnnnnnnnnnnnnnnnnnnnnnnnnnnnnnnnnnnnnnnnnnnnnnnnnnnnnnnnnnnnnnnnnnnnnnnnnnnnnnnnnnnnnnnnnnnnnnnnnnnnnnnnnnnnnnnnnnnnnnnnnnnnnnnnnnnnnnnnnnnnnnnnnnnnnnnnnnnnnnnnnnnnnnnnnnnnnnnnnnnnnnnnnnnnnnnnnnnnnnnnnnnnnnnnnnnnnnnnnnnnnnnnnnnnnnnnnnnnnnnnnnnnnnnnnnnnnnnnnnnnnnnnnnnnnnnnnnnnnnnnnnnnnnnnnnnnnnnnnnnnnnnnnnnnnnnnnnnnnnnnnnnnnnnnnnnnnnnnnnnnnnnnnnnnnnnnnnnnnnnnnnnnnnnnnnnnnnnnnnnnnnnnnnnnnnnnnnnnnnnnnnnnnnnnnnnnnnnnnnnnnnnnnnnnnnnnnnnnnnnnnnnnnnnnnnnnnnnnnnnnnnnnnnnnnnnnnnnnnnnnnnnnnnnnnnnnnnnnnnnnnnnnnnnnnnnnnnnnnnnnnnnnnnnnnnnnnnnnnnnnnnnnnnnnnnnnnnnnnnnnnnnnnnnnnnnnnnnnnnnnnnnnnnnnnnnnnnnnnnnnnnnnnnnnnnnnnnnnnnnnnnnnnnnnnnnnnnnnnnnnnnnnnnnnnnnnnnnnnnnnnnnnnnnnnnnnnnnnnnnnnnnnnnnnnnnnnnnnnnnnnnnnnnnnnnnnnnnnnnnnnnnnnnnnnnnnnnnnnnnnnnnnnnnnnnnnnnnnnnnnnnnnnnnnnnnnnnnnnnnnnnnnnnnnnnnnnnnnnnnnnnnnnnnnnnnnnnnnnnnnnnnnnnnnnnnnnnnnnnnnnnnnnnnnnnnnnnnnnnnnnnnnnnnnnnnnnnnnnnnnnnnnnnnnnnnnnnnnnnnnnnnnnnnnnnnnnnnnnnnnnnnnnnnnnnnnnnnnnnnnnnnnnnnnnnnnnnnnnnnnnnnnnnnnnnnnnnnnnnnnnnnnnnnnnnnnnnnnnnnnnnnnnnnnnnnnnnnnnnnnnnnnnnnnnnnnnnnnnnnnnnnnnnnnnnnnnnnnnnnnnnnnnnnnnnnnnnnnnnnnnnnnnnnnnnnnnnnnnnnnnnnnnnnnnnnnnnnnnnnnnnnnnnnnnnnnnnnnnnnnnnnnnnnnnnnnnnnnnnnnnnnnnnnnnnnnnnnnnnnnnnnnnnnnnnnnnnnnnnnnnnnnnnnnnnnnnnnnnnnnnnnnnnnnnnnnnnnnnnnnnnnnnnnnnnnnnnnnnnnnnnnnnnnnnnnnnnnnnnnnnnnnnnnnnnnnnnnnnnnnnnnnnnnnnnnnnnnnnnnnnnnnnnnnnnnnnnnnnnnnnnnnnnnnnnnnnnnnnnnnnnnnnnnnnnnnnnnnnnnnnnnnnnnnnnnnnnnnnnnnnnnnnnnnnnnnnnnnnnnnnnnnnnnnnnnnnnnnnnnnnnnnnnnnnnnnnnnnnnnnnnnnnnnnnnnnnnnnnnnnnnnnnnnnnnnnnnnnnnnnnnnnnnnnnnnnnnnnnnnnnnnnnnnnnnnnnnnnnnnnnnnnnnnnnnnnnnnnnnnnnnnnnnnnnnnnnnnnnnnnnnnnnnnnnnnnnnnnnnnnnnnnnnnnnnnnnnnnnnnnnnnnnnnnnnnnnnnnnnnnnnnnnnnnnnnnnnnnnnnnnnnnnnnnnnnnnnnnnnnnnnnnnnnnnnnnnnnnnnnnnnnnnnnnnnnnnnnnnnnnnnnnnnnnnnnnnnnnnnnnnnnnnnnnnnnnnnnnnnnnnnnnnnnnnnnnnnnnnnnnnnnnnnnnnnnnnnnnnnnnnnnnnnnnnnnnnnnnnnnnnnnnnnnnnnnnnnnnnnnnnnnnnnnnnnnnnnnnnnnnnnnnnnnnnnnnnnnnnnnnnnnnnnnnnnnnnnnnnnnnnnnnnnnnnnnnnnnnnnnnnnnnnnnnnnnnnnnnnnnnnnnnnnnnnnnnnnnnnnnnnnnnnnnnnnnnnnnnnnnnnnnnnnnnnnnnnnnnnnnnnnnnnnnnnnnnnnnnnnnnnnnnnnnnnnnnnnnnnnnnnnnnnnnnnnnnnnnnnnnnnnnnnnnnnnnnnnnnnnnnnnnnnnnnnnnnnnnnnnnnnnnnnnnnnnnnnnnnnnnnnnnnnnnnnnnnnnnnnnnnnnnnnnnnnnnnnnnnnnnnnnnnnnnnnnnnnnnnnnnnnnnnnnnnnnnnnnnnnnnnnnnnnnnnnnnnnnnnnnnnnnnnnnnnnnnnnnnnnnnnnnnnnnnnnnnnnnnnnnnnnnnnnnnnnnnnnnnnnnnnnnnnnnnnnnnnnnnnnnnnnnnnnnnnnnnnnnnnnnnnnnnnnnnnnnnnnnnnnnnnnnnnnnnnnnnnnnnnnnnnnnnnnnnnnnnnnnnnnnnnnnnnnnnnnnnnnnnnnnnnnnnnnnnnnnnnnnnnnnnnnnnnnnnnnnnnnnnnnnnnnnnnnnnnnnnnnnnnnnnnnnnnnnnnnnnnnnnnnnnnnnnnnnnnnnnnnnnnnnnnnnnnnnnnnnnnnnnnnnnnnnnnnnnnnnnnnnnnnnnnnnnnnnnnnnnnnnnnnnnnnnnnnnnnnnnnnnnnnnnnnnnnnnnnnnnnnnnnnnnnnnnnnnnnnnnnnnnnnnnnnnnnnnnnnnnnnnnnnnnnnnnnnnnnnnnnnnnnnnnnnnnnnnnnnnnnnnnnnnnnnnnnnnnnnnnnnnnnnnnnnnnnnnnnnnnnnnnnnnnnnnnnnnnnnnnnnnnnnnnnnnnnnnnnnnnnnnnnnnnnnnnnnnnnnnnnnnnnnnnnnnnnnnnnnnnnnnnnnnnnnnnnnnnnnnnnnnnnnnnnnnnnnnnnnnnnnnnnnnnnnnnnnnnnnnnnnnnnnnnnnnnnnnnnnnnnnnnnnnnnnnnnnnnnnnnnnnnnnnnnnnnnnnnnnnnnnnnnnnnnnnnnnnnnnnnnnnnnnnnnnnnnnnnnnnnnnnnnnnnnnnnnnnnnnnnnnnnnnnnnnnnnnnnnnnnnnnnnnnnnnnnnnnnnnnnnnnnnnnnnnnnnnnnnnnnnnnnnnnnnnnnnnnnnnnnnnnnnnnnnnnnnnnnnnnnnnnnnnnnnnnnnnnnnnnnnnnnnnnnnnnnnnnnnnnnnnnnnnnnnnnnnnnnnnnnnnnnnnnnnnnnnnnnnnnnnnnnnnnnnnnnnnnnnnnnnnnnnnnnnnnnnnnnnnnnnnnnnnnnnnnnnnnnnnnnnnnnnnnnnnnnnnnnnnnnnnnnnnnnnnnnnnnnnnnnnnnnnnnnnnnnnnnnnnnnnnnnnnnnnnnnnnnnnnnnnnnnnnnnnnnnnnnnnnnnnnnnnnnnnnnnnnnnnnnnnnnnnnnnnnnnnnnnnnnnnnnnnnnnnnnnnnnnnnnnnnnnnnnnnnnnnnnnnnnnnnnnnnnnnnnnnnnnnnnnnnnnnnnnnnnnnnnnnnnnnnnnnnnnnnnnnnnnnnnnnnnnnnnnnnnnnnnnnnnnnnnnnnnnnnnnnnnnnnnnnnnnnnnnnnnnnnnnnnnnnnnnnnnnnnnnnnnnnnnnnnnnnnnnnnnnnnnnnnnnnnnnnnnnnnnnnnnnnnnnnnnnnnnnnnnnnnnnnnnnnnnnnnnnnnnnnnnnnnnnnnnnnnnnnnnnnnnnnnnnnnnnnnnnnnnnnnnnnnnnnnnnnnnnnnnnnnnnnnnnnnnnnnnnnnnnnnnnnnnnnnnnnnnnnnnnnnnnnnnnnnnnnnnnnnnnnnnnnnnnnnnnnnnnnnnnnnnnnnnnnnnnnnnnnnnnnnnnnnnnnnnnnnnnnnnnnnnnnnnnnnnnnnnnnnnnnnnnnnnnnnnnnnnnnnnnnnnnnnnnnnnnnnnnnnnnnnnnnnnnnnnnnnnnnnnnnnnnnnnnnnnnnnnnnnnnnnnnnnnnnnnnnnnnnnnnnnnnnnnnnnnnnnnnnnnnnnnnnnnnnnnnnnnnnnnnnnnnnnnnnnnnnnnnnnnnnnnnnnnnnnnnnnnnnnnnnnnnnnnnnnnnnnnnnnnnnnnnnnnnnnnnnnnnnnnnnnnnnnnnnnnnnnnnnnnnnnnnnnnnnnnnnnnnnnnnnnnnnnnnnnnnnnnnnnnnnnnnnnnnnnnnnnnnnnnnnnnnnnnnnnnnnnnnnnnnnnnnnnnnnnnnnnnnnnnnnnnnnnnnnnnnnnnnnnnnnnnnnnnnnnnnnnnnnnnnnnnnnnnnnnnnnnnnnnnnnnnnnnnnnnnnnnnnnnnnnnnnnnnnnnnnnnnnnnnnnnnnnnnnnnnnnnnnnnnnnnnnnnnnnnnnnnnnnnnnnnnnnnnnnnnnnnnnnnnnnnnnnnnnnnnnnnnnnnnnnnnnnnnnnnnnnnnnnnnnnnnnnnnnnnnnnnnnnnnnnnnnnnnnnnnnnnnnnnnnnnnnnnnnnnnnnnnnnnnnnnnnnnnnnnnnnnnnnnnnnnnnnnnnnnnnnnnnnnnnnnnnnnnnnnnnnnnnnnnnnnnnnnnnnnnnnnnnnnnnnnnnnnnnnnnnnnnnnnnnnnnnnnnnnnnnnnnnnnnnnnnnnnnnnnnnnnnnnnnnnnnnnnnnnnnnnnnnnnnnnnnnnnnnnnnnnnnnnnnnnnnnnnnnnnnnnnnnnnnnnnnnnnnnnnnnnnnnnnnnnnnnnnnnnnnnnnnnnnnnnnnnnnnnnnnnnnnnnnnnnnnnnnnnnnnnnnnnnnnnnnnnnnnnnnnnnnnnnnnnnnnnnnnnnnnnnnnnnnnnnnnnnnnnnnnnnnnnnnnnnnnnnnnnnnnnnnnnnnnnnnnnnnnnnnnnnnnnnnnnnnnnnnnnnnnnnnnnnnnnnnnnnnnnnnnnnnnnnnnnnnnnnnnnnnnnnnnnnnnnnnnnnnnnnnnnnnnnnnnnnnnnnnnnnnnnnnnnnnnnnnnnnnnnnnnnnnnnnnnnnnnnnnnnnnnnnnnnnnnnnnnnnnnnnnnnnnnnnnnnnnnnnnnnnnnnnnnnnnnnnnnnnnnnnnnnnnnnnnnnnnnnnnnnnnnnnnnnnnnnnnnnnnnnnnnnnnnnnnnnnnnnnnnnnnnnnnnnnnnnnnnnnnnnnnnnnnnnnnnnnnnnnnnnnnnnnnnnnnnnnnnnnnnnnnnnnnnnnnnnnnnnnnnnnnnnnnnnnnnnnnnnnnnnnnnnnnnnnnnnnnnnnnnnnnnnnnnnnnnnnnnnnnnnnnnnnnnnnnnnnnnnnnnnnnnnnnnnnnnnnnnnnnnnnnnnnnnnnnnnnnnnnnnnnnnnnnnnnnnnnnnnnnnnnnnnnnnnnnnnnnnnnnnnnnnnnnnnnnnnnnnnnnnnnnnnnnnnnnnnnnnnnnnnnnnnnnnnnnnnnnnnnnnnnnnnnnnnnnnnnnnnnnnnnnnnnnnnnnnnnnnnnnnnnnnnnnnnnnnnnnnnnnnnnnnnnnnnnnnnnnnnnnnnnnnnnnnnnnnnnnnnnnnnnnnnnnnnnnnnnnnnnnnnnnnnnnnnnnnnnnnnnnnnnnnnnnnnnnnnnnnnnnnnnnnnnnnnnnnnnnnnnnnnnnnnnnnnnnnnnnnnnnnnnnnnnnnnnnnnnnnnnnnnnnnnnnnnnnnnnnnnnnnnnnnnnnnnnnnnnnnnnnnnnnnnnnnnnnnnnnnnnnnnnnnnnnnnnnnnnnnnnnnnnnnnnnnnnnnnnnnnnnnnnnnnnnnnnnnnnnnnnnnnnnnnnnnnnnnnnnnnnnnnnnnnnnnnnnnnnnnnnnnnnnnnnnnnnnnnnnnnnnnnnnnnnnnnnnnnnnnnnnnnnnnnnnnnnnnnnnnnnnnnnnnnnnnnnnnnnnnnnnnnnnnnnnnnnnnnnnnnnnnnnnnnnnnnnnnnnnnnnnnnnnnnnnnnnnnnnnnnnnnnnnnnnnnnnnnnnnnnnnnnnnnnnnnnnnnnnnnnnnnnnnnnnnnnnnnnnnnnnnnnnnnnnnnnnnnnnnnnnnnnnnnnnnnnnnnnnnnnnnnnnnnnnnnnnnnnnnnnnnnnnnnnnnnnnnnnnnnnnnnnnnnnnnnnnnnnnnnnnnnnnnnnnnnnnnnnnnnnnnnnnnnnnnnnnnnnnnnnnnnnnnnnnnnnnnnnnnnnnnnnnnnnnnnnnnnnnnnnnnnnnnnnnnnnnnnnnnnnnnnnnnnnnnnnnnnnnnnnnnnnnnnnnnnnnnnnnnnnnnnnnnnnnnnnnnnnnnnnnnnnnnnnnnnnnnnnnnnnnnnnnnnnnnnnnnnnnnnnnnnnnnnnnnnnnnnnnnnnnnnnnnnnnnnnnnnnnnnnnnnnnnnnnnnnnnnnnnnnnnnnnnnnnnnnnnnnnnnnnnnnnnnnnnnnnnnnnnnnnnnnnnnnnnnnnnnnnnnnnnnnnnnnnnnnnnnnnnnnnnnnnnnnnnnnnnnnnnnnnnnnnnnnnnnnnnnnnnnnnnnnnnnnnnnnnnnnnnnnnnnnnnnnnnnnnnnnnnnnnnnnnnnnnnnnnnnnnnnnnnnnnnnnnnnnnnnnnnnnnnnnnnnnnnnnnnnnnnnnnnnnnnnnnnnnnnnnnnnnnnnnnnnnnnnnnnnnnnnnnnnnnnnnnnnnnnnnnnnnnnnnnnnnnnnnnnnnnnnnnnnnnnnnnnnnnnnnnnnnnnnnnnnnnnnnnnnnnnnnnnnnnnnnnnnnnnnnnnnnnnnnnnnnnnnnnnnnnnnnnnnnnnnnnnnnnnnnnnnnnnnnnnnnnnnnnnnnnnnnnnnnnnnnnnnnnnnnnnnnnnnnnnnnnnnnnnnnnnnnnnnnnnnnnnnnnnnnnnnnnnnnnnnnnnnnnnnnnnnnnnnnnnnnnnnnnnnnnnnnnnnnnnnnnnnnnnnnnnnnnnnnnnnnnnnnnnnnnnnnnnnnnnnnnnnnnnnnnnnnnnnnnnnnnnnnnnnnnnnnnnnnnnnnnnnnnnnnnnnnnnnnnnnnnnnnnnnnnnnnnnnnnnnnnnnnnnnnnnnnnnnnnnnnnnnnnnnnnnnnnnnnnnnnnnnnnnnnnnnnnnnnnnnnnnnnnnnnnnnnnnnnnnnnnnnnnnnnnnnnnnnnnnnnnnnnnnnnnnnnnnnnnnnnnnnnnnnnnnnnnnnnnnnnnnnnnnnnnnnnnnnnnnnnnnnnnnnnnnnnnnnnnnnnnnnnnnnnnnnnnnnnnnnnnnnnnnnnnnnnnnnnnnnnnnnnnnnnnnnnnnnnnnnnnnnnnnnnnnnnnnnnnnnnnnnnnnnnnnnnnnnnnnnnnnnnnnnnnnnnnnnnnnnnnnnnnnnnnnnnnnnnnnnnnnnnnnnnnnnnnnnnnnnnnnnnnnnnnnnnnnnnnnnnnnnnnnnnnnnnnnnnnnnnnnnnnnnnnnnnnnnnnnnnnnnnnnnnnnnnnnnnnnnnnnnnnnnnnnnnnnnnnnnnnnnnnnnnnnnnnnnnnnnnnnnnnnnnnnnnnnnnnnnnnnnnnnnnnnnnnnnnnnnnnnnnnnnnnnnnnnnnnnnnnnnnnnnnnnnnnnnnnnnnnnnnnnnnnnnnnnnnnnnnnnnnnnnnnnnnnnnnnnnnnnnnnnnnnnnnnnnnnnnnnnnnnnnnnnnnnnnnnnnnnnnnnnnnnnnnnnnnnnnnnnnnnnnnnnnnnnnnnnnnnnnnnnnnnnnnnnnnnnnnnnnnnnnnnnnnnnnnnnnnnnnnnnnnnnnnnnnnnnnnnnnnnnnnnnnnnnnnnnnnnnnnnnnnnnnnnnnnnnnnnnnnnnnnnnnnnnnnnnnnnnnnnnnnnnnnnnnnnnnnnnnnnnnnnnnnnnnnnnnnnnnnnnnnnnnnnnnnnnnnnnnnnnnnnnnnnnnnnnnnnnnnnnnnnnnnnnnnnnnnnnnnnnnnnnnnnnnnnnnnnnnnnnnnnnnnnnnnnnnnnnnnnnnnnnnnnnnnnnnnnnnnnnnnnnnnnnnnnnnnnnnnnnnnnnnnnnnnnnnnnnnnnnnnnnnnnnnnnnnnnnnnnnnnnnnnnnnnnnnnnnnnnnnnnnnnnnnnnnnnnnnnnnnnnnnnnnnnnnnnnnnnnnnnnnnnnnnnnnnnnnnnnnnnnnnnnnnnnnnnnnnnnnnnnnnnnnnnnnnnnnnnnnnnnnnnnnnnnnnnnnnnnnnnnnnnnnnnnnnnnnnnnnnnnnnnnnnnnnnnnnnnnnnnnnnnnnnnnnnnnnnnnnnnnnnnnnnnnnnnnnnnnnnnnnnnnnnnnnnnnnnnnnnnnnnnnnnnnnnnnnnnnnnnnnnnnnnnnnnnnnnnnnnnnnnnnnnnnnnnnnnnnnnnnnnnnnnnnnnnnnnnnnnnnnnnnnnnnnnnnnnnnnnnnnnnnnnnnnnnnnnnnnnnnnnnnnnnnnnnnnnnnnnnnnnnnnnnnnnnnnnnnnnnnnnnnnnnnnnnnnnnnnnnnnnnnnnnnnnnnnnnnnnnnnnnnnnnnnnnnnnnnnnnnnnnnnnnnnnnnnnnnnnnnnnnnnnnnnnnnnnnnnnnnnnnnnnnnnnnnnnnnnnnnnnnnnnnnnnnnnnnnnnnnnnnnnnnnnnnnnnnnnnnnnnnnnnnnnnnnnnnnnnnnnnnnnnnnnnnnnnnnnnnnnnnnnnnnnnnnnnnnnnnnnnnnnnnnnnnnnnnnnnnnnnnnnnnnnnnnnnnnnnnnnnnnnnnnnnnnnnnnnnnnnnnnnnnnnnnnnnnnnnnnnnnnnnnnnnnnnnnnnnnnnnnnnnnnnnnnnnnnnnnnnnnnnnnnnnnnnnnnnnnnnnnnnnnnnnnnnnnnnnnnnnnnnnnnnnnnnnnnnnnnnnnnnnnnnnnnnnnnnnnnnnnnnnnnnnnnnnnnnnnnnnnnnnnnnnnnnnnnnnnnnnnnnnnnnnnnnnnnnnnnnnnnnnnnnnnnnnnnnnnnnnnnnnnnnnnnnnnnnnnnnnnnnnnnnnnnnnnnnnnnnnnnnnnnnnnnnnnnnnnnnnnnnnnnnnnnnnnnnnnnnnnnnnnnnnnnnnnnnnnnnnnnnnnnnnnnnnnnnnnnnnnnnnnnnnnnnnnnnnnnnnnnnnnnnnnnnnnnnnnnnnnnnnnnnnnnnnnnnnnnnnnnnnnnnnnnnnnnnnnnnnnnnnnnnnnnnnnnnnnnnnnnnnnnnnnnnnnnnnnnnnnnnnnnnnnnnnnnnnnnnnnnnnnnnnnnnnnnnnnnnnnnnnnnnnnnnnnnnnnnnnnnnnnnnnnnnnnnnnnnnnnnnnnnnnnnnnnnnnnnnnnnnnnnnnnnnnnnnnnnnnnnnnnnnnnnnnnnnnnnnnnnnnnnnnnnnnnnnnnnnnnnnnnnnnnnnnnnnnnnnnnnnnnnnnnnnnnnnnnnnnnnnnnnnnnnnnnnnnnnnnnnnnnnnnnnnnnnnnnnnnnnnnnnnnnnnnnnnnnnnnnnnnnnnnnnnnnnnnnnnnnnnnnnnnnnnnnnnnnnnnnnnnnnnnnnnnnnnnnnnnnnnnnnnnnnnnnnnnnnnnnnnnnnnnnnnnnnnnnnnnnnnnnnnnnnnnnnnnnnnnnnnnnnnnnnnnnnnnnnnnnnnnnnnnnnnnnnnnnnnnnnnnnnnnnnnnnnnnnnnnnnnnnnnnnnnnnnnnnnnnnnnnnnnnnnnnnnnnnnnnnnnnnnnnnnnnnnnnnnnnnnnnnnnnnnnnnnnnnnnnnnnnnnnnnnnnnnnnnnnnnnnnnnnnnnnnnnnnnnnnnnnnnnnnnnnnnnnnnnnnnnnnnnnnnnnnnnnnnnnnnnnnnnnnnnnnnnnnnnnnnnnnnnnnnnnnnnnnnnnnnnnnnnnnnnnnnnnnnnnnnnnnnnnnnnnnnnnnnnnnnnnnnnnnnnnnnnnnnnnnnnnnnnnnnnnnnnnnnnnnnnnnnnnnnnnnnnnnnnnnnnnnnnnnnnnnnnnnnnnnnnnnnnnnnnnnnnnnnnnnnnnnnnnnnnnnnnnnnnnnnnnnnnnnnnnnnnnnnnnnnnnnnnnnnnnnnnnnnnnnnnnnnnnnnnnnnnnnnnnnnnnnnnnnnnnnnnnnnnnnnnnnnnnnnnnnnnnnnnnnnnnnnnnnnnnnnnnnnnnnnnnnnnnnnnnnnnnnnnnnnnnnnnnnnnnnnnnnnnnnnnnnnnnnnnnnnnnnnnnnnnnnnnnnnnnnnnnnnnnnnnnnnnnnnnnnnnnnnnnnnnnnnnnnnnnnnnnnnnnnnnnnnnnnnnnnnnnnnnnnnnnnnnnnnnnnnnnnnnnnnnnnnnnnnnnnnnnnnnnnnnnnnnnnnnnnnnnnnnnnnnnnnnnnnnnnnnnnnnnnnnnnnnnnnnnnnnnnnnnnnnnnnnnnnnnnnnnnnnnnnnnnnnnnnnnnnnnnnnnnnnnnnnnnnnnnnnnnnnnnnnnnnnnnnnnnnnnnnnnnnnnnnnnnnnnnnnnnnnnnnnnnnnnnnnnnnnnnnnnnnnnnnnnnnnnnnnnnnnnnnnnnnnnnnnnnnnnnnnnnnnnnnnnnnnnnnnnnnnnnnnnnnnnnnnnnnnnnnnnnnnnnnnnnnnnnnnnnnnnnnnnnnnnnnnnnnnnnnnnnnnnnnnnnnnnnnnnnnnnnnnnnnnnnnnnnnnnnnnnnnnnnnnnnnnnnnnnnnnnnnnnnnnnnnnnnnnnnnnnnnnnnnnnnnnnnnnnnnnnnnnnnnnnnnnnnnnnnnnnnnnnnnnnnnnnnnnnnnnnnnnnnnnnnnnnnnnnnnnnnnnnnnnnnnnnnnnnnnnnnnnnnnnnnnnnnnnnnnnnnnnnnnnnnnnnnnnnnnnnnnnnnnnnnnnnnnnnnnnnnnnnnnnnnnnnnnnnnnnnnnnnnnnnnnnnnnnnnnnnnnnnnnnnnnnnnnnnnnnnnnnnnnnnnnnnnnnnnnnnnnnnnnnnnnnnnnnnnnnnnnnnnnnnnnnnnnnnnnnnnnnnnnnnnnnnnnnnnnnnnnnnnnnnnnnnnnnnnnnnnnnnnnnnnnnnnnnnnnnnnnnnnnnnnnnnnnnnnnnnnnnnnnnnnnnnnnnnnnnnnnnnnnnnnnnnnnnnnnnnnnnnnnnnnnnnnnnnnnnnnnnnnnnnnnnnnnnnnnnnnnnnnnnnnnnnnnnnnnnnnnnnnnnnnnnnnnnnnnnnnnnnnnnnnnnnnnnnnnnnnnnnnnnnnnnnnnnnnnnnnnnnnnnnnnnnnnnnnnnnnnnnnnnnnnnnnnnnnnnnnnnnnnnnnnnnnnnnnnnnnnnnnnnnnnnnnnnnnnnnnnnnnnnnnnnnnnnnnnnnnnnnnnnnnnnnnnnnnnnnnnnnnnnnnnnnnnnnnnnnnnnnnnnnnnnnnnnnnnnnnnnnnnnnnnnnnnnnnnnnnnnnnnnnnnnnnnnnnnnnnnnnnnnnnnnnnnnnnnnnnnnnnnnnnnnnnnnnnnnnnnnnnnnnnnnnnnnnnnnnnnnnnnnnnnnnnnnnnnnnnnnnnnnnnnnnnnnnnnnnnnnnnnnnnnnnnnnnnnnnnnnnnnnnnnnnnnnnnnnnnnnnnnnnnnnnnnnnnnnnnnnnnnnnnnnnnnnnnnnnnnnnnnnnnnnnnnnnnnnnnnnnnnnnnnnnnnnnnnnnnnnnnnnnnnnnnnnnnnnnnnnnnnnnnnnnnnnnnnnnnnnnnnnnnnnnnnnnnnnnnnnnnnnnnnnnnnnnnnnnnnnnnnnnnnnnnnnnnnnnnnnnnnnnnnnnnnnnnnnnnnnnnnnnnnnnnnnnnnnnnnnnnnnnnnnnnnnnnnnnnnnnnnnnnnnnnnnnnnnnnnnnnnnnnnnnnnnnnnnnnnnnnnnnnnnnnnnnnnnnnnnnnnnnnnnnnnnnnnnnnnnnnnnnnnnnnnnnnnnnnnnnnnnnnnnnnnnnnnnnnnnnnnnnnnnnnnnnnnnnnnnnnnnnnnnnnnnnnnnnnnnnnnnnnnnnnnnnnnnnnnnnnnnnnnnnnnnnnnnnnnnnnnnnnnnnnnnnnnnnnnnnnnnnnnnnnnnnnnnnnnnnnnnnnnnnnnnnnnnnnnnnnnnnnnnnnnnnnnnnnnnnnnnnnnnnnnnnnnnnnnnnnnnnnnnnnnnnnnnnnnnnnnnnnnnnnnnnnnnnnnnnnnnnnnnnnnnnnnnnnnnnnnnnnnnnnnnnnnnnnnnnnnnnnnnnnnnnnnnnnnnnnnnnnnnnnnnnnnnnnnnnnnnnnnnnnnnnnnnnnnnnnnnnnnnnnnnnnnnnnnnnnnnnnnnnnnnnnnnnnnnnnnnnnnnnnnnnnnnnnnnnnnnnnnnnnnnnnnnnnnnnnnnnnnnnnnnnnnnnnnnnnnnnnnnnnnnnnnnnnnnnnnnnnnnnnnnnnnnnnnnnnnnnnnnnnnnnnnnnnnnnnnnnnnnnnnnnnnnnnnnnnnnnnnnnnnnnnnnnnnnnnnnnnnnnnnnnnnnnnnnnnnnnnnnnnnnnnnnnnnnnnnnnnnnnnnnnnnnnnnnnnnnnnnnnnnnnnnnnnnnnnnnnnnnnnnnnnnnnnnnnnnnnnnnnnnnnnnnnnnnnnnnnnnnnnnnnnnnnnnnnnnnnnnnnnnnnnnnnnnnnnnnnnnnnnnnnnnnnnnnnnnnnnnnnnnnnnnnnnnnnnnnnnnnnnnnnnnnnnnnnnnnnnnnnnnnnnnnnnnnnnnnnnnnnnnnnnnnnnnnnnnnnnnnnnnnnnnnnnnnnnnnnnnnnnnnnnnnnnnnnnnnnnnnnnnnnnnnnnnnnnnnnnnnnnnnnnnnnnnnnnnnnnnnnnnnnnnnnnnnnnnnnnnnnnnnnnnnnnnnnnnnnnnnnnnnnnnnnnnnnnnnnnnnnnnnnnnnnnnnnnnnnnnnnnnnnnnnnnnnnnnnnnnnnnnnnnnnnnnnnnnnnnnnnnnnnnnnnnnnnnnnnnnnnnnnnnnnnnnnnnnnnnnnnnnnnnnnnnnnnnnnnnnnnnnnnnnnnnnnnnnnnnnnnnnnnnnnnnnnnnnnnnnnnnnnnnnnnnnnnnnnnnnnnnnnnnnnnnnnnnnnnnnnnnnnnnnnnnnnnnnnnnnnnnnnnnnnnnnnnnnnnnnnnnnnnnnnnnnnnnnnnnnnnnnnnnnnnnnnnnnnnnnnnnnnnnnnnnnnnnnnnnnnnnnnnnnnnnnnnnnnnnnnnnnnnnnnnnnnnnnnnnnnnnnnnnnnnnnnnnnnnnnnnnnnnnnnnnnnnnnnnnnnnnnnnnnnnnnnnnnnnnnnnnnnnnnnnnnnnnnnnnnnnnnnnnnnnnnnnnnnnnnnnnnnnnnnnnnnnnnnnnnnnnnnnnnnnnnnnnnnnnnnnnnnnnnnnnnnnnnnnnnnnnnnnnnnnnnnnnnnnnnnnnnnnnnnnnnnnnnnnnnnnnnnnnnnnnnnnnnnnnnnnnnnnnnnnnnnnnnnnnnnnnnnnnnnnnnnnnnnnnnnnnnnnnnnnnnnnnnnnnnnnnnnnnnnnnnnnnnnnnnnnnnnnnnnnnnnnnnnnnnnnnnnnnnnnnnnnnnnnnnnnnnnnnnnnnnnnnnnnnnnnnnnnnnnnnnnnnnnnnnnnnnnnnnnnnnnnnnnnnnnnnnnnnnnnnnnnnnnnnnnnnnnnnnnnnnnnnnnnnnnnnnnnnnnnnnnnnnnnnnnnnnnnnnnnnnnnnnnnnnnnnnnnnnnnnnnnnnnnnnnnnnnnnnnnnnnnnnnnnnnnnnnnnnnnnnnnnnnnnnnnnnnnnnnnnnnnnnnnnnnnnnnnnnnnnnnnnnnnnnnnnnnnnnnnnnnnnnnnnnnnnnnnnnnnnnnnnnnnnnnnnnnnnnnnnnnnnnnnnnnnnnnnnnnnnnnnnnnnnnnnnnnnnnnnnnnnnnnnnnnnnnnnnnnnnnnnnnnnnnnnnnnnnnnnnnnnnnnnnnnnnnnnnnnnnnnnnnnnnnnnnnnnnnnnnnnnnnnnnnnnnnnnnnnnnnnnnnnnnnnnnnnnnnnnnnnnnnnnnnnnnnnnnnnnnnnnnnnnnnnnnnnnnnnnnnnnnnnnnnnnnnnnnnnnnnnnnnnnnnnnnnnnnnnnnnnnnnnnnnnnnnnnnnnnnnnnnnnnnnnnnnnnnnnnnnnnnnnnnnnnnnnnnnnnnnnnnnnnnnnnnnnnnnnnnnnnnnnnnnnnnnnnnnnnnnnnnnnnnnnnnnnnnnnnnnnnnnnnnnnnnnnnnnnnnnnnnnnnnnnnnnnnnnnnnnnnnnnnnnnnnnnnnnnnnnnnnnnnnnnnnnnnnnnnnnnnnnnnnnnnnnnnnnnnnnnnnnnnnnnnnnnnnnnnnnnnnnnnnnnnnnnnnnnnnnnnnnnnnnnnnnnnnnnnnnnnnnnnnnnnnnnnnnnnnnnnnnnnnnnnnnnnnnnnnnnnnnnnnnnnnnnnnnnnnnnnnnnnnnnnnnnnnnnnnnnnnnnnnnnnnnnnnnnnnnnnnnnnnnnnnnnnnnnnnnnnnnnnnnnnnnnnnnnnnnnnnnnnnnnnnnnnnnnnnnnnnnnnnnnnnnnnnnnnnnnnnnnnnnnnnnnnnnnnnnnnnnnnnnnnnnnnnnnnnnnnnnnnnnnnnnnnnnnnnnnnnnnnnnnnnnnnnnnnnnnnnnnnnnnnnnnnnnnnnnnnnnnnnnnnnnnnnnnnnnnnnnnnnnnnnnnnnnnnnnnnnnnnnnnnnnnnnnnnnnnnnnnnnnnnnnnnnnnnnnnnnnnnnnnnnnnnnnnnnnnnnnnnnnnnnnnnnnnnnnnnnnnnnnnnnnnnnnnnnnnnnnnnnnnnnnnnnnnnnnnnnnnnnnnnnnnnnnnnnnnnnnnnnnnnnnnnnnnnnnnnnnnnnnnnnnnnnnnnnnnnnnnnnnnnnnnnnnnnnnnnnnnnnnnnnnnnnnnnnnnnnnnnnnnnnnnnnnnnnnnnnnnnnnnnnnnnnnnnnnnnnnnnnnnnnnnnnnnnnnnnnnnnnnnnnnnnnnnnnnnnnnnnnnnnnnnnnnnnnnnnnnnnnnnnnnnnnnnnnnnnnnnnnnnnnnnnnnnnnnnnnnnnnnnnnnnnnnnnnnnnnnnnnnnnnnnnnnnnnnnnnnnnnnnnnnnnnnnnnnnnnnnnnnnnnnnnnnnnnnnnnnnnnnnnnnnnnnnnnnnnnnnnnnnnnnnnnnnnnnnnnnnnnnnnnnnnnnnnnnnnnnnnnnnnnnnnnnnnnnnnnnnnnnnnnnnnnnnnnnnnnnnnnnnnnnnnnnnnnnnnnnnnnnnnnnnnnnnnnnnnnnnnnnnnnnnnnnnnnnnnnnnnnnnnnnnnnnnnnnnnnnnnnnnnnnnnnnnnnnnnnnnnnnnnnnnnnnnnnnnnnnnnnnnnnnnnnnnnnnnnnnnnnnnnnnnnnnnnnnnnnnnnnnnnnnnnnnnnnnnnnnnnnnnnnnnnnnnnnnnnnnnnnnnnnnnnnnnnnnnnnnnnnnnnnnnnnnnnnnnnnnnnnnnnnnnnnnnnnnnnnnnnnnnnnnnnnnnnnnnnnnnnnnnnnnnnnnnnnnnnnnnnnnnnnnnnnnnnnnnnnnnnnnnnnnnnnnnnnnnnnnnnnnnnnnnnnnnnnnnnnnnnnnnnnnnnnnnnnnnnnnnnnnnnnnnnnnnnnnnnnnnnnnnnnnnnnnnnnnnnnnnnnnnnnnnnnnnnnnnnnnnnnnnnnnnnnnnnnnnnnnnnnnnnnnnnnnnnnnnnnnnnnnnnnnnnnnnnnnnnnnnnnnnnnnnnnnnnnnnnnnnnnnnnnnnnnnnnnnnnnnnnnnnnnnnnnnnnnnnnnnnnnnnnnnnnnnnnnnnnnnnnnnnnnnnnnnnnnnnnnnnnnnnnnnnnnnnnnnnnnnnnnnnnnnnnnnnnnnnnnnnnnnnnnnnnnnnnnnnnnnnnnnnnnnnnnnnnnnnnnnnnnnnnnnnnnnnnnnnnnnnnnnnnnnnnnnnnnnnnnnnnnnnnnnnnnnnnnnnnnnnnnnnnnnnnnnnnnnnnnnnnnnnnnnnnnnnnnnnnnnnnnnnnnnnnnnnnnnnnnnnnnnnnnnnnnnnnnnnnnnnnnnnnnnnnnnnnnnnnnnnnnnnnnnnnnnnnnnnnnnnnnnnnnnnnnnnnnnnnnnnnnnnnnnnnnnnnnnnnnnnnnnnnnnnnnnnnnnnnnnnnnnnnnnnnnnnnnnnnnnnnnnnnnnnnnnnnnnnnnnnnnnnnnnnnnnnnnnnnnnnnnnnnnnnnnnnnnnnnnnnnnnnnnnnnnnnnnnnnnnnnnnnnnnnnnnnnnnnnnnnnnnnnnnnnnnnnnnnnnnnnnnnnnnnnnnnnnnnnnnnnnnnnnnnnnnnnnnnnnnnnnnnnnnnnnnnnnnnnnnnnnnnnnnnnnnnnnnnnnnnnnnnnnnnnnnnnnnnnnnnnnnnnnnnnnnnnnnnnnnnnnnnnnnnnnnnnnnnnnnnnnnnnnnnnnnnnnnnnnnnnnnnnnnnnnnnnnnnnnnnnnnnnnnnnnnnnnnnnnnnnnnnnnnnnnnnnnnnnnnnnnnnnnnnnnnnnnnnnnnnnnnnnnnnnnnnnnnnnnnnnnnnnnnnnnnnnnnnnnnnnnnnnnnnnnnnnnnnnnnnnnnnnnnnnnnnnnnnnnnnnnnnnnnnnnnnnnnnnnnnnnnnnnnnnnnnnnnnnnnnnnnnnnnnnnnnnnnnnnnnnnnnnnnnnnnnnnnnnnnnnnnnnnnnnnnnnnnnnnnnnnnnnnnnnnnnnnnnnnnnnnnnnnnnnnnnnnnnnnnnnnnnnnnnnnnnnnnnnnnnnnnnnnnnnnnnnnnnnnnnnnnnnnnnnnnnnnnnnnnnnnnnnnnnnnnnnnnnnnnnnnnnnnnnnnnnnnnnnnnnnnnnnnnnnnnnnnnnnnnnnnnnnnnnnnnnnnnnnnnnnnnnnnnnnnnnnnnnnnnnnnnnnnnnnnnnnnnnnnnnnnnnnnnnnnnnnnnnnnnnnnnnnnnnnnnnnnnnnnnnnnnnnnnnnnnnnnnnnnnnnnnnnnnnnnnnnnnnnnnnnnnnnnnnnnnnnnnnnnnnnnnnnnnnnnnnnnnnnnnnnnnnnnnnnnnnnnnnnnnnnnnnnnnnnnnnnnnnnnnnnnnnnnnnnnnnnnnnnnnnnnnnnnnnnnnnnnnnnnnnnnnnnnnnnnnnnnnnnnnnnnnnnnnnnnnnnnnnnnnnnnnnnnnnnnnnnnnnnnnnnnnnnnnnnnnnnnnnnnnnnnnnnnnnnnnnnnnnnnnnnnnnnnnnnnnnnnnnnnnnnnnnnnnnnnnnnnnnnnnnnnnnnnnnnnnnnnnnnnnnnnnnnnnnnnnnnnnnnnnnnnnnnnnnnnnnnnnnnnnnnnnnnnnnnnnnnnnnnnnnnnnnnnnnnnnnnnnnnnnnnnnnnnnnnnnnnnnnnnnnnnnnnnnnnnnnnnnnnnnnnnnnnnnnnnnnnnnnnnnnnnnnnnnnnnnnnnnnnnnnnnnnnnnnnnnnnnnnnnnnnnnnnnnnnnnnnnnnnnnnnnnnnnnnnnnnnnnnnnnnnnnnnnnnnnnnnnnnnnnnnnnnnnnnnnnnnnnnnnnnnnnnnnnnnnnnnnnnnnnnnnnnnnnnnnnnnnnnnnnnnnnnnnnnnnnnnnnnnnnnnnnnnnnnnnnnnnnnnnnnnnnnnnnnnnnnnnnnnnnnnnnnnnnnnnnnnnnnnnnnnnnnnnnnnnnnnnnnnnnnnnnnnnnnnnnnnnnnnnnnnnnnnnnnnnnnnnnnnnnnnnnnnnnnnnnnnnnnnnnnnnnnnnnnnnnnnnnnnnnnnnnnnnnnnnnnnnnnnnnnnnnnnnnnnnnnnnnnnnnnnnnnnnnnnnnnnnnnnnnnnnnnnnnnnnnnnnnnnnnnnnnnnnnnnnnnnnnnnnnnnnnnnnnnnnnnnnnnnnnnnnnnnnnnnnnnnnnnnnnnnnnnnnnnnnnnnnnnnnnnnnnnnnnnnnnnnnnnnnnnnnnnnnnnnnnnnnnnnnnnnnnnnnnnnnnnnnnnnnnnnnnnnnnnnnnnnnnnnnnnnnnnnnnnnnnnnnnnnnnnnnnnnnnnnnnnnnnnnnnnnnnnnnnnnnnnnnnnnnnnnnnnnnnnnnnnnnnnnnnnnnnnnnnnnnnnnnnnnnnnnnnnnnnnnnnnnnnnnnnnnnnnnnnnnnnnnnnnnnnnnnnnnnnnnnnnnnnnnnnnnnnnnnnnnnnnnnnnnnnnnnnnnnnnnnnnnnnnnnnnnnnnnnnnnnnnnnnnnnnnnnnnnnnnnnnnnnnnnnnnnnnnnnnnnnnnnnnnnnnnnnnnnnnnnnnnnnnnnnnnnnnnnnnnnnnnnnnnnnnnnnnnnnnnnnnnnnnnnnnnnnnnnnnnnnnnnnnnnnnnnnnnnnnnnnnnnnnnnnnnnnnnnnnnnnnnnnnnnnnnnnnnnnnnnnnnnnnnnnnnnnnnnnnnnnnnnnnnnnnnnnnnnnnnnnnnnnnnnnnnnnnnnnnnnnnnnnnnnnnnnnnnnnnnnnnnnnnnnnnnnnnnnnnnnnnnnnnnnnnnnnnnnnnnnnnnnnnnnnnnnnnnnnnnnnnnnnnnnnnnnnnnnnnnnnnnnnnnnnnnnnnnnnnnnnnnnnnnnnnnnnnnnnnnnnnnnnnnnnnnnnnnnnnnnnnnnnnnnnnnnnnnnnnnnnnnnnnnnnnnnnnnnnnnnnnnnnnnnnnnnnnnnnnnnnnnnnnnnnnnnnnnnnnnnnnnnnnnnnnnnnnnnnnnnnnnnnnnnnnnnnnnnnnnnnnnnnnnnnnnnnnnnnnnnnnnnnnnnnnnnnnnnnnnnnnnnnnnnnnnnnnnnnnnnnnnnnnnnnnnnnnnnnnnnnnnnnnnnnnnnnnnnnnnnnnnnnnnnnnnnnnnnnnnnnnnnnnnnnnnnnnnnnnnnnnnnnnnnnnnnnnnnnnnnnnnnnnnnnnnnnnnnnnnnnnnnnnnnnnnnnnnnnnnnnnnnnnnnnnnnnnnnnnnnnnnnnnnnnnnnnnnnnnnnnnnnnnnnnnnnnnnnnnnnnnnnnnnnnnnnnnnnnnnnnnnnnnnnnnnnnnnnnnnnnnnnnnnnnnnnnnnnnnnnnnnnnnnnnnnnnnnnnnnnnnnnnnnnnnnnnnnnnnnnnnnnnnnnnnnnnnnnnnnnnnnnnnnnnnnnnnnnnnnnnnnnnnnnnnnnnnnnnnnnnnnnnnnnnnnnnnnnnnnnnnnnnnnnnnnnnnnnnnnnnnnnnnnnnnnnnnnnnnnnnnnnnnnnnnnnnnnnnnnnnnnnnnnnnnnnnnnnnnnnnnnnnnnnnnnnnnnnnnnnnnnnnnnnnnnnnnnnnnnnnnnnnnnnnnnnnnnnnnnnnnnnnnnnnnnnnnnnnnnnnnnnnnnnnnnnnnnnnnnnnnnnnnnnnnnnnnnnnnnnnnnnnnnnnnnnnnnnnnnnnnnnnnnnnnnnnnnnnnnnnnnnnnnnnnnnnnnnnnnnnnnnnnnnnnnnnnnnnnnnnnnnnnnnnnnnnnnnnnnnnnnnnnnnnnnnnnnnnnnnnnnnnnnnnnnnnnnnnnnnnnnnnnnnnnnnnnnnnnnnnnnnnnnnnnnnnnnnnnnnnnnnnnnnnnnnnnnnnnnnnnnnnnnnnnnnnnnnnnnnnnnnnnnnnnnnnnnnnnnnnnnnnnnnnnnnnnnnnnnnnnnnnnnnnnnnnnnnnnnnnnnnnnnnnnnnnnnnnnnnnnnnnnnnnnnnnnnnnnnnnnnnnnnnnnnnnnnnnnnnnnnnnnnnnnnnnnnnnnnnnnnnnnnnnnnnnnnnnnnnnnnnnnnnnnnnnnnnnnnnnnnnnnnnnnnnnnnnnnnnnnnnnnnnnnnnnnnnnnnnnnnnnnnnnnnnnnnnnnnnnnnnnnnnnnnnnnnnnnnnnnnnnnnnnnnnnnnnnnnnnnnnnnnnnnnnnnnnnnnnnnnnnnnnnnnnnnnnnnnnnnnnnnnnnnnnnnnnnnnnnnnnnnnnnnnnnnnnnnnnnnnnnnnnnnnnnnnnnnnnnnnnnnnnnnnnnnnnnnnnnnnnnnnnnnnnnnnnnnnnnnnnnnnnnnnnnnnnnnnnnnnnnnnnnnnnnnnnnnnnnnnnnnnnnnnnnnnnnnnnnnnnnnnnnnnnnnnnnnnnnnnnnnnnnnnnnnnnnnnnnnnnnnnnnnnnnnnnnnnnnnnnnnnnnnnnnnnnnnnnnnnnnnnnnnnnnnnnnnnnnnnnnnnnnnnnnnnnnnnnnnnnnnnnnnnnnnnnnnnnnnnnnnnnnnnnnnnnnnnnnnnnnnnnnnnnnnnnnnnnnnnnnnnnnnnnnnnnnnnnnnnnnnnnnnnnnnnnnnnnnnnnnnnnnnnnnnnnnnnnnnnnnnnnnnnnnnnnnnnnnnnnnnnnnnnnnnnnnnnnnnnnnnnnnnnnnnnnnnnnnnnnnnnnnnnnnnnnnnnnnnnnnnnnnnnnnnnnnnnnnnnnnnnnnnnnnnnnnnnnnnnnnnnnnnnnnnnnnnnnnnnnnnnnnnnnnnnnnnnnnnnnnnnnnnnnnnnnnnnnnnnnnnnnnnnnnnnnnnnnnnnnnnnnnnnnnnnnnnnnnnnnnnnnnnnnnnnnnnnnnnnnnnnnnnnnnnnnnnnnnnnnnnnnnnnnnnnnnnnnnnnnnnnnnnnnnnnnnnnnnnnnnnnnnnnnnnnnnnnnnnnnnnnnnnnnnnnnnnnnnnnnnnnnnnnnnnnnnnnnnnnnnnnnnnnnnnnnnnnnnnnnnnnnnnnnnnnnnnnnnnnnnnnnnnnnnnnnnnnnnnnnnnnnnnnnnnnnnnnnnnnnnnnnnnnnnnnnnnnnnnnnnnnnnnnnnnnnnnnnnnnnnnnnnnnnnnnnnnnnnnnnnnnnnnnnnnnnnnnnnnnnnnnnnnnnnnnnnnnnnnnnnnnnnnnnnnnnnnnnnnnnnnnnnnnnnnnnnnnnnnnnnnnnnnnnnnnnnnnnnnnnnnnnnnnnnnnnnnnnnnnnnnnnnnnnnnnnnnnnnnnnnnnnnnnnnnnnnnnnnnnnnnnnnnnnnnnnnnnnnnnnnnnnnnnnnnnnnnnnnnnnnnnnnnnnnnnnnnnnnnnnnnnnnnnnnnnnnnnnnnnnnnnnnnnnnnnnnnnnnnnnnnnnnnnnnnnnnnnnnnnnnnnnnnnnnnnnnnnnnnnnnnnnnnnnnnnnnnnnnnnnnnnnnnnnnnnnnnnnnnnnnnnnnnnnnnnnnnnnnnnnnnnnnnnnnnnnnnnnnnnnnnnnnnnnnnnnnnnnnnnnnnnnnnnnnnnnnnnnnnnnnnnnnnnnnnnnnnnnnnnnnnnnnnnnnnnnnnnnnnnnnnnnnnnnnnnnnnnnnnnnnnnnnnnnnnnnnnnnnnnnnnnnnnnnnnnnnnnnnnnnnnnnnnnnnnnnnnnnnnnnnnnnnnnnnnnnnnnnnnnnnnnnnnnnnnnnnnnnnnnnnnnnnnnnnnnnnnnnnnnnnnnnnnnnnnnnnnnnnnnnnnnnnnnnnnnnnnnnnnnnnnnnnnnnnnnnnnnnnnnnnnnnnnnnnnnnnnnnnnnnnnnnnnnnnnnnnnnnnnnnnnnnnnnnnnnnnnnnnnnnnnnnnnnnnnnnnnnnnnnnnnnnnnnnnnnnnnnnnnnnnnnnnnnnnnnnnnnnnnnnnnnnnnnnnnnnnnnnnnnnnnnnnnnnnnnnnnnnnnnnnnnnnnnnnnnnnnnnnnnnnnnnnnnnnnnnnnnnnnnnnnnnnnnnnnnnnnnnnnnnnnnnnnnnnnnnnnnnnnnnnnnnnnnnnnnnnnnnnnnnnnnnnnnnnnnnnnnnnnnnnnnnnnnnnnnnnnnnnnnnnnnnnnnnnnnnnnnnnnnnnnnnnnnnnnnnnnnnnnnnnnnnnnnnnnnnnnnnnnnnnnnnnnnnnnnnnnnnnnnnnnnnnnnnnnnnnnnnnnnnnnnnnnnnnnnnnnnnnnnnnnnnnnnnnnnnnnnnnnnnnnnnnnnnnnnnnnnnnnnnnnnnnnnnnnnnnnnnnnnnnnnnnnnnnnnnnnnnnnnnnnnnnnnnnnnnnnnnnnnnnnnnnnnnnnnnnnnnnnnnnnnnnnnnnnnnnnnnnnnnnnnnnnnnnnnnnnnnnnnnnnnnnnnnnnnnnnnnnnnnnnnnnnnnnnnnnnnnnnnnnnnnnnnnnnnnnnnnnnnnnnnnnnnnnnnnnnnnnnnnnnnnnnnnnnnnnnnnnnnnnnnnnnnnnnnnnnnnnnnnnnnnnnnnnnnnnnnnnnnnnnnnnnnnnnnnnnnnnnnnnnnnnnnnnnnnnnnnnnnnnnnnnnnnnnnnnnnnnnnnnnnnnnnnnnnnnnnnnnnnnnnnnnnnnnnnnnnnnnnnnnnnnnnnnnnnnnnnnnnnnnnnnnnnnnnnnnnnnnnnnnnnnnnnnnnnnnnnnnnnnnnnnnnnnnnnnnnnnnnnnnnnnnnnnnnnnnnnnnnnnnnnnnnnnnnnnnnnnnnnnnnnnnnnnnnnnnnnnnnnnnnnnnnnnnnnnnnnnnnnnnnnnnnnnnnnnnnnnnnnnnnnnnnnnnnnnnnnnnnnnnnnnnnnnnnnnnnnnnnnnnnnnnnnnnnnnnnnnnnnnnnnnnnnnnnnnnnnnnnnnnnnnnnnnnnnnnnnnnnnnnnnnnnnnnnnnnnnnnnnnnnnnnnnnnnnnnnnnnnnnnnnnnnnnnnnnnnnnnnnnnnnnnnnnnnnnnnnnnnnnnnnnnnnnnnnnnnnnnnnnnnnnnnnnnnnnnnnnnnnnnnnnnnnnnnnnnnnnnnnnnnnnnnnnnnnnnnnnnnnnnnnnnnnnnnnnnnnnnnnnnnnnnnnnnnnnnnnnnnnnnnnnnnnnnnnnnnnnnnnnnnnnnnnnnnnnnnnnnnnnnnnnnnnnnnnnnnnnnnnnnnnnnnnnnnnnnnnnnnnnnnnnnnnnnnnnnnnnnnnnnnnnnnnnnnnnnnnnnnnnnnnnnnnnnnnnnnnnnnnnnnnnnnnnnnnnnnnnnnnnnnnnnnnnnnnnnnnnnnnnnnnnnnnnnnnnnnnnnnnnnnnnnnnnnnnnnnnnnnnnnnnnnnnnnnnnnnnnnnnnnnnnnnnnnnnnnnnnnnnnnnnnnnnnnnnnnnnnnnnnnnnnnnnnnnnnnnnnnnnnnnnnnnnnnnnnnnnnnnnnnnnnnnnnnnnnnnnnnnnnnnnnnnnnnnnnnnnnnnnnnnnnnnnnnnnnnnnnnnnnnnnnnnnnnnnnnnnnnnnnnnnnnnnnnnnnnnnnnnnnnnnnnnnnnnnnnnnnnnnnnnnnnnnnnnnnnnnnnnnnnnnnnnnnnnnnnnnnnnnnnnnnnnnnnnnnnnnnnnnnnnnnnnnnnnnnnnnnnnnnnnnnnnnnnnnnnnnnnnnnnnnnnnnnnnnnnnnnnnnnnnnnnnnnnnnnnnnnnnnnnnnnnnnnnnnnnnnnnnnnnnnnnnnnnnnnnnnnnnnnnnnnnnnnnnnnnnnnnnnnnnnnnnnnnnnnnnnnnnnnnnnnnnnnnnnnnnnnnnnnnnnnnnnnnnnnnnnnnnnnnnnnnnnnnnnnnnnnnnnnnnnnnnnnnnnnnnnnnnnnnnnnnnnnnnnnnnnnnnnnnnnnnnnnnnnnnnnnnnnnnnnnnnnnnnnnnnnnnnnnnnnnnnnnnnnnnnnnnnnnnnnnnnnnnnnnnnnnnnnnnnnnnnnnnnnnnnnnnnnnnnnnnnnnnnnnnnnnnnnnnnnnnnnnnnnnnnnnnnnnnnnnnnnnnnnnnnnnnnnnnnnnnnnnnnnnnnnnnnnnnnnnnnnnnnnnnnnnnnnnnnnnnnnnnnnnnnnnnnnnnnnnnnnnnnnnnnnnnnnnnnnnnnnnnnnnnnnnnnnnnnnnnnnnnnnnnnnnnnnnnnnnnnnnnnnnnnnnnnnnnnnnnnnnnnnnnnnnnnnnnnnnnnnnnnnnnnnnnnnnnnnnnnnnnnnnnnnnnnnnnnnnnnnnnnnnnnnnnnnnnnnnnnnnnnnnnnnnnnnnnnnnnnnnnnnnnnnnnnnnnnnnnnnnnnnnnnnnnnnnnnnnnnnnnnnnnnnnnnnnnnnnnnnnnnnnnnnnnnnnnnnnnnnnnnnnnnnnnnnnnnnnnnnnnnnnnnnnnnnnnnnnnnnnnnnnnnnnnnnnnnnnnnnnnnnnnnnnnnnnnnnnnnnnnnnnnnnnnnnnnnnnnnnnnnnnnnnnnnnnnnnnnnnnnnnnnnnnnnnnnnnnnnnnnnnnnnnnnnnnnnnnnnnnnnnnnnnnnnnnnnnnnnnnnnnnnnnnnnnnnnnnnnnnnnnnnnnnnnnnnnnnnnnnnnnnnnnnnnnnnnnnnnnnnnnnnnnnnnnnnnnnnnnnnnnnnnnnnnnnnnnnnnnnnnnnnnnnnnnnnnnnnnnnnnnnnnnnnnnnnnnnnnnnnnnnnnnnnnnnnnnnnnnnnnnnnnnnnnnnnnnnnnnnnnnnnnnnnnnnnnnnnnnnnnnnnnnnnnnnnnnnnnnnnnnnnnnnnnnnnnnnnnnnnnnnnnnnnnnnnnnnnnnnnnnnnnnnnnnnnnnnnnnnnnnnnnnnnnnnnnnnnnnnnnnnnnnnnnnnnnnnnnnnnnnnnnnnnnnnnnnnnnnnnnnnnnnnnnnnnnnnnnnnnnnnnnnnnnnnnnnnnnnnnnnnnnnnnnnnnnnnnnnnnnnnnnnnnnnnnnnnnnnnnnnnnnnnnnnnnnnnnnnnnnnnnnnnnnnnnnnnnnnnnnnnnnnnnnnnnnnnnnnnnnnnnnnnnnnnnnnnnnnnnnnnnnnnnnnnnnnnnnnnnnnnnnnnnnnnnnnnnnnnnnnnnnnnnnnnnnnnnnnnnnnnnnnnnnnnnnnnnnnnnnnnnnnnnnnnnnnnnnnnnnnnnnnnnnnnnnnnnnnnnnnnnnnnnnnnnnnnnnnnnnnnnnnnnnnnnnnnnnnnnnnnnnnnnnnnnnnnnnnnnnnnnnnnnnnnnnnnnnnnnnnnnnnnnnnnnnnnnnnnnnnnnnnnnnnnnnnnnnnnnnnnnnnnnnnnnnnnnnnnnnnnnnnnnnnnnnnnnnnnnnnnnnnnnnnnnnnnnnnnnnnnnnnnnnnnnnnnnnnnnnnnnnnnnnnnnnnnnnnnnnnnnnnnnnnnnnnnnnnnnnnnnnnnnnnnnnnnnnnnnnnnnnnnnnnnnnnnnnnnnnnnnnnnnnnnnnnnnnnnnnnnnnnnnnnnnnnnnnnnnnnnnnnnnnnnnnnnnnnnnnnnnnnnnnnnnnnnnnnnnnnnnnnnnnnnnnnnnnnnnnnnnnnnnnnnnnnnnnnnnnnnnnnnnnnnnnnnnnnnnnnnnnnnnnnnnnnnnnnnnnnnnnnnnnnnnnnnnnnnnnnnnnnnnnnnnnnnnnnnnnnnnnnnnnnnnnnnnnnnnnnnnnnnnnnnnnnnnnnnnnnnnnnnnnnnnnnnnnnnnnnnnnnnnnnnnnnnnnnnnnnnnnnnnnnnnnnnnnnnnnnnnnnnnnnnnnnnnnnnnnnnnnnnnnnnnnnnnnnnnnnnnnnnnnnnnnnnnnnnnnnnnnnnnnnnnnnnnnnnnnnnnnnnnnnnnnnnnnnnnnnnnnnnnnnnnnnnnnnnnnnnnnnnnnnnnnnnnnnnnnnnnnnnnnnnnnnnnnnnnnnnnnnnnnnnnnnnnnnnnnnnnnnnnnnnnnnnnnnnnnnnnnnnnnnnnnnnnnnnnnnnnnnnnnnnnnnnnnnnnnnnnnnnnnnnnnnnnnnnnnnnnnnnnnnnnnnnnnnnnnnnnnnnnnnnnnnnnnnnnnnnnnnnnnnnnnnnnnnnnnnnnnnnnnnnnnnnnnnnnnnnnnnnnnnnnnnnnnnnnnnnnnnnnnnnnnnnnnnnnnnnnnnnnnnnnnnnnnnnnnnnnnnnnnnnnnnnnnnnnnnnnnnnnnnnnnnnnnnnnnnnnnnnnnnnnnnnnnnnnnnnnnnnnnnnnnnnnnnnnnnnnnnnnnnnnnnnnnnnnnnnnnnnnnnnnnnnnnnnnnnnnnnnnnnnnnnnnnnnnnnnnnnnnnnnnnnnnnnnnnnnnnnnnnnnnnnnnnnnnnnnnnnnnnnnnnnnnnnnnnnnnnnnnnnnnnnnnnnnnnnnnnnnnnnnnnnnnnnnnnnnnnnnnnnnnnnnnnnnnnnnnnnnnnnnnnnnnnnnnnnnnnnnnnnnnnnnnnnnnnnnnnnnnnnnnnnnnnnnnnnnnnnnnnnnnnnnnnnnnnnnnnnnnnnnnnnnnnnnnnnnnnnnnnnnnnnnnnnnnnnnnnnnnnnnnnnnnnnnnnnnnnnnnnnnnnnnnnnnnnnnnnnnnnnnnnnnnnnnnnnnnnnnnnnnnnnnnnnnnnnnnnnnnnnnnnnnnnnnnnnnnnnnnnnnnnnnnnnnnnnnnnnnnnnnnnnnnnnnnnnnnnnnnnnnnnnnnnnnnnnnnnnnnnnnnnnnnnnnnnnnnnnnnnnnnnnnnnnnnnnnnnnnnnnnnnnnnnnnnnnnnnnnnnnnnnnnnnnnnnnnnnnnnnnnnnnnnnnnnnnnnnnnnnnnnnnnnnnnnnnnnnnnnnnnnnnnnnnnnnnnnnnnnnnnnnnnnnnnnnnnnnnnnnnnnnnnnnnnnnnnnnnnnnnnnnnnnnnnnnnnnnnnnnnnnnnnnnnnnnnnnnnnnnnnnnnnnnnnnnnnnnnnnnnnnnnnnnnnnnnnnnnnnnnnnnnnnnnnnnnnnnnnnnnnnnnnnnnnnnnnnnnnnnnnnnnnnnnnnnnnnnnnnnnnnnnnnnnnnnnnnnnnnnnnnnnnnnnnnnnnnnnnnnnnnnnnnnnnnnnnnnnnnnnnnnnnnnnnnnnnnnnnnnnnnnnnnnnnnnnnnnnnnnnnnnnnnnnnnnnnnnnnnnnnnnnnnnnnnnnnnnnnnnnnnnnnnnnnnnnnnnnnnnnnnnnnnnnnnnnnnnnnnnnnnnnnnnnnnnnnnnnnnnnnnnnnnnnnnnnnnnnnnnnnnnnnnnnnnnnnnnnnnnnnnnnnnnnnnnnnnnnnnnnnnnnnnnnnnnnnnnnnnnnnnnnnnnnnnnnnnnnnnnnnnnnnnnnnnnnnnnnnnnnnnnnnnnnnnnnnnnnnnnnnnnnnnnnnnnnnnnnnnnnnnnnnnnnnnnnnnnnnnnnnnnnnnnnnnnnnnnnnnnnnnnnnnnnnnnnnnnnnnnnnnnnnnnnnnnnnnnnnnnnnnnnnnnnnnnnnnnnnnnnnnnnnnnnnnnnnnnnnnnnnnnnnnnnnnnnnnnnnnnnnnnnnnnnnnnnnnnnnnnnnnnnnnnnnnnnnnnnnnnnnnnnnnnnnnnnnnnnnnnnnnnnnnnnnnnnnnnnnnnnnnnnnnnnnnnnnnnnnnnnnnnnnnnnnnnnnnnnnnnnnnnnnnnnnnnnnnnnnnnnnnnnnnnnnnnnnnnnnnnnnnnnnnnnnnnnnnnnnnnnnnnnnnnnnnnnnnnnnnnnnnnnnnnnnnnnnnnnnnnnnnnnnnnnnnnnnnnnnnnnnnnnnnnnnnnnnnnnnnnnnnnnnnnnnnnnnnnnnnnnnnnnnnnnnnnnnnnnnnnnnnnnnnnnnnnnnnnnnnnnnnnnnnnnnnnnnnnnnnnnnnnnnnnnnnnnnnnnnnnnnnnnnnnnnnnnnnnnnnnnnnnnnnnnnnnnnnnnnnnnnnnnnnnnnnnnnnnnnnnnnnnnnnnnnnnnnnnnnnnnnnnnnnnnnnnnnnnnnnnnnnnnnnnnnnnnnnnnnnnnnnnnnnnnnnnnnnnnnnnnnnnnnnnnnnnnnnnnnnnnnnnnnnnnnnnnnnnnnnnnnnnnnnnnnnnnnnnnnnnnnnnnnnnnnnnnnnnnnnnnnnnnnnnnnnnnnnnnnnnnnnnnnnnnnnnnnnnnnnnnnnnnnnnnnnnnnnnnnnnnnnnnnnnnnnnnnnnnnnnnnnnnnnnnnnnnnnnnnnnnnnnnnnnnnnnnnnnnnnnnnnnnnnnnnnnnnnnnnnnnnnnnnnnnnnnnnnnnnnnnnnnnnnnnnnnnnnnnnnnnnnnnnnnnnnnnnnnnnnnnnnnnnnnnnnnnnnnnnnnnnnnnnnnnnnnnnnnnnnnnnnnnnnnnnnnnnnnnnnnnnnnnnnnnnnnnnnnnnnnnnnnnnnnnnnnnnnnnnnnnnnnnnnnnnnnnnnnnnnnnnnnnnnnnnnnnnnnnnnnnnnnnnnnnnnnnnnnnnnnnnnnnnnnnnnnnnnnnnnnnnnnnnnnnnnnnnnnnnnnnnnnnnnnnnnnnnnnnnnnnnnnnnnnnnnnnnnnnnnnnnnnnnnnnnnnnnnnnnnnnnnnnnnnnnnnnnnnnnnnnnnnnnnnnnnnnnnnnnnnnnnnnnnnnnnnnnnnnnnnnnnnnnnnnnnnnnnnnnnnnnnnnnnnnnnnnnnnnnnnnnnnnnnnnnnnnnnnnnnnnnnnnnnnnnnnnnnnnnnnnnnnnnnnnnnnnnnnnnnnnnnnnnnnnnnnnnnnnnnnnnnnnnnnnnnnnnnnnnnnnnnnnnnnnnnnnnnnnnnnnnnnnnnnnnnnnnnnnnnnnnnnnnnnnnnnnnnnnnnnnnnnnnnnnnnnnnnnnnnnnnnnnnnnnnnnnnnnnnnnnnnnnnnnnnnnnnnnnnnnnnnnnnnnnnnnnnnnnnnnnnnnnnnnnnnnnnnnnnnnnnnnnnnnnnnnnnnnnnnnnnnnnnnnnnnnnnnnnnnnnnnnnnnnnnnnnnnnnnnnnnnnnnnnnnnnnnnnnnnnnnnnnnnnnnnnnnnnnnnnnnnnnnnnnnnnnnnnnnnnnnnnnnnnnnnnnnnnnnnnnnnnnnnnnnnnnnnnnnnnnnnnnnnnnnnnnnnnnnnnnnnnnnnnnnnnnnnnnnnnnnnnnnnnnnnnnnnnnnnnnnnnnnnnnnnnnnnnnnnnnnnnnnnnnnnnnnnnnnnnnnnnnnnnnnnnnnnnnnnnnnnnnnnnnnnnnnnnnnnnnnnnnnnnnnnnnnnnnnnnnnnnnnnnnnnnnnnnnnnnnnnnnnnnnnnnnnnnnnnnnnnnnnnnnnnnnnnnnnnnnnnnnnnnnnnnnnnnnnnnnnnnnnnnnnnnnnnnnnnnnnnnnnnnnnnnnnnnnnnnnnnnnnnnnnnnnnnnnnnnnnnnnnnnnnnnnnnnnnnnnnnnnnnnnnnnnnnnnnnnnnnnnnnnnnnnnnnnnnnnnnnnnnnnnnnnnnnnnnnnnnnnnnnnnnnnnnnnnnnnnnnnnnnnnnnnnnnnnnnnnnnnnnnnnnnnnnnnnnnnnnnnnnnnnnnnnnnnnnnnnnnnnnnnnnnnnnnnnnnnnnnnnnnnnnnnnnnnnnnnnnnnnnnnnnnnnnnnnnnnnnnnnnnnnnnnnnnnnnnnnnnnnnnnnnnnnnnnnnnnnnnnnnnnnnnnnnnnnnnnnnnnnnnnnnnnnnnnnnnnnnnnnnnnnnnnnnnnnnnnnnnnnnnnnnnnnnnnnnnnnnnnnnnnnnnnnnnnnnnnnnnnnnnnnnnnnnnnnnnnnnnnnnnnnnnnnnnnnnnnnnnnnnnnnnnnnnnnnnnnnnnnnnnnnnnnnnnnnnnnnnnnnnnnnnnnnnnnnnnnnnnnnnnnnnnnnnnnnnnnnnnnnnnnnnnnnnnnnnnnnnnnnnnnnnnnnnnnnnnnnnnnnnnnnnnnnnnnnnnnnnnnnnnnnnnnnnnnnnnnnnnnnnnnnnnnnnnnnnnnnnnnnnnnnnnnnnnnnnnnnnnnnnnnnnnnnnnnnnnnnnnnnnnnnnnnnnnnnnnnnnnnnnnnnnnnnnnnnnnnnnnnnnnnnnnnnnnnnnnnnnnnnnnnnnnnnnnnnnnnnnnnnnnnnnnnnnnnnnnnnnnnnnnnnnnnnnnnnnnnnnnnnnnnnnnnnnnnnnnnnnnnnnnnnnnnnnnnnnnnnnnnnnnnnnnnnnnnnnnnnnnnnnnnnnnnnnnnnnnnnnnnnnnnnnnnnnnnnnnnnnnnnnnnnnnnnnnnnnnnnnnnnnnnnnnnnnnnnnnnnnnnnnnnnnnnnnnnnnnnnnnnnnnnnnnnnnnnnnnnnnnnnnnnnnnnnnnnnnnnnnnnnnnnnnnnnnnnnnnnnnnnnnnnnnnnnnnnnnnnnnnnnnnnnnnnnnnnnnnnnnnnnnnnnnnnnnnnnnnnnnnnnnnnnnnnnnnnnnnnnnnnnnnnnnnnnnnnnnnnnnnnnnnnnnnnnnnnnnnnnnnnnnnnnnnnnnnnnnnnnnnnnnnnnnnnnnnnnnnnnnnnnnnnnnnnnnnnnnnnnnnnnnnnnnnnnnnnnnnnnnnnnnnnnnnnnnnnnnnnnnnnnnnnnnnnnnnnnnnnnnnnnnnnnnnnnnnnnnnnnnnnnnnnnnnnnnnnnnnnnnnnnnnnnnnnnnnnnnnnnnnnnnnnnnnnnnnnnnnnnnnnnnnnnnnnnnnnnnnnnnnnnnnnnnnnnnnnnnnnnnnnnnnnnnnnnnnnnnnnnnnnnnnnnnnnnnnnnnnnnnnnnnnnnnnnnnnnnnnnnnnnnnnnnnnnnnnnnnnnnnnnnnnnnnnnnnnnnnnnnnnnnnnnnnnnnnnnnnnnnnnnnnnnnnnnnnnnnnnnnnnnnnnnnnnnnnnnnnnnnnnnnnnnnnnnnnnnnnnnnnnnnnnnnnnnnnnnnnnnnnnnnnnnnnnnnnnnnnnnnnnnnnnnnnnnnnnnnnnnnnnnnnnnnnnnnnnnnnnnnnnnnnnnnnnnnnnnnnnnnnnnnnnnnnnnnnnnnnnnnnnnnnnnnnnnnnnnnnnnnnnnnnnnnnnnnnnnnnnnnnnnnnnnnnnnnnnnnnnnnnnnnnnnnnnnnnnnnnnnnnnnnnnnnnnnnnnnnnnnnnnnnnnnnnnnnnnnnnnnnnnnnnnnnnnnnnnnnnnnnnnnnnnnnnnnnnnnnnnnnnnnnnnnnnnnnnnnnnnnnnnnnnnnnnnnnnnnnnnnnnnnnnnnnnnnnnnnnnnnnnnnnnnnnnnnnnnnnnnnnnnnnnnnnnnnnnnnnnnnnnnnnnnnnnnnnnnnnnnnnnnnnnnnnnnnnnnnnnnnnnnnnnnnnnnnnnnnnnnnnnnnnnnnnnnnnnnnnnnnnnnnnnnnnnnnnnnnnnnnnnnnnnnnnnnnnnnnnnnnnnnnnnnnnnnnnnnnnnnnnnnnnnnnnnnnnnnnnnnnnnnnnnnnnnnnnnnnnnnnnnnnnnnnnnnnnnnnnnnnnnnnnnnnnnnnnnnnnnnnnnnnnnnnnnnnnnnnnnnnnnnnnnnnnnnnnnnnnnnnnnnnnnnnnnnnnnnnnnnnnnnnnnnnnnnnnnnnnnnnnnnnnnnnnnnnnnnnnnnnnnnnnnnnnnnnnnnnnnnnnnnnnnnnnnnnnnnnnnnnnnnnnnnnnnnnnnnnnnnnnnnnnnnnnnnnnnnnnnnnnnnnnnnnnnnnnnnnnnnnnnnnnnnnnnnnnnnnnnnnnnnnnnnnnnnnnnnnnnnnnnnnnnnnnnnnnnnnnnnnnnnnnnnnnnnnnnnnnnnnnnnnnnnnnnnnnnnnnnnnnnnnnnnnnnnnnnnnnnnnnnnnnnnnnnnnnnnnnnnnnnnnnnnnnnnnnnnnnnnnnnnnnnnnnnnnnnnnnnnnnnnnnnnnnnnnnnnnnnnnnnnnnnnnnnnnnnnnnnnnnnnnnnnnnnnnnnnnnnnnnnnnnnnnnnnnnnnnnnnnnnnnnnnnnnnnnnnnnnnnnnnnnnnnnnnnnnnnnnnnnnnnnnnnnnnnnnnnnnnnnnnnnnnnnnnnnnnnnnnnnnnnnnnnnnnnnnnnnnnnnnnnnnnnnnnnnnnnnnnnnnnnnnnnnnnnnnnnnnnnnnnnnnnnnnnnnnnnnnnnnnnnnnnnnnnnnnnnnnnnnnnnnnnnnnnnnnnnnnnnnnnnnnnnnnnnnnnnnnnnnnnnnnnnnnnnnnnnnnnnnnnnnnnnnnnnnnnnnnnnnnnnnnnnnnnnnnnnnnnnnnnnnnnnnnnnnnnnnnnnnnnnnnnnnnnnnnnnnnnnnnnnnnnnnnnnnnnnnnnnnnnnnnnnnnnnnnnnnnnnnnnnnnnnnnnnnnnnnnnnnnnnnnnnnnnnnnnnnnnnnnnnnnnnnnnnnnnnnnnnnnnnnnnnnnnnnnnnnnnnnnnnnnnnnnnnnnnnnnnnnnnnnnnnnnnnnnnnnnnnnnnnnnnnnnnnnnnnnnnnnnnnnnnnnnnnnnnnnnnnnnnnnnnnnnnnnnnnnnnnnnnnnnnnnnnnnnnnnnnnnnnnnnnnnnnnnnnnnnnnnnnnnnnnnnnnnnnnnnnnnnnnnnnnnnnnnnnnnnnnnnnnnnnnnnnnnnnnnnnnnnnnnnnnnnnnnnnnnnnnnnnnnnnnnnnnnnnnnnnnnnnnnnnnnnnnnnnnnnnnnnnnnnnnnnnnnnnnnnnnnnnnnnnnnnnnnnnnnnnnnnnnnnnnnnnnnnnnnnnnnnnnnnnnnnnnnnnnnnnnnnnnnnnnnnnnnnnnnnnnnnnnnnnnnnnnnnnnnnnnnnnnnnnnnnnnnnnnnnnnnnnnnnnnnnnnnnnnnnnnnnnnnnnnnnnnnnnnnnnnnnnnnnnnnnnnnnnnnnnnnnnnnnnnnnnnnnnnnnnnnnnnnnnnnnnnnnnnnnnnnnnnnnnnnnnnnnnnnnnnnnnnnnnnnnnnnnnnnnnnnnnnnnnnnnnnnnnnnnnnnnnnnnnnnnnnnnnnnnnnnnnnnnnnnnnnnnnnnnnnnnnnnnnnnnnnnnnnnnnnnnnnnnnnnnnnnnnnnnnnnnnnnnnnnnnnnnnnnnnnnnnnnnnnnnnnnnnnnnnnnnnnnnnnnnnnnnnnnnnnnnnnnnnnnnnnnnnnnnnnnnnnnnnnnnnnnnnnnnnnnnnnnnnnnnnnnnnnnnnnnnnnnnnnnnnnnnnnnnnnnnnnnnnnnnnnnnnnnnnnnnnnnnnnnnnnnnnnnnnnnnnnnnnnnnnnnnnnnnnnnnnnnnnnnnnnnnnnnnnnnnnnnnnnnnnnnnnnnnnnnnnnnnnnnnnnnnnnnnnnnnnnnnnnnnnnnnnnnnnnnnnnnnnnnnnnnnnnnnnnnnnnnnnnnnnnnnnnnnnnnnnnnnnnnnnnnnnnnnnnnnnnnnnnnnnnnnnnnnnnnnnnnnnnnnnnnnnnnnnnnnnnnnnnnnnnnnnnnnnnnnnnnnnnnnnnnnnnnnnnnnnnnnnnnnnnnnnnnnnnnnnnnnnnnnnnnnnnnnnnnnnnnnnnnnnnnnnnnnnnnnnnnnnnnnnnnnnnnnnnnnnnnnnnnnnnnnnnnnnnnnnnnnnnnnnnnnnnnnnnnnnnnnnnnnnnnnnnnnnnnnnnnnnnnnnnnnnnnnnnnnnnnnnnnnnnnnnnnnnnnnnnnnnnnnnnnnnnnnnnnnnnnnnnnnnnnnnnnnnnnnnnnnnnnnnnnnnnnnnnnnnnnnnnnnnnnnnnnnnnnnnnnnnnnnnnnnnnnnnnnnnnnnnnnnnnnnnnnnnnnnnnnnnnnnnnnnnnnnnnnnnnnnnnnnnnnnnnnnnnnnnnnnnnnnnnnnnnnnnnnnnnnnnnnnnnnnnnnnnnnnnnnnnnnnnnnnnnnnnnnnnnnnnnnnnnnnnnnnnnnnnnnnnnnnnnnnnnnnnnnnnnnnnnnnnnnnnnnnnnnnnnnnnnnnnnnnnnnnnnnnnnnnnnnnnnnnnnnnnnnnnnnnnnnnnnnnnnnnnnnnnnnnnnnnnnnnnnnnnnnnnnnnnnnnnnnnnnnnnnnnnnnnnnnnnnnnnnnnnnnnnnnnnnnnnnnnnnnnnnnnnnnnnnnnnnnnnnnnnnnnnnnnnnnnnnnnnnnnnnnnnnnnnnnnnnnnnnnnnnnnnnnnnnnnnnnnnnnnnnnnnnnnnnnnnnnnnnnnnnnnnnnnnnnnnnnnnnnnnnnnnnnnnnnnnnnnnnnnnnnnnnnnnnnnnnnnnnnnnnnnnnnnnnnnnnnnnnnnnnnnnnnnnnnnnnnnnnnnnnnnnnnnnnnnnnnnnnnnnnnnnnnnnnnnnnnnnnnnnnnnnnnnnnnnnnnnnnnnnnnnnnnnnnnnnnnnnnnnnnnnnnnnnnnnnnnnnnnnnnnnnnnnnnnnnnnnnnnnnnnnnnnnnnnnnnnnnnnnnnnnnnnnnnnnnnnnnnnnnnnnnnnnnnnnnnnnnnnnnnnnnnnnnnnnnnnnnnnnnnnnnnnnnnnnnnnnnnnnnnnnnnnnnnnnnnnnnnnnnnnnnnnnnnnnnnnnnnnnnnnnnnnnnnnnnnnnnnnnnnnnnnnnnnnnnnnnnnnnnnnnnnnnnnnnnnnnnnnnnnnnnnnnnnnnnnnnnnnnnnnnnnnnnnnnnnnnnnnnnnnnnnnnnnnnnnnnnnnnnnnnnnnnnnnnnnnnnnnnnnnnnnnnnnnnnnnnnnnnnnnnnnnnnnnnnnnnnnnnnnnnnnnnnnnnnnnnnnnnnnnnnnnnnnnnnnnnnnnnnnnnnnnnnnnnnnnnnnnnnnnnnnnnnnnnnnnnnnnnnnnnnnnnnnnnnnnnnnnnnnnnnnnnnnnnnnnnnnnnnnnnnnnnnnnnnnnnnnnnnnnnnnnnnnnnnnnnnnnnnnnnnnnnnnnnnnnnnnnnnnnnnnnnnnnnnnnnnnnnnnnnnnnnnnnnnnnnnnnnnnnnnnnnnnnnnnnnnnnnnnnnnnnnnnnnnnnnnnnnnnnnnnnnnnnnnnnnnnnnnnnnnnnnnnnnnnnnnnnnnnnnnnnnnnnnnnnnnnnnnnnnnnnnnnnnnnnnnnnnnnnnnnnnnnnnnnnnnnnnnnnnnnnnnnnnnnnnnnnnnnnnnnnnnnnnnnnnnnnnnnnnnnnnnnnnnnnnnnnnnnnnnnnnnnnnnnnnnnnnnnnnnnnnnnnnnnnnnnnnnnnnnnnnnnnnnnnnnnnnnnnnnnnnnnnnnnnnnnnnnnnnnnnnnnnnnnnnnnnnnnnnnnnnnnnnnnnnnnnnnnnnnnnnnnnnnnnnnnnnnnnnnnnnnnnnnnnnnnnnnnnnnnnnnnnnnnnnnnnnnnnnnnnnnnnnnnnnnnnnnnnnnnnnnnnnnnnnnnnnnnnnnnnnnnnnnnnnnnnnnnnnnnnnnnnnnnnnnnnnnnnnnnnnnnnnnnnnnnnnnnnnnnnnnnnnnnnnnnnnnnnnnnnnnnnnnnnnnnnnnnnnnnnnnnnnnnnnnnnnnnnnnnnnnnnnnnnnnnnnnnnnnnnnnnnnnnnnnnnnnnnnnnnnnnnnnnnnnnnnnnnnnnnnnnnnnnnnnnnnnnnnnnnnnnnnnnnnnnnnnnnnnnnnnnnnnnnnnnnnnnnnnnnnnnnnnnnnnnnnnnnnnnnnnnnnnnnnnnnnnnnnnnnnnnnnnnnnnnnnnnnnnnnnnnnnnnnnnnnnnnnnnnnnnnnnnnnnnnnnnnnnnnnnnnnnnnnnnnnnnnnnnnnnnnnnnnnnnnnnnnnnnnnnnnnnnnnnnnnnnnnnnnnnnnnnnnnnnnnnnnnnnnnnnnnnnnnnnnnnnnnnnnnnnnnnnnnnnnnnnnnnnnnnnnnnnnnnnnnnnnnnnnnnnnnnnnnnnnnnnnnnnnnnnnnnnnnnnnnnnnnnnnnnnnnnnnnnnnnnnnnnnnnnnnnnnnnnnnnnnnnnnnnnnnnnnnnnnnnnnnnnnnnnnnnnnnnnnnnnnnnnnnnnnnnnnnnnnnnnnnnnnnnnnnnnnnnnnnnnnnnnnnnnnnnnnnnnnnnnnnnnnnnnnnnnnnnnnnnnnnnnnnnnnnnnnnnnnnnnnnnnnnnnnnnnnnnnnnnnnnnnnnnnnnnnnnnnnnnnnnnnnnnnnnnnnnnnnnnnnnnnnnnnnnnnnnnnnnnnnnnnnnnnnnnnnnnnnnnnnnnnnnnnnnnnnnnnnnnnnnnnnnnnnnnnnnnnnnnnnnnnnnnnnnnnnnnnnnnnnnnnnnnnnnnnnnnnnnnnnnnnnnnnnnnnnnnnnnnnnnnnnnnnnnnnnnnnnnnnnnnnnnnnnnnnnnnnnnnnnnnnnnnnnnnnnnnnnnnnnnnnnnnnnnnnnnnnnnnnnnnnnnnnnnnnnnnnnnnnnnnnnnnnnnnnnnnnnnnnnnnnnnnnnnnnnnnnnnnnnnnnnnnnnnnnnnnnnnnnnnnnnnnnnnnnnnnnnnnnnnnnnnnnnnnnnnnnnnnnnnnnnnnnnnnnnnnnnnnnnnnnnnnnnnnnnnnnnnnnnnnnnnnnnnnnnnnnnnnnnnnnnnnnnnnnnnnnnnnnnnnnnnnnnnnnnnnnnnnnnnnnnnnnnnnnnnnnnnnnnnnnnnnnnnnnnnnnnnnnnnnnnnnnnnnnnnnnnnnnnnnnnnnnnnnnnnnnnnnnnnnnnnnnnnnnnnnnnnnnnnnnnnnnnnnnnnnnnnnnnnnnnnnnnnnnnnnnnnnnnnnnnnnnnnnnnnnnnnnnnnnnnnnnnnnnnnnnnnnnnnnnnnnnnnnnnnnnnnnnnnnnnnnnnnnnnnnnnnnnnnnnnnnnnnnnnnnnnnnnnnnnnnnnnnnnnnnnnnnnnnnnnnnnnnnnnnnnnnnnnnnnnnnnnnnnnnnnnnnnnnnnnnnnnnnnnnnnnnnnnnnnnnnnnnnnnnnnnnnnnnnnnnnnnnnnnnnnnnnnnnnnnnnnnnnnnnnnnnnnnnnnnnnnnnnnnnnnnnnnnnnnnnnnnnnnnnnnnnnnnnnnnnnnnnnnnnnnnnnnnnnnnnnnnnnnnnnnnnnnnnnnnnnnnnnnnnnnnnnnnnnnnnnnnnnnnnnnnnnnnnnnnnnnnnnnnnnnnnnnnnnnnnnnnnnnnnnnnnnnnnnnnnnnnnnnnnnnnnnnnnnnnnnnnnnnnnnnnnnnnnnnnnnnnnnnnnnnnnnnnnnnnnnnnnnnnnnnnnnnnnnnnnnnnnnnnnnnnnnnnnnnnnnnnnnnnnnnnnnnnnnnnnnnnnnnnnnnnnnnnnnnnnnnnnnnnnnnnnnnnnnnnnnnnnnnnnnnnnnnnnnnnnnnnnnnnnnnnnnnnnnnnnnnnnnnnnnnnnnnnnnnnnnnnnnnnnnnnnnnnnnnnnnnnnnnnnnnnnnnnnnnnnnnnnnnnnnnnnnnnnnnnnnnnnnnnnnnnnnnnnnnnnnnnnnnnnnnnnnnnnnnnnnnnnnnnnnnnnnnnnnnnnnnnnnnnnnnnnnnnnnnnnnnnnnnnnnnnnnnnnnnnnnnnnnnnnnnnnnnnnnnnnnnnnnnnnnnnnnnnnnnnnnnnnnnnnnnnnnnnnnnnnnnnnnnnnnnnnnnnnnnnnnnnnnnnnnnnnnnnnnnnnnnnnnnnnnnnnnnnnnnnnnnnnnnnnnnnnnnnnnnnnnnnnnnnnnnnnnnnnnnnnnnnnnnnnnnnnnnnnnnnnnnnnnnnnnnnnnnnnnnnnnnnnnnnnnnnnnnnnnnnnnnnnnnnnnnnnnnnnnnnnnnnnnnnnnnnnnnnnnnnnnnnnnnnnnnnnnnnnnnnnnnnnnnnnnnnnnnnnnnnnnnnnnnnnnnnnnnnnnnnnnnnnnnnnnnnnnnnnnnnnnnnnnnnnnnnnnnnnnnnnnnnnnnnnnnnnnnnnnnnnnnnnnnnnnnnnnnnnnnnnnnnnnnnnnnnnnnnnnnnnnnnnnnnnnnnnnnnnnnnnnnnnnnnnnnnnnnnnnnnnnnnnnnnnnnnnnnnnnnnnnnnnnnnnnnnnnnnnnnnnnnnnnnnnnnnnnnnnnnnnnnnnnnnnnnnnnnnnnnnnnnnnnnnnnnnnnnnnnnnnnnnnnnnnnnnnnnnnnnnnnnnnnnnnnnnnnnnnnnnnnnnnnnnnnnnnnnnnnnnnnnnnnnnnnnnnnnnnnnnnnnnnnnnnnnnnnnnnnnnnnnnnnnnnnnnnnnnnnnnnnnnnnnnnnnnnnnnnnnnnnnnnnnnnnnnnnnnnnnnnnnnnnnnnnnnnnnnnnnnnnnnnnnnnnnnnnnnnnnnnnnnnnnnnnnnnnnnnnnnnnnnnnnnnnnnnnnnnnnnnnnnnnnnnnnnnnnnnnnnnnnnnnnnnnnnnnnnnnnnnnnnnnnnnnnnnnnnnnnnnnnnnnnnnnnnnnnnnnnnnnnnnnnnnnnnnnnnnnnnnnnnnnnnnnnnnnnnnnnnnnnnnnnnnnnnnnnnnnnnnnnnnnnnnnnnnnnnnnnnnnnnnnnnnnnnnnnnnnnnnnnnnnnnnnnnnnnnnnnnnnnnnnnnnnnnnnnnnnnnnnnnnnnnnnnnnnnnnnnnnnnnnnnnnnnnnnnnnnnnnnnnnnnnnnnnnnnnnnnnnnnnnnnnnnnnnnnnnnnnnnnnnnnnnnnnnnnnnnnnnnnnnnnnnnnnnnnnnnnnnnnnnnnnnnnnnnnnnnnnnnnnnnnnnnnnnnnnnnnnnnnnnnnnnnnnnnnnnnnnnnnnnnnnnnnnnnnnnnnnnnnnnnnnnnnnnnnnnnnnnnnnnnnnnnnnnnnnnnnnnnnnnnnnnnnnnnnnnnnnnnnnnnnnnnnnnnnnnnnnnnnnnnnnnnnnnnnnnnnnnnnnnnnnnnnnnnnnnnnnnnnnnnnnnnnnnnnnnnnnnnnnnnnnnnnnnnnnnnnnnnnnnnnnnnnnnnnnnnnnnnnnnnnnnnnnnnnnnnnnnnnnnnnnnnnnnnnnnnnnnnnnnnnnnnnnnnnnnnnnnnnnnnnnnnnnnnnnnnnnnnnnnnnnnnnnnnnnnnnnnnnnnnnnnnnnnnnnnnnnnnnnnnnnnnnnnnnnnnnnnnnnnnnnnnnnnnnnnnnnnnnnnnnnnnnnnnnnnnnnnnnnnnnnnnnnnnnnnnnnnnnnnnnnnnnnnnnnnnnnnnnnnnnnnnnnnnnnnnnnnnnnnnnnnnnnnnnnnnnnnnnnnnnnnnnnnnnnnnnnnnnnnnnnnnnnnnnnnnnnnnnnnnnnnnnnnnnnnnnnnnnnnnnnnnnnnnnnnnnnnnnnnnnnnnnnnnnnnnnnnnnnnnnnnnnnnnnnnnnnnnnnnnnnnnnnnnnnnnnnnnnnnnnnnnnnnnnnnnnnnnnnnnnnnnnnnnnnnnnnnnnnnnnnnnnnnnnnnnnnnnnnnnnnnnnnnnnnnnnnnnnnnnnnnnnnnnnnnnnnnnnnnnnnnnnnnnnnnnnnnnnnnnnnnnnnnnnnnnnnnnnnnnnnnnnnnnnnnnnnnnnnnnnnnnnnnnnnnnnnnnnnnnnnnnnnnnnnnnnnnnnnnnnnnnnnnnnnnnnnnnnnnnnnnnnnnnnnnnnnnnnnnnnnnnnnnnnnnnnnnnnnnnnnnnnnnnnnnnnnnnnnnnnnnnnnnnnnnnnnnnnnnnnnnnnnnnnnnnnnnnnnnnnnnnnnnnnnnnnnnnnnnnnnnnnnnnnnnnnnnnnnnnnnnnnnnnnnnnnnnnnnnnnnnnnnnnnnnnnnnnnnnnnnnnnnnnnnnnnnnnnnnnnnnnnnnnnnnnnnnnnnnnnnnnnnnnnnnnnnnnnnnnnnnnnnnnnnnnnnnnnnnnnnnnnnnnnnnnnnnnnnnnnnnnnnnnnnnnnnnnnnnnnnnnnnnnnnnnnnnnnnnnnnnnnnnnnnnnnnnnnnnnnnnnnnnnnnnnnnnnnnnnnnnnnnnnnnnnnnnnnnnnnnnnnnnnnnnnnnnnnnnnnnnnnnnnnnnnnnnnnnnnnnnnnnnnnnnnnnnnnnnnnnnnnnnnnnnnnnnnnnnnnnnnnnnnnnnnnnnnnnnnnnnnnnnnnnnnnnnnnnnnnnnnnnnnnnnnnnnnnnnnnnnnnnnnnnnnnnnnnnnnnnnnnnnnnnnnnnnnnnnnnnnnnnnnnnnnnnnnnnnnnnnnnnnnnnnnnnnnnnnnnnnnnnnnnnnnnnnnnnnnnnnnnnnnnnnnnnnnnnnnnnnnnnnnnnnnnnnnnnnnnnnnnnnnnnnnnnnnnnnnnnnnnnnnnnnnnnnnnnnnnnnnnnnnnnnnnnnnnnnnnnnnnnnnnnnnnnnnnnnnnnnnnnnnnnnnnnnnnnnnnnnnnnnnnnnnnnnnnnnnnnnnnnnnnnnnnnnnnnnnnnnnnnnnnnnnnnnnnnnnnnnnnnnnnnnnnnnnnnnnnnnnnnnnnnnnnnnnnnnnnnnnnnnnnnnnnnnnnnnnnnnnnnnnnnnnnnnnnnnnnnnnnnnnnnnnnnnnnnnnnnnnnnnnnnnnnnnnnnnnnnnnnnnnnnnnnnnnnnnnnnnnnnnnnnnnnnnnnnnnnnnnnnnnnnnnnnnnnnnnnnnnnnnnnnnnnnnnnnnnnnnnnnnnnnnnnnnnnnnnnnnnnnnnnnnnnnnnnnnnnnnnnnnnnnnnnnnnnnnnnnnnnnnnnnnnnnnnnnnnnnnnnnnnnnnnnnnnnnnnnnnnnnnnnnnnnnnnnnnnnnnnnnnnnnnnnnnnnnnnnnnnnnnnnnnnnnnnnnnnnnnnnnnnnnnnnnnnnnnnnnnnnnnnnnnnnnnnnnnnnnnnnnnnnnnnnnnnnnnnnnnnnnnnnnnnnnnnnnnnnnnnnnnnnnnnnnnnnnnnnnnnnnnnnnnnnnnnnnnnnnnnnnnnnnnnnnnnnnnnnnnnnnnnnnnnnnnnnnnnnnnnnnnnnnnnnnnnnnnnnnnnnnnnnnnnnnnnnnnnnnnnnnnnnnnnnnnnnnnnnnnnnnnnnnnnnnnnnnnnnnnnnnnnnnnnnnnnnnnnnnnnnnnnnnnnnnnnnnnnnnnnnnnnnnnnnnnnnnnnnnnnnnnnnnnnnnnnnnnnnnnnnnnnnnnnnnnnnnnnnnnnnnnnnnnnnnnnnnnnnnnnnnnnnnnnnnnnnnnnnnnnnnnnnnnnnnnnnnnnnnnnnnnnnnnnnnnnnnnnnnnnnnnnnnnnnnnnnnnnnnnnnnnnnnnnnnnnnnnnnnnnnnnnnnnnnnnnnnnnnnnnnnnnnnnnnnnnnnnnnnnnnnnnnnnnnnnnnnnnnnnnnnnnnnnnnnnnnnnnnnnnnnnnnnnnnnnnnnnnnnnnnnnnnnnnnnnnnnnnnnnnnnnnnnnnnnnnnnnnnnnnnnnnnnnnnnnnnnnnnnnnnnnnnnnnnnnnnnnnnnnnnnnnnnnnnnnnnnnnnnnnnnnnnnnnnnnnnnnnnnnnnnnnnnnnnnnnnnnnnnnnnnnnnnnnnnnnnnnnnnnnnnnnnnnnnnnnnnnnnnnnnnnnnnnnnnnnnnnnnnnnnnnnnnnnnnnnnnnnnnnnnnnnnnnnnnnnnnnnnnnnnnnnnnnnnnnnnnnnnnnnnnnnnnnnnnnnnnnnnnnnnnnnnnnnnnnnnnnnnnnnnnnnnnnnnnnnnnnnnnnnnnnnnnnnnnnnnnnnnnnnnnnnnnnnnnnnnnnnnnnnnnnnnnnnnnnnnnnnnnnnnnnnnnnnnnnnnnnnnnnnnnnnnnnnnnnnnnnnnnnnnnnnnnnnnnnnnnnnnnnnnnnnnnnnnnnnnnnnnnnnnnnnnnnnnnnnnnnnnnnnnnnnnnnnnnnnnnnnnnnnnnnnnnnnnnnnnnnnnnnnnnnnnnnnnnnnnnnnnnnnnnnnnnnnnnnnnnnnnnnnnnnnnnnnnnnnnnnnnnnnnnnnnnnnnnnnnnnnnnnnnnnnnnnnnnnnnnnnnnnnnnnnnnnnnnnnnnnnnnnnnnnnnnnnnnnnnnnnnnnnnnnnnnnnnnnnnnnnnnnnnnnnnnnnnnnnnnnnnnnnnnnnnnnnnnnnnnnnnnnnnnnnnnnnnnnnnnnnnnnnnnnnnnnnnnnnnnnnnnnnnnnnnnnnnnnnnnnnnnnnnnnnnnnnnnnnnnnnnnnnnnnnnnnnnnnnnnnnnnnnnnnnnnnnnnnnnnnnnnnnnnnnnnnnnnnnnnnnnnnnnnnnnnnnnnnnnnnnnnnnnnnnnnnnnnnnnnnnnnnnnnnnnnnnnnnnnnnnnnnnnnnnnnnnnnnnnnnnnnnnnnnnnnnnnnnnnnnnnnnnnnnnnnnnnnnnnnnnnnnnnnnnnnnnnnnnnnnnnnnnnnnnnnnnnnnnnnnnnnnnnnnnnnnnnnnnnnnnnnnnnnnnnnnnnnnnnnnnnnnnnnnnnnnnnnnnnnnnnnnnnnnnnnnnnnnnnnnnnnnnnnnnnnnnnnnnnnnnnnnnnnnnnnnnnnnnnnnnnnnnnnnnnnnnnnnnnnnnnnnnnnnnnnnnnnnnnnnnnnnnnnnnnnnnnnnnnnnnnnnnnnnnnnnnnnnnnnnnnnnnnnnnnnnnnnnnnnnnnnnnnnnnnnnnnnnnnnnnnnnnnnnnnnnnnnnnnnnnnnnnnnnnnnnnnnnnnnnnnnnnnnnnnnnnnnnnnnnnnnnnnnnnnnnnnnnnnnnnnnnnnnnnnnnnnnnnnnnnnnnnnnnnnnnnnnnnnnnnnnnnnnnnnnnnnnnnnnnnnnnnnnnnnnnnnnnnnnnnnnnnnnnnnnnnnnnnnnnnnnnnnnnnnnnnnnnnnnnnnnnnnnnnnnnnnnnnnnnnnnnnnnnnnnnnnnnnnnnnnnnnnnnnnnnnnnnnnnnnnnnnnnnnnnnnnnnnnnnnnnnnnnnnnnnnnnnnnnnnnnnnnnnnnnnnnnnnnnnnnnnnnnnnnnnnnnnnnnnnnnnnnnnnnnnnnnnnnnnnnnnnnnnnnnnnnnnnnnnnnnnnnnnnnnnnnnnnnnnnnnnnnnnnnnnnnnnnnnnnnnnnnnnnnnnnnnnnnnnnnnnnnnnnnnnnnnnnnnnnnnnnnnnnnnnnnnnnnnnnnnnnnnnnnnnnnnnnnnnnnnnnnnnnnnnnnnnnnnnnnnnnnnnnnnnnnnnnnnnnnnnnnnnnnnnnnnnnnnnnnnnnnnnnnnnnnnnnnnnnnnnnnnnnnnnnnnnnnnnnnnnnnnnnnnnnnnnnnnnnnnnnnnnnnnnnnnnnnnnnnnnnnnnnnnnnnnnnnnnnnnnnnnnnnnnnnnnnnnnnnnnnnnnnnnnnnnnnnnnnnnnnnnnnnnnnnnnnnnnnnnnnnnnnnnnnnnnnnnnnnnnnnnnnnnnnnnnnnnnnnnnnnnnnnnnnnnnnnnnnnnnnnnnnnnnnnnnnnnnnnnnnnnnnnnnnnnnnnnnnnnnnnnnnnnnnnnnnnnnnnnnnnnnnnnnnnnnnnnnnnnnnnnnnnnnnnnnnnnnnnnnnnnnnnnnnnnnnnnnnnnnnnnnnnnnnnnnnnnnnnnnnnnnnnnnnnnnnnnnnnnnnnnnnnnnnnnnnnnnnnnnnnnnnnnnnnnnnnnnnnnnnnnnnnnnnnnnnnnnnnnnnnnnnnnnnnnnnnnnnnnnnnnnnnnnnnnnnnnnnnnnnnnnnnnnnnnnnnnnnnnnnnnnnnnnnnnnnnnnnnnnnnnnnnnnnnnnnnnnnnnnnnnnnnnnnnnnnnnnnnnnnnnnnnnnnnnnnnnnnnnnnnnnnnnnnnnnnnnnnnnnnnnnnnnnnnnnnnnnnnnnnnnnnnnnnnnnnnnnnnnnnnnnnnnnnnnnnnnnnnnnnnnnnnnnnnnnnnnnnnnnnnnnnnnnnnnnnnnnnnnnnnnnnnnnnnnnnnnnnnnnnnnnnnnnnnnnnnnnnnnnnnnnnnnnnnnnnnnnnnnnnnnnnnnnnnnnnnnnnnnnnnnnnnnnnnnnnnnnnnnnnnnnnnnnnnnnnnnnnnnnnnnnnnnnnnnnnnnnnnnnnnnnnnnnnnnnnnnnnnnnnnnnnnnnnnnnnnnnnnnnnnnnnnnnnnnnnnnnnnnnnnnnnnnnnnnnnnnnnnnnnnnnnnnnnnnnnnnnnnnnnnnnnnnnnnnnnnnnnnnnnnnnnnnnnnnnnnnnnnnnnnnnnnnnnnnnnnnnnnnnnnnnnnnnnnnnnnnnnnnnnnnnnnnnnnnnnnnnnnnnnnnnnnnnnnnnnnnnnnnnnnnnnnnnnnnnnnnnnnnnnnnnnnnnnnnnnnnnnnnnnnnnnnnnnnnnnnnnnnnnnnnnnnnnnnnnnnnnnnnnnnnnnnnnnnnnnnnnnnnnnnnnnnnnnnnnnnnnnnnnnnnnnnnnnnnnnnnnnnnnnnnnnnnnnnnnnnnnnnnnnnnnnnnnnnnnnnnnnnnnnnnnnnnnnnnnnnnnnnnnnnnnnnnnnnnnnnnnnnnnnnnnnnnnnnnnnnnnnnnnnnnnnnnnnnnnnnnnnnnnnnnnnnnnnnnnnnnnnnnnnnnnnnnnnnnnnnnnnnnnnnnnnnnnnnnnnnnnnnnnnnnnnnnnnnnnnnnnnnnnnnnnnnnnnnnnnnnnnnnnnnnnnnnnnnnnnnnnnnnnnnnnnnnnnnnnnnnnnnnnnnnnnnnnnnnnnnnnnnnnnnnnnnnnnnnnnnnnnnnnnnnnnnnnnnnnnnnnnnnnnnnnnnnnnnnnnnnnnnnnnnnnnnnnnnnnnnnnnnnnnnnnnnnnnnnnnnnnnnnnnnnnnnnnnnnnnnnnnnnnnnnnnnnnnnnnnnnnnnnnnnnnnnnnnnnnnnnnnnnnnnnnnnnnnnnnnnnnnnnnnnnnnnnnnnnnnnnnnnnnnnnnnnnnnnnnnnnnnnnnnnnnnnnnnnnnnnnnnnnnnnnnnnnnnnnnnnnnnnnnnnnnnnnnnnnnnnnnnnnnnnnnnnnnnnnnnnnnnnnnnnnnnnnnnnnnnnnnnnnnnnnnnnnnnnnnnnnnnnnnnnnnnnnnnnnnnnnnnnnnnnnnnnnnnnnnnnnnnnnnnnnnnnnnnnnnnnnnnnnnnnnnnnnnnnnnnnnnnnnnnnnnnnnnnnnnnnnnnnnnnnnnnnnnnnnnnnnnnnnnnnnnnnnnnnnnnnnnnnnnnnnnnnnnnnnnnnnnnnnnnnnnnnnnnnnnnnnnnnnnnnnnnnnnnnnnnnnnnnnnnnnnnnnnnnnnnnnnnnnnnnnnnnnnnnnnnnnnnnnnnnnnnnnnnnnnnnnnnnnnnnnnnnnnnnnnnnnnnnnnnnnnnnnnnnnnnnnnnnnnnnnnnnnnnnnnnnnnnnnnnnnnnnnnnnnnnnnnnnnnnnnnnnnnnnnnnnnnnnnnnnnnnnnnnnnnnnnnnnnnnnnnnnnnnnnnnnnnnnnnnnnnnnnnnnnnnnnnnnnnnnnnnnnnnnnnnnnnnnnnnnnnnnnnnnnnnnnnnnnnnnnnnnnnnnnnnnnnnnnnnnnnnnnnnnnnnnnnnnnnnnnnnnnnnnnnnnnnnnnnnnnnnnnnnnnnnnnnnnnnnnnnnnnnnnnnnnnnnnnnnnnnnnnnnnnnnnnnnnnnnnnnnnnnnnnnnnnnnnnnnnnnnnnnnnnnnnnnnnnnnnnnnnnnnnnnnnnnnnnnnnnnnnnnnnnnnnnnnnnnnnnnnnnnnnnnnnnnnnnnnnnnnnnnnnnnnnnnnnnnnnnnnnnnnnnnnnnnnnnnnnnnnnnnnnnnnnnnnnnnnnnnnnnnnnnnnnnnnnnnnnnnnnnnnnnnnnnnnnnnnnnnnnnnnnnnnnnnnnnnnnnnnnnnnnnnnnnnnnnnnnnnnnnnnnnnnnnnnnnnnnnnnnnnnnnnnnnnnnnnnnnnnnnnnnnnnnnnnnnnnnnnnnnnnnnnnnnnnnnnnnnnnnnnnnnnnnnnnnnnnnnnnnnnnnnnnnnnnnnnnnnnnnnnnnnnnnnnnnnnnnnnnnnnnnnnnnnnnnnnnnnnnnnnnnnnnnnnnnnnnnnnnnnnnnnnnnnnnnnnnnnnnnnnnnnnnnnnnnnnnnnnnnnnnnnnnnnnnnnnnnnnnnnnnnnnnnnnnnnnnnnnnnnnnnnnnnnnnnnnnnnnnnnnnnnnnnnnnnnnnnnnnnnnnnnnnnnnnnnnnnnnnnnnnnnnnnnnnnnnnnnnnnnnnnnnnnnnnnnnnnnnnnnnnnnnnnnnnnnnnnnnnnnnnnnnnnnnnnnnnnnnnnnnnnnnnnnnnnnnnnnnnnnnnnnnnnnnnnnnnnnnnnnnnnnnnnnnnnnnnnnnnnnnnnnnnnnnnnnnnnnnnnnnnnnnnnnnnnnnnnnnnnnnnnnnnnnnnnnnnnnnnnnnnnnnnnnnnnnnnnnnnnnnnnnnnnnnnnnnnnnnnnnnnnnnnnnnnnnnnnnnnnnnnnnnnnnnnnnnnnnnnnnnnnnnnnnnnnnnnnnnnnnnnnnnnnnnnnnnnnnnnnnnnnnnnnnnnnnnnnnnnnnnnnnnnnnnnnnnnnnnnnnnnnnnnnnnnnnnnnnnnnnnnnnnnnnnnnnnnnnnnnnnnnnnnnnnnnnnnnnnnnnnnnnnnnnnnnnnnnnnnnnnnnnnnnnnnnnnnnnnnnnnnnnnnnnnnnnnnnnnnnnnnnnnnnnnnnnnnnnnnnnnnnnnnnnnnnnnnnnnnnnnnnnnnnnnnnnnnnnnnnnnnnnnnnnnnnnnnnnnnnnnnnnnnnnnnnnnnnnnnnnnnnnnnnnnnnnnnnnnnnnnnnnnnnnnnnnnnnnnnnnnnnnnnnnnnnnnnnnnnnnnnnnnnnnnnnnnnnnnnnnnnnnnnnnnnnnnnnnnnnnnnnnnnnnnnnnnnnnnnnnnnnnnnnnnnnnnnnnnnnnnnnnnnnnnnnnnnnnnnnnnnnnnnnnnnnnnnnnnnnnnnnnnnnnnnnnnnnnnnnnnnnnnnnnnnnnnnnnnnnnnnnnnnnnnnnnnnnnnnnnnnnnnnnnnnnnnnnnnnnnnnnnnnnnnnnnnnnnnnnnnnnnnnnnnnnnnnnnnnnnnnnnnnnnnnnnnnnnnnnnnnnnnnnnnnnnnnnnnnnnnnnnnnnnnnnnnnnnnnnnnnnnnnnnnnnnnnnnnnnnnnnnnnnnnnnnnnnnnnnnnnnnnnnnnnnnnnnnnnnnnnnnnnnnnnnnnnnnnnnnnnnnnnnnnnnnnnnnnnnnnnnnnnnnnnnnnnnnnnnnnnnnnnnnnnnnnnnnnnnnnnnnnnnnnnnnnnnnnnnnnnnnnnnnnnnnnnnnnnnnnnnnnnnnnnnnnnnnnnnnnnnnnnnnnnnnnnnnnnnnnnnnnnnnnnnnnnnnnnnnnnnnnnnnnnnnnnnnnnnnnnnnnnnnnnnnnnnnnnnnnnnnnnnnnnnnnnnnnnnnnnnnnnnnnnnnnnnnnnnnnnnnnnnnnnnnnnnnnnnnnnnnnnnnnnnnnnnnnnnnnnnnnnnnnnnnnnnnnnnnnnnnnnnnnnnnnnnnnnnnnnnnnnnnnnnnnnnnnnnnnnnnnnnnnnnnnnnnnnnnnnnnnnnnnnnnnnnnnnnnnnnnnnnnnnnnnnnnnnnnnnnnnnnnnnnnnnnnnnnnnnnnnnnnnnnnnnnnnnnnnnnnnnnnnnnnnnnnnnnnnnnnnnnnnnnnnnnnnnnnnnnnnnnnnnnnnnnnnnnnnnnnnnnnnnnnnnnnnnnnnnnnnnnnnnnnnnnnnnnnnnnnnnnnnnnnnnnnnnnnnnnnnnnnnnnnnnnnnnnnnnnnnnnnnnnnnnnnnnnnnnnnnnnnnnnnnnnnnnnnnnnnnnnnnnnnnnnnnnnnnnnnnnnnnnnnnnnnnnnnnnnnnnnnnnnnnnnnnnnnnnnnnnnnnnnnnnnnnnnnnnnnnnnnnnnnnnnnnnnnnnnnnnnnnnnnnnnnnnnnnnnnnnnnnnnnnnnnnnnnnnnnnnnnnnnnnnnnnnnnnnnnnnnnnnnnnnnnnnnnnnnnnnnnnnnnnnnnnnnnnnnnnnnnnnnnnnnnnnnnnnnnnnnnnnnnnnnnnnnnnnnnnnnnnnnnnnnnnnnnnnnnnnnnnnnnnnnnnnnnnnnnnnnnnnnnnnnnnnnnnnnnnnnnnnnnnnnnnnnnnnnnnnnnnnnnnnnnnnnnnnnnnnnnnnnnnnnnnnnnnnnnnnnnnnnnnnnnnnnnnnnnnnnnnnnnnnnnnnnnnnnnnnnnnnnnnnnnnnnnnnnnnnnnnnnnnnnnnnnnnnnnnnnnnnnnnnnnnnnnnnnnnnnnnnnnnnnnnnnnnnnnnnnnnnnnnnnnnnnnnnnnnnnnnnnnnnnnnnnnnnnnnnnnnnnnnnnnnnnnnnnnnnnnnnnnnnnnnnnnnnnnnnnnnnnnnnnnnnnnnnnnnnnnnnnnnnnnnnnnnnnnnnnnnnnnnnnnnnnnnnnnnnnnnnnnnnnnnnnnnnnnnnnnnnnnnnnnnnnnnnnnnnnnnnnnnnnnnnnnnnnnnnnnnnnnnnnnnnnnnnnnnnnnnnnnnnnnnnnnnnnnnnnnnnnnnnnnnnnnnnnnnnnnnnnnnnnnnnnnnnnnnnnnnnnnnnnnnnnnnnnnnnnnnnnnnnnnnnnnnnnnnnnnnnnnnnnnnnnnnnnnnnnnnnnnnnnnnnnnnnnnnnnnnnnnnnnnnnnnnnnnnnnnnnnnnnnnnnnnnnnnnnnnnnnnnnnnnnnnnnnnnnnnnnnnnnnnnnnnnnnnnnnnnnnnnnnnnnnnnnnnnnnnnnnnnnnnnnnnnnnnnnnnnnnnnnnnnnnnnnnnnnnnnnnnnnnnnnnnnnnnnnnnnnnnnnnnnnnnnnnnnnnnnnnnnnnnnnnnnnnnnnnnnnnnnnnnnnnnnnnnnnnnnnnnnnnnnnnnnnnnnnnnnnnnnnnnnnnnnnnnnnnnnnnnnnnnnnnnnnnnnnnnnnnnnnnnnnnnnnnnnnnnnnnnnnnnnnnnnnnnnnnnnnnnnnnnnnnnnnnnnnnnnnnnnnnnnnnnnnnnnnnnnnnnnnnnnnnnnnnnnnnnnnnnnnnnnnnnnnnnnnnnnnnnnnnnnnnnnnnnnnnnnnnnnnnnnnnnnnnnnnnnnnnnnnnnnnnnnnnnnnnnnnnnnnnnnnnnnnnnnnnnnnnnnnnnnnnnnnnnnnnnnnnnnnnnnnnnnnnnnnnnnnnnnnnnnnnnnnnnnnnnnnnnnnnnnnnnnnnnnnnnnnnnnnnnnnnnnnnnnnnnnnnnnnnnnnnnnnnnnnnnnnnnnnnnnnnnnnnnnnnnnnnnnnnnnnnnnnnnnnnnnnnnnnnnnnnnnnnnnnnnnnnnnnnnnnnnnnnnnnnnnnnnnnnnnnnnnnnnnnnnnnnnnnnnnnnnnnnnnnnnnnnnnnnnnnnnnnnnnnnnnnnnnnnnnnnnnnnnnnnnnnnnnnnnnnnnnnnnnnnnnnnnnnnnnnnnnnnnnnnnnnnnnnnnnnnnnnnnnnnnnnnnnnnnnnnnnnnnnnnnnnnnnnnnnnnnnnnnnnnnnnnnnnnnnnnnnnnnnnnnnnnnnnnnnnnnnnnnnnnnnnnnnnnnnnnnnnnnnnnnnnnnnnnnnnnnnnnnnnnnnnnnnnnnnnnnnnnnnnnnnnnnnnnnnnnnnnnnnnnnnnnnnnnnnnnnnnnnnnnnnnnnnnnnnnnnnnnnnnnnnnnnnnnnnnnnnnnnnnnnnnnnnnnnnnnnnnnnnnnnnnnnnnnnnnnnnnnnnnnnnnnnnnnnnnnnnnnnnnnnnnnnnnnnnnnnnnnnnnnnnnnnnnnnnnnnnnnnnnnnnnnnnnnnnnnnnnnnnnnnnnnnnnnnnnnnnnnnnnnnnnnnnnnnnnnnnnnnnnnnnnnnnnnnnnnnnnnnnnnnnnnnnnnnnnnnnnnnnnnnnnnnnnnnnnnnnnnnnnnnnnnnnnnnnnnnnnnnnnnnnnnnnnnnnnnnnnnnnnnnnnnnnnnnnnnnnnnnnnnnnnnnnnnnnnnnnnnnnnnnnnnnnnnnnnnnnnnnnnnnnnnnnnnnnnnnnnnnnnnnnnnnnnnnnnnnnnnnnnnnnnnnnnnnnnnnnnnnnnnnnnnnnnnnnnnnnnnnnnnnnnnnnnnnnnnnnnnnnnnnnnnnnnnnnnnnnnnnnnnnnnnnnnnnnnnnnnnnnnnnnnnnnnnnnnnnnnnnnnnnnnnnnnnnnnnnnnnnnnnnnnnnnnnnnnnnnnnnnnnnnnnnnnnnnnnnnnnnnnnnnnnnnnnnnnnnnnnnnnnnnnnnnnnnnnnnnnnnnnnnnnnnnnnnnnnnnnnnnnnnnnnnnnnnnnnnnnnnnnnnnnnnnnnnnnnnnnnnnnnnnnnnnnnnnnnnnnnnnnnnnnnnnnnnnnnnnnnnnnnnnnnnnnnnnnnnnnnnnnnnnnnnnnnnnnnnnnnnnnnnnnnnnnnnnnnnnnnnnnnnnnnnnnnnnnnnnnnnnnnnnnnnnnnnnnnnnnnnnnnnnnnnnnnnnnnnnnnnnnnnnnnnnnnnnnnnnnnnnnnnnnnnnnnnnnnnnnnnnnnnnnnnnnnnnnnnnnnnnnnnnnnnnnnnnnnnnnnnnnnnnnnnnnnnnnnnnnnnnnnnnnnnnnnnnnnnnnnnnnnnnnnnnnnnnnnnnnnnnnnnnnnnnnnnnnnnnnnnnnnnnnnnnnnnnnnnnnnnnnnnnnnnnnnnnnnnnnnnnnnnnnnnnnnnnnnnnnnnnnnnnnnnnnnnnnnnnnnnnnnnnnnnnnnnnnnnnnnnnnnnnnnnnnnnnnnnnnnnnnnnnnnnnnnnnnnnnnnnnnnnnnnnnnnnnnnnnnnnnnnnnnnnnnnnnnnnnnnnnnnnnnnnnnnnnnnnnnnnnnnnnnnnnnnnnnnnnnnnnnnnnnnnnnnnnnnnnnnnnnnnnnnnnnnnnnnnnnnnnnnnnnnnnnnnnnnnnnnnnnnnnnnnnnnnnnnnnnnnnnnnnnnnnnnnnnnnnnnnnnnnnnnnnnnnnnnnnnnnnnnnnnnnnnnnnnnnnnnnnnnnnnnnnnnnnnnnnnnnnnnnnnnnnnnnnnnnnnnnnnnnnnnnnnnnnnnnnnnnnnnnnnnnnnnnnnnnnnnnnnnnnnnnnnnnnnnnnnnnnnnnnnnnnnnnnnnnnnnnnnnnnnnnnnnnnnnnnnnnnnnnnnnnnnnnnnnnnnnnnnnnnnnnnnnnnnnnnnnnnnnnnnnnnnnnnnnnnnnnnnnnnnnnnnnnnnnnnnnnnnnnnnnnnnnnnnnnnnnnnnnnnnnnnnnnnnnnnnnnnnnnnnnnnnnnnnnnnnnnnnnnnnnnnnnnnnnnnnnnnnnnnnnnnnnnnnnnnnnnnnnnnnnnnnnnnnnnnnnnnnnnnnnnnnnnnnnnnnnnnnnnnnnnnnnnnnnnnnnnnnnnnnnnnnnnnnnnnnnnnnnnnnnnnnnnnnnnnnnnnnnnnnnnnnnnnnnnnnnnnnnnnnnnnnnnnnnnnnnnnnnnnnnnnnnnnnnnnnnnnnnnnnnnnnnnnnnnnnnnnnnnnnnnnnnnnnnnnnnnnnnnnnnnnnnnnnnnnnnnnnnnnnnnnnnnnnnnnnnnnnnnnnnnnnnnnnnnnnnnnnnnnnnnnnnnnnnnnnnnnnnnnnnnnnnnnnnnnnnnnnnnnnnnnnnnnnnnnnnnnnnnnnnnnnnnnnnnnnnnnnnnnnnnnnnnnnnnnnnnnnnnnnnnnnnnnnnnnnnnnnnnnnnnnnnnnnnnnnnnnnnnnnnnnnnnnnnnnnnnnnnnnnnnnnnnnnnnnnnnnnnnnnnnnnnnnnnnnnnnnnnnnnnnnnnnnnnnnnnnnnnnnnnnnnnnnnnnnnnnnnnnnnnnnnnnnnnnnnnnnnnnnnnnnnnnnnnnnnnnnnnnnnnnnnnnnnnnnnnnnnnnnnnnnnnnnnnnnnnnnnnnnnnnnnnnnnnnnnnnnnnnnnnnnnnnnnnnnnnnnnnnnnnnnnnnnnnnnnnnnnnnnnnnnnnnnnnnnnnnnnnnnnnnnnnnnnnnnnnnnnnnnnnnnnnnnnnnnnnnnnnnnnnnnnnnnnnnnnnnnnnnnnnnnnnnnnnnnnnnnnnnnnnnnnnnnnnnnnnnnnnnnnnnnnnnnnnnnnnnnnnnnnnnnnnnnnnnnnnnnnnnnnnnnnnnnnnnnnnnnnnnnnnnnnnnnnnnnnnnnnnnnnnnnnnnnnnnnnnnnnnnnnnnnnnnnnnnnnnnnnnnnnnnnnnnnnnnnnnnnnnnnnnnnnnnnnnnnnnnnnnnnnnnnnnnnnnnnnnnnnnnnnnnnnnnnnnnnnnnnnnnnnnnnnnnnnnnnnnnnnnnnnnnnnnnnnnnnnnnnnnnnnnnnnnnnnnnnnnnnnnnnnnnnnnnnnnnnnnnnnnnnnnnnnnnnnnnnnnnnnnnnnnnnnnnnnnnnnnnnnnnnnnnnnnnnnnnnnnnnnnnnnnnnnnnnnnnnnnnnnnnnnnnnnnnnnnnnnnnnnnnnnnnnnnnnnnnnnnnnnnnnnnnnnnnnnnnnnnnnnnnnnnnnnnnnnnnnnnnnnnnnnnnnnnnnnnnnnnnnnnnnnnnnnnnnnnnnnnnnnnnnnnnnnnnnnnnnnnnnnnnnnnnnnnnnnnnnnnnnnnnnnnnnnnnnnnnnnnnnnnnnnnnnnnnnnnnnnnnnnnnnnnnnnnnnnnnnnnnnnnnnnnnnnnnnnnnnnnnnnnnnnnnnnnnnnnnnnnnnnnnnnnnnnnnnnnnnnnnnnnnnnnnnnnnnnnnnnnnnnnnnnnnnnnnnnnnnnnnnnnnnnnnnnnnnnnnnnnnnnnnnnnnnnnnnnnnnnnnnnnnnnnnnnnnnnnnnnnnnnnnnnnnnnnnnnnnnnnnnnnnnnnnnnnnnnnnnnnnnnnnnnnnnnnnnnnnnnnnnnnnnnnnnnnnnnnnnnnnnnnnnnnnnnnnnnnnnnnnnnnnnnnnnnnnnnnnnnnnnnnnnnnnnnnnnnnnnnnnnnnnnnnnnnnnnnnnnnnnnnnnnnnnnnnnnnnnnnnnnnnnnnnnnnnnnnnnnnnnnnnnnnnnnnnnnnnnnnnnnnnnnnnnnnnnnnnnnnnnnnnnnnnnnnnnnnnnnnnnnnnnnnnnnnnnnnnnnnnnnnnnnnnnnnnnnnnnnnnnnnnnnnnnnnnnnnnnnnnnnnnnnnnnnnnnnnnnnnnnnnnnnnnnnnnnnnnnnnnnnnnnnnnnnnnnnnnnnnnnnnnnnnnnnnnnnnnnnnnnnnnnnnnnnnnnnnnnnnnnnnnnnnnnnnnnnnnnnnnnnnnnnnnnnnnnnnnnnnnnnnnnnnnnnnnnnnnnnnnnnnnnnnnnnnnnnnnnnnnnnnnnnnnnnnnnnnnnnnnnnnnnnnnnnnnnnnnnnnnnnnnnnnnnnnnnnnnnnnnnnnnnnnnnnnnnnnnnnnnnnnnnnnnnnnnnnnnnnnnnnnnnnnnnnnnnnnnnnnnnnnnnnnnnnnnnnnnnnnnnnnnnnnnnnnnnnnnnnnnnnnnnnnnnnnnnnnnnnnnnnnnnnnnnnnnnnnnnnnnnnnnnnnnnnnnnnnnnnnnnnnnnnnnnnnnnnnnnnnnnnnnnnnnnnnnnnnnnnnnnnnnnnnnnnnnnnnnnnnnnnnnnnnnnnnnnnnnnnnnnnnnnnnnnnnnnnnnnnnnnnnnnnnnnnnnnnnnnnnnnnnnnnnnnnnnnnnnnnnnnnnnnnnnnnnnnnnnnnnnnnnnnnnnnnnnnnnnnnnnnnnnnnnnnnnnnnnnnnnnnnnnnnnnnnnnnnnnnnnnnnnnnnnnnnnnnnnnnnnnnnnnnnnnnnnnnnnnnnnnnnnnnnnnnnnnnnnnnnnnnnnnnnnnnnnnnnnnnnnnnnnnnnnnnnnnnnnnnnnnnnnnnnnnnnnnnnnnnnnnnnnnnnnnnnnnnnnnnnnnnnnnnnnnnnnnnnnnnnnnnnnnnnnnnnnnnnnnnnnnnnnnnnnnnnnnnnnnnnnnnnnnnnnnnnnnnnnnnnnnnnnnnnnnnnnnnnnnnnnnnnnnnnnnnnnnnnnnnnnnnnnnnnnnnnnnnnnnnnnnnnnnnnnnnnnnnnnnnnnnnnnnnnnnnnnnnnnnnnnnnnnnnnnnnnnnnnnnnnnnnnnnnnnnnnnnnnnnnnnnnnnnnnnnnnnnnnnnnnnnnnnnnnnnnnnnnnnnnnnnnnnnnnnnnnnnnnnnnnnnnnnnnnnnnnnnnnnnnnnnnnnnnnnnnnnnnnnnnnnnnnnnnnnnnnnnnnnnnnnnnnnnnnnnnnnnnnnnnnnnnnnnnnnnnnnnnnnnnnnnnnnnnnnnnnnnnnnnnnnnnnnnnnnnnnnnnnnnnnnnnnnnnnnnnnnnnnnnnnnnnnnnnnnnnnnnnnnnnnnnnnnnnnnnnnnnnnnnnnnnnnnnnnnnnnnnnnnnnnnnnnnnnnnnnnnnnnnnnnnnnnnnnnnnnnnnnnnnnnnnnnnnnnnnnnnnnnnnnnnnnnnnnnnnnnnnnnnnnnnnnnnnnnnnnnnnnnnnnnnnnnnnnnnnnnnnnnnnnnnnnnnnnnnnnnnnnnnnnnnnnnnnnnnnnnnnnnnnnnnnnnnnnnnnnnnnnnnnnnnnnnnnnnnnnnnnnnnnnnnnnnnnnnnnnnnnnnnnnnnnnnnnnnnnnnnnnnnnnnnnnnnnnnnnnnnnnnnnnnnnnnnnnnnnnnnnnnnnnnnnnnnnnnnnnnnnnnnnnnnnnnnnnnnnnnnnnnnnnnnnnnnnnnnnnnnnnnnnnnnnnnnnnnnnnnnnnnnnnnnnnnnnnnnnnnnnnnnnnnnnnnnnnnnnnnnnnnnnnnnnnnnnnnnnnnnnnnnnnnnnnnnnnnnnnnnnnnnnnnnnnnnnnnnnnnnnnnnnnnnnnnnnnnnnnnnnnnnnnnnnnnnnnnnnnnnnnnnnnnnnnnnnnnnnnnnnnnnnnnnnnnnnnnnnnnnnnnnnnnnnnnnnnnnnnnnnnnnnnnnnnnnnnnnnnnnnnnnnnnnnnnnnnnnnnnnnnnnnnnnnnnnnnnnnnnnnnnnnnnnnnnnnnnnnnnnnnnnnnnnnnnnnnnnnnnnnnnnnnnnnnnnnnnnnnnnnnnnnnnnnnnnnnnnnnnnnnnnnnnnnnnnnnnnnnnnnnnnnnnnnnnnnnnnnnnnnnnnnnnnnnnnnnnnnnnnnnnnnnnnnnnnnnnnnnnnnnnnnnnnnnnnnnnnnnnnnnnnnnnnnnnnnnnnnnnnnnnnnnnnnnnnnnnnnnnnnnnnnnnnnnnnnnnnnnnnnnnnnnnnnnnnnnnnnnnnnnnnnnnnnnnnnnnnnnnnnnnnnnnnnnnnnnnnnnnnnnnnnnnnnnnnnnnnnnnnnnnnnnnnnnnnnnnnnnnnnnnnnnnnnnnnnnnnnnnnnnnnnnnnnnnnnnnnnnnnnnnnnnnnnnnnnnnnnnnnnnnnnnnnnnnnnnnnnnnnnnnnnnnnnnnnnnnnnnnnnnnnnnnnnnnnnnnnnnnnnnnnnnnnnnnnnnnnnnnnnnnnnnnnnnnnnnnnnnnnnnnnnnnnnnnnnnnnnnnnnnnnnnnnnnnnnnnnnnnnnnnnnnnnnnnnnnnnnnnnnnnnnnnnnnnnnnnnnnnnnnnnnnnnnnnnnnnnnnnnnnnnnnnnnnnnnnnnnnnnnnnnnnnnnnnnnnnnnnnnnnnnnnnnnnnnnnnnnnnnnnnnnnnnnnnnnnnnnnnnnnnnnnnnnnnnnnnnnnnnnnnnnnnnnnnnnnnnnnnnnnnnnnnnnnnnnnnnnnnnnnnnnnnnnnnnnnnnnnnnnnnnnnnnnnnnnnnnnnnnnnnnnnnnnnnnnnnnnnnnnnnnnnnnnnnnnnnnnnnnnnnnnnnnnnnnnnnnnnnnnnnnnnnnnnnnnnnnnnnnnnnnnnnnnnnnnnnnnnnnnnnnnnnnnnnnnnnnnnnnnnnnnnnnnnnnnnnnnnnnnnnnnnnnnnnnnnnnnnnnnnnnnnnnnnnnnnnnnnnnnnnnnnnnnnnnnnnnnnnnnnnnnnnnnnnnnnnnnnnnnnnnnnnnnnnnnnnnnnnnnnnnnnnnnnnnnnnnnnnnnnnnnnnnnnnnnnnnnnnnnnnnnnnnnnnnnnnnnnnnnnnnnnnnnnnnnnnnnnnnnnnnnnnnnnnnnnnnnnnnnnnnnnnnnnnnnnnnnnnnnnnnnnnnnnnnnnnnnnnnnnnnnnnnnnnnnnnnnnnnnnnnnnnnnnnnnnnnnnnnnnnnnnnnnnnnnnnnnnnnnnnnnnnnnnnnnnnnnnnnnnnnnnnnnnnnnnnnnnnnnnnnnnnnnnnnnnnnnnnnnnnnnnnnnnnnnnnnnnnnnnnnnnnnnnnnnnnnnnnnnnnnnnnnnnnnnnnnnnnnnnnnnnnnnnnnnnnnnnnnnnnnnnnnnnnnnnnnnnnnnnnnnnnnnnnnnnnnnnnnnnnnnnnnnnnnnnnnnnnnnnnnnnnnnnnnnnnnnnnnnnnnnnnnnnnnnnnnnnnnnnnnnnnnnnnnnnnnnnnnnnnnnnnnnnnnnnnnnnnnnnnnnnnnnnnnnnnnnnnnnnnnnnnnnnnnnnnnnnnnnnnnnnnnnnnnnnnnnnnnnnnnnnnnnnnnnnnnnnnnnnnnnnnnnnnnnnnnnnnnnnnnnnnnnnnnnnnnnnnnnnnnnnnnnnnnnnnnnnnnnnnnnnnnnnnnnnnnnnnnnnnnnnnnnnnnnnnnnnnnnnnnnnnnnnnnnnnnnnnnnnnnnnnnnnnnnnnnnnnnnnnnnnnnnnnnnnnnnnnnnnnnnnnnnnnnnnnnnnnnnnnnnnnnnnnnnnnnnnnnnnnnnnnnnnnnnnnnnnnnnnnnnnnnnnnnnnnnnnnnnnnnnnnnnnnnnnnnnnnnnnnnnnnnnnnnnnnnnnnnnnnnnnnnnnnnnnnnnnnnnnnnnnnnnnnnnnnnnnnnnnnnnnnnnnnnnnnnnnnnnnnnnnnnnnnnnnnnnnnnnnnnnnnnnnnnnnnnnnnnnnnnnnnnnnnnnnnnnnnnnnnnnnnnnnnnnnnnnnnnnnnnnnnnnnnnnnnnnnnnnnnnnnnnnnnnnnnnnnnnnnnnnnnnnnnnnnnnnnnnnnnnnnnnnnnnnnnnnnnnnnnnnnnnnnnnnnnnnnnnnnnnnnnnnnnnnnnnnnnnnnnnnnnnnnnnnnnnnnnnnnnnnnnnnnnnnnnnnnnnnnnnnnnnnnnnnnnnnnnnnnnnnnnnnnnnnnnnnnnnnnnnnnnnnnnnnnnnnnnnnnnnnnnnnnnnnnnnnnnnnnnnnnnnnnnnnnnnnnnnnnnnnnnnnnnnnnnnnnnnnnnnnnnnnnnnnnnnnnnnnnnnnnnnnnnnnnnnnnnnnnnnnnnnnnnnnnnnnnnnnnnnnnnnnnnnnnnnnnnnnnnnnnnnnnnnnnnnnnnnnnnnnnnnnnnnnnnnnnnnnnnnnnnnnnnnnnnnnnnnnnnnnnnnnnnnnnnnnnnnnnnnnnnnnnnnnnnnnnnnnnnnnnnnnnnnnnnnnnnnnnnnnnnnnnnnnnnnnnnnnnnnnnnnnnnnnnnnnnnnnnnnnnnnnnnnnnnnnnnnnnnnnnnnnnnnnnnnnnnnnnnnnnnnnnnnnnnnnnnnnnnnnnnnnnnnnnnnnnnnnnnnnnnnnnnnnnnnnnnnnnnnnnnnnnnnnnnnnnnnnnnnnnnnnnnnnnnnnnnnnnnnnnnnnnnnnnnnnnnnnnnnnnnnnnnnnnnnnnnnnnnnnnnnnnnnnnnnnnnnnnnnnnnnnnnnnnnnnnnnnnnnnnnnnnnnnnnnnnnnnnnnnnnnnnnnnnnnnnnnnnnnnnnnnnnnnnnnnnnnnnnnnnnnnnnnnnnnnnnnnnnnnnnnnnnnnnnnnnnnnnnnnnnnnnnnnnnnnnnnnnnnnnnnnnnnnnnnnnnnnnnnnnnnnnnnnnnnnnnnnnnnnnnnnnnnnnnnnnnnnnnnnnnnnnnnnnnnnnnnnnnnnnnnnnnnnnnnnnnnnnnnnnnnnnnnnnnnnnnnnnnnnnnnnnnnnnnnnnnnnnnnnnnnnnnnnnnnnnnnnnnnnnnnnnnnnnnnnnnnnnnnnnnnnnnnnnnnnnnnnnnnnnnnnnnnnnnnnnnnnnnnnnnnnnnnnnnnnnnnnnnnnnnnnnnnnnnnnnnnnnnnnnnnnnnnnnnnnnnnnnnnnnnnnnnnnnnnnnnnnnnnnnnnnnnnnnnnnnnnnnnnnnnnnnnnnnnnnnnnnnnnnnnnnnnnnnnnnnnnnnnnnnnnnnnnnnnnnnnnnnnnnnnnnnnnnnnnnnnnnnnnnnnnnnnnnnnnnnnnnnnnnnnnnnnnnnnnnnnnnnnnnnnnnnnnnnnnnnnnnnnnnnnnnnnnnnnnnnnnnnnnnnnnnnnnnnnnnnnnnnnnnnnnnnnnnnnnnnnnnnnnnnnnnnnnnnnnnnnnnnnnnnnnnnnnnnnnnnnnnnnnnnnnnnnnnnnnnnnnnnnnnnnnnnnnnnnnnnnnnnnnnnnnnnnnnnnnnnnnnnnnnnnnnnnnnnnnnnnnnnnnnnnnnnnnnnnnnnnnnnnnnnnnnnnnnnnnnnnnnnnnnnnnnnnnnnnnnnnnnnnnnnnnnnnnnnnnnnnnnnnnnnnnnnnnnnnnnnnnnnnnnnnnnnnnnnnnnnnnnnnnnnnnnnnnnnnnnnnnnnnnnnnnnnnnnnnnnnnnnnnnnnnnnnnnnnnnnnnnnnnnnnnnnnnnnnnnnnnnnnnnnnnnnnnnnnnnnnnnnnnnnnnnnnnnnnnnnnnnnnnnnnnnnnnnnnnnnnnnnnnnnnnnnnnnnnnnnnnnnnnnnnnnnnnnnnnnnnnnnnnnnnnnnnnnnnnnnnnnnnnnnnnnnnnnnnnnnnnnnnnnnnnnnnnnnnnnnnnnnnnnnnnnnnnnnnnnnnnnnnnnnnnnnnnnnnnnnnnnnnnnnnnnnnnnnnnnnnnnnnnnnnnnnnnnnnnnnnnnnnnnnnnnnnnnnnnnnnnnnnnnnnnnnnnnnnnnnnnnnnnnnnnnnnnnnnnnnnnnnnnnnnnnnnnnnnnnnnnnnnnnnnnnnnnnnnnnnnnnnnnnnnnnnnnnnnnnnnnnnnnnnnnnnnnnnnnnnnnnnnnnnnnnnnnnnnnnnnnnnnnnnnnnnnnnnnnnnnnnnnnnnnnnnnnnnnnnnnnnnnnnnnnnnnnnnnnnnnnnnnnnnnnnnnnnnnnnnnnnnnnnnnnnnnnnnnnnnnnnnnnnnnnnnnnnnnnnnnnnnnnnnnnnnnnnnnnnnnnnnnnnnnnnnnnnnnnnnnnnnnnnnnnnnnnnnnnnnnnnnnnnnnnnnnnnnnnnnnnnnnnnnnnnnnnnnnnnnnnnnnnnnnnnnnnnnnnnnnnnnnnnnnnnnnnnnnnnnnnnnnnnnnnnnnnnnnnnnnnnnnnnnnnnnnnnnnnnnnnnnnnnnnnnnnnnnnnnnnnnnnnnnnnnnnnnnnnnnnnnnnnnnnnnnnnnnnnnnnnnnnnnnnnnnnnnnnnnnnnnnnnnnnnnnnnnnnnnnnnnnnnnnnnnnnnnnnnnnnnnnnnnnnnnnnnnnnnnnnnnnnnnnnnnnnnnnnnnnnnnnnnnnnnnnnnnnnnnnnnnnnnnnnnnnnnnnnnnnnnnnnnnnnnnnnnnnnnnnnnnnnnnnnnnnnnnnnnnnnnnnnnnnnnnnnnnnnnnnnnnnnnnnnnnnnnnnnnnnnnnnnnnnnnnnnnnnnnnnnnnnnnnnnnnnnnnnnnnnnnnnnnnnnnnnnnnnnnnnnnnnnnnnnnnnnnnnnnnnnnnnnnnnnnnnnnnnnnnnnnnnnnnnnnnnnnnnnnnnnnnnnnnnnnnnnnnnnnnnnnnnnnnnnnnnnnnnnnnnnnnnnnnnnnnnnnnnnnnnnnnnnnnnnnnnnnnnnnnnnnnnnnnnnnnnnnnnnnnnnnnnnnnnnnnnnnnnnnnnnnnnnnnnnnnnnnnnnnnnnnnnnnnnnnnnnnnnnnnnnnnnnnnnnnnnnnnnnnnnnnnnnnnnnnnnnnnnnnnnnnnnnnnnnnnnnnnnnnnnnnnnnnnnnnnnnnnnnnnnnnnnnnnnnnnnnnnnnnnnnnnnnnnnnnnnnnnnnnnnnnnnnnnnnnnnnnnnnnnnnnnnnnnnnnnnnnnnnnnnnnnnnnnnnnnnnnnnnnnnnnnnnnnnnnnnnnnnnnnnnnnnnnnnnnnnnnnnnnnnnnnnnnnnnnnnnnnnnnnnnnnnnnnnnnnnnnnnnnnnnnnnnnnnnnnnnnnnnnnnnnnnnnnnnnnnnnnnnnnnnnnnnnnnnnnnnnnnnnnnnnnnnnnnnnnnnnnnnnnnnnnnnnnnnnnnnnnnnnnnnnnnnnnnnnnnnnnnnnnnnnnnnnnnnnnnnnnnnnnnnnnnnnnnnnnnnnnnnnnnnnnnnnnnnnnnnnnnnnnnnnnnnnnnnnnnnnnnnnnnnnnnnnnnnnnnnnnnnnnnnnnnnnnnnnnnnnnnnnnnnnnnnnnnnnnnnnnnnnnnnnnnnnnnnnnnnnnnnnnnnnnnnnnnnnnnnnnnnnnnnnnnnnnnnnnnnnnnnnnnnnnnnnnnnnnnnnnnnnnnnnnnnnnnnnnnnnnnnnnnnnnnnnnnnnnnnnnnnnnnnnnnnnnnnnnnnnnnnnnnnnnnnnnnnnnnnnnnnnnnnnnnnnnnnnnnnnnnnnnnnnnnnnnnnnnnnnnnnnnnnnnnnnnnnnnnnnnnnnnnnnnnnnnnnnnnnnnnnnnnnnnnnnnnnnnnnnnnnnnnnnnnnnnnnnnnnnnnnnnnnnnnnnnnnnnnnnnnnnnnnnnnnnnnnnnnnnnnnnnnnnnnnnnnnnnnnnnnnnnnnnnnnnnnnnnnnnnnnnnnnnnnnnnnnnnnnnnnnnnnnnnnnnnnnnnnnnnnnnnnnnnnnnnnnnnnnnnnnnnnnnnnnnnnnnnnnnnnnnnnnnnnnnnnnnnnnnnnnnnnnnnnnnnnnnnnnnnnnnnnnnnnnnnnnnnnnnnnnnnnnnnnnnnnnnnnnnnnnnnnnnnnnnnnnnnnnnnnnnnnnnnnnnnnnnnnnnnnnnnnnnnnnnnnnnnnnnnnnnnnnnnnnnnnnnnnnnnnnnnnnnnnnnnnnnnnnnnnnnnnnnnnnnnnnnnnnnnnnnnnnnnnnnnnnnnnnnnnnnnnnnnnnnnnnnnnnnnnnnnnnnnnnnnnnnnnnnnnnnnnnnnnnnnnnnnnnnnnnnnnnnnnnnnnnnnnnnnnnnnnnnnnnnnnnnnnnnnnnnnnnnnnnnnnnnnnnnnnnnnnnnnnnnnnnnnnnnnnnnnnnnnnnnnnnnnnnnnnnnnnnnnnnnnnnnnnnnnnnnnnnnnnnnnnnnnnnnnnnnnnnnnnnnnnnnnnnnnnnnnnnnnnnnnnnnnnnnnnnnnnnnnnnnnnnnnnnnnnnnnnnnnnnnnnnnnnnnnnnnnnnnnnnnnnnnnnnnnnnnnnnnnnnnnnnnnnnnnnnnnnnnnnnnnnnnnnnnnnnnnnnnnnnnnnnnnnnnnnnnnnnnnnnnnnnnnnnnnnnnnnnnnnnnnnnnnnnnnnnnnnnnnnnnnnnnnnnnnnnnnnnnnnnnnnnnnnnnnnnnnnnnnnnnnnnnnnnnnnnnnnnnnnnnnnnnnnnnnnnnnnnnnnnnnnnnnnnnnnnnnnnnnnnnnnnnnnnnnnnnnnnnnnnnnnnnnnnnnnnnnnnnnnnnnnnnnnnnnnnnnnnnnnnnnnnnnnnnnnnnnnnnnnnnnnnnnnnnnnnnnnnnnnnnnnnnnnnnnnnnnnnnnnnnnnnnnnnnnnnnnnnnnnnnnnnnnnnnnnnnnnnnnnnnnnnnnnnnnnnnnnnnnnnnnnnnnnnnnnnnnnnnnnnnnnnnnnnnnnnnnnnnnnnnnnnnnnnnnnnnnnnnnnnnnnnnnnnnnnnnnnnnnnnnnnnnnnnnnnnnnnnnnnnnnnnnnnnnnnnnnnnnnnnnnnnnnnnnnnnnnnnnnnnnnnnnnnnnnnnnnnnnnnnnnnnnnnnnnnnnnnnnnnnnnnnnnnnnnnnnnnnnnnnnnnnnnnnnnnnnnnnnnnnnnnnnnnnnnnnnnnnnnnnnnnnnnnnnnnnnnnnnnnnnnnnnnnnnnnnnnnnnnnnnnnnnnnnnnnnnnnnnnnnnnnnnnnnnnnnnnnnnnnnnnnnnnnnnnnnnnnnnnnnnnnnnnnnnnnnnnnnnnnnnnnnnnnnnnnnnnnnnnnnnnnnnnnnnnnnnnnnnnnnnnnnnnnnnnnnnnnnnnnnnnnnnnnnnnnnnnnnnnnnnnnnnnnnnnnnnnnnnnnnnnnnnnnnnnnnnnnnnnnnnnnnnnnnnnnnnnnnnnnnnnnnnnnnnnnnnnnnnnnnnnnnnnnnnnnnnnnnnnnnnnnnnnnnnnnnnnnnnnnnnnnnnnnnnnnnnnnnnnnnnnnnnnnnnnnnnnnnnnnnnnnnnnnnnnnnnnnnnnnnnnnnnnnnnnnnnnnnnnnnnnnnnnnnnnnnnnnnnnnnnnnnnnnnnnnnnnnnnnnnnnnnnnnnnnnnnnnnnnnnnnnnnnnnnnnnnnnnnnnnnnnnnnnnnnnnnnnnnnnnnnnnnnnnnnnnnnnnnnnnnnnnnnnnnnnnnnnnnnnnnnnnnnnnnnnnnnnnnnnnnnnnnnnnnnnnnnnnnnnnnnnnnnnnnnnnnnnnnnnnnnnnnnnnnnnnnnnnnnnnnnnnnnnnnnnnnnnnnnnnnnnnnnnnnnnnnnnnnnnnnnnnnnnnnnnnnnnnnnnnnnnnnnnnnnnnnnnnnnnnnnnnnnnnnnnnnnnnnnnnnnnnnnnnnnnnnnnnnnnnnnnnnnnnnnnnnnnnnnnnnnnnnnnnnnnnnnnnnnnnnnnnnnnnnnnnnnnnnnnnnnnnnnnnnnnnnnnnnnnnnnnnnnnnnnnnnnnnnnnnnnnnnnnnnnnnnnnnnnnnnnnnnnnnnnnnnnnnnnnnnnnnnnnnnnnnnnnnnnnnnnnnnnnnnnnnnnnnnnnnnnnnnnnnnnnnnnnnnnnnnngaggcctggtggtaggtggtcccgccctcgacgatgagcttggcggcctggagccggaactcctcactgtagcgtttcggtcgtgtactcttgtctgccatagatagttcctttcgtgtctatggcagcccagtctatcaagctcgccccgcgcccaccatccgtagggcaggtcaacgctcgcgtttgctgcgggctgggcaacacctctaacggaaagtcaggcgttcgccaaacgcgtggagcaacatctcaagaacctggggcataatgcaaaggattccaagacaaagaaggaggtgaaagccgcgtggatcatcctcaactgcagactggccgagttgcagaaggcatgcagtgacaaactgcgaggaacacttgacgcaggcttaccaagagaacaactcgcggaatcgatagcgaacgcccttgatgatgtcttgaagacaaacgagaagatgttccaggacctcgttaagaagccgaacaaaaaggaagaagcggcaatcggacaagaagacctccggcagaagaagttctggggatcggatccccagcttctggtgtcgaagaatgaggcgcttgcgcttccccgcttggaagccgatgccgaagcgcacgccaggttctggaggtcggcgtttcgtgccgccgcaggaaagcagggacgcaagcgcattgcgataggccccgtggtcaaccagtttgtgtatcaagacgcaacgacgctttccattcccgatacgtctgccgagtcacaggtgcgtctttcaggcgatgttggcgacgaattgctagacctgttgaagcagctcacaccgaatcataaacgcgagcatcctgaaatccgcgctgccttggcgttgctcgcaccagaaacagaagaccgaatccgcgccatcttggacaaaagcaatgtcgcgggcgatgacagggacttcctccgctcaacgttcaagccggtcgtacagaagatcattgcgtccactgctcgcggttcttcgtttcagcgccgcgtggcgatgaccgaggcgtacgccgaacttgagaagctcatcaacaagaagacaagagcaaggaagtcaggcgcgtgtcgcaagaagggagctacgctatgaccccgaccattgaattcatcaacagactggagaatctcaaagaaggcgatcgttctcgcctgcgttggctggcgggccagccgctggacaagacgctttcgggatttgatctgttcaccggcctgtggtggccgctgcgtgcgacaaatgcgcgaactccgcggcgtgaaatctcatggctcatcgccaagctgtattgtgcatcctcggttccgtatgttcggcctgaatcggatgttggggtatcactcccggcggtgcttggcagatgcgaaccgtgcgatccgccggattaccgcgcccgcaatacctttcgccggcgattcgacgccgtgatttgctcaagcctttctgacatcgaaccacgactacagtggggcttgcgcgaggttgccaaggcagttgcgggtcgtgtggtccacgcggagactgtgaccggcatcgactgggcgctgctgctcgacgacctgtcgctctgggacagggagttcaacatggacgacacatggcagaagagccggttgaatgctcaccaacggctcgctcgttgccgtgaaactcaccgcacgccgcaggacctgtgggcgtgcgagtacctgaacgcaactgttcaaccacaaggaggcgactatgctgattgaaatccacatgattcagaaccacagtccgtcgaacctcaaccgggacgatctgggtgcccccaagacgtgcatcttcggcggcgtcacccgcgcgcgcatttccagccaatgcctcaaacgaagcatccgacgcagcccggaattcgcagcggcactggagaaagacggcggggttcgcacgcgccgactgattgaggagattgcgaaagcggccggccgtgatggcaacgagcccaaagaagaacacctcaaagccgtccgggaagtcttcaaagagggcggtgtcggcctgaaggatgagaacacttttgacatcctcttcttcctgcctcgatcagccatcaaagaaatgggggtcgccgtgagcgccggtaacggtgatttaggtaagaagttcgccgaagtcatcggcaagttcgtcaagacgccggacatcgccttgtgcggacgcatgacggagtttgatgcgaagggcccgttcgaaggtctgaagggcaaatttaccgtcgaagctgcactgtccgcagcacacgccatctccactcacgcggtcgtaaacgaggtggattacttcacggcagcagacgacattcccggccaggacgcgggggcgggacacgtcagcgaggcgatgttcaattcggcctgcttctacaagcatttctgcatcgactgggagcagctgctcaagaatcttggcggcgatgtggagcttgccacgacgaccgtcaggtgcttcctcgaaggcgccgcaaaggcgaacccctctggaaagcaacacgcatacggcgcgttcaactaccctgacggcatcttggttgaggtcaaggccgagaccgccacccctgtaagttatgcaaatgcctttgccgacccggttccggagaagtctgtgcgaggtctgatcggcgagagcatcgcgcgccttggccagtatgcacatgatctcatcgacggctatgccctctcggctgaacgcttctggttttccccgagctcacgccatcgcctgacatggatcgacaaaagcaagagggagcctgagcaagagcagtccgttgtggacgagaagaaggaattcggaaagttcccggacttcgtgaccgctatcatggaggaggtcggcaaaagaagcacggcgccggcgggagggagactatgacagactctcggacgatcttcctgcgtttcgaaggcccgctccaggcgtggggtgatacatccaagtttgtgattcgtcgaagcatggactcgccgacgaaatcgggtgtgctggggctgatttgctgcgccatgggtttatcgcgaccgggggcgcgcgagaagcttccagccttgaacacgcttacgatgggtgtacggatcgaccggcccggcgctcgctggtgggactatcacaccgttggggcgggtattggcttgacgacagcggcaggtgggctcaagaccggtgcgcagggtacggtcatcaaacgactggaatatctggctgatgccagttttctggtcgctttgcagggcgatgcgatattgatcgccacggtcgcagaagcgttgcgatccccgaagtggccgttgtacctcggtcgcaagtcgtgtccaccgtccatgccggtattcgcccagccgcgcaaggatgagacatggaccaacccaatggcggtcgatggtgatatcgaggctgcgctccagataatgccgtggcatccgcgatatgccgacgatgccccgcgcgatcagcatgggaaacgctacgagaacattgagttgccctgcctgatcgagtggcgcagaagaaatgacaaggatacagctccgcctgacgccgaggtctggtacgacacacccttttcgttcgacccgccggtgcatcatccgcgattggtaagacgaggtcaggtcacggtcacggtcggcgatgcgctccagcagcatacgccgccaccacctcgtccccgcgcggactacaataacgaccagtacaagaagcatcgtgctgagcgtctacaatccgatcagggcctctgcgtcttctgcaagtcgccggccacgactgtccagcacgtgacctatcgccgcgccgggggcaatgaggcacaggaagacctgcggtctctctgccggctctgccacgatgccgtgaccatgatcgagtacggcatgggcatgggcctggaccggattgacccgtgcgacgtgcggtggcgcgatgacattctccggacccgcgccgacattatccgtttccgcagcgaggaaacccggcggcgagcactgcgcagtgctcccgagaagattcgccgcgaggctttggaagaagaggatatctgaatcatgtaccactcccacctgctcatcaatgttggtgacaaccctgaccgcccggattggagcatcacccggcgctggctgcgaaatctgtatcgagttcaccagcgcttgtgtatggcctttccgtcgaaggtcccggtgtcacataaggaacgccttgcagcgtactgcgcaccctacagcggcacaggactggaccatctgcgtaacttgcccggggagccggatacagcggacgtgcaccattcccgtagcgatcaggccggattcctcttccgcatcgattaccctgtcgatcacagccggggcgtccgacgacccctcatcatcgtccagtcggcggggaacgagccgccggattggcactatgccttcgggttgaatgaagatgccgtggatgatggcggacgcccgattggcaatgccggattcttgttggccgcgccaccacagaccagaaggatcaccatgagccttgagaatgacgatgtgtttgtaattggcagcccaaaggagaatcatcgaatcgctcccggcgatctggtgcgtttccgcctgcgcgccaatccaacgcggaaagtgcaggacggatcgccgaacggcagccgcaaacgcatttgcccgacgctggtcgatcacgccgactggttgaaaggcaagttgggagatgcggcggattccccggtctgtttggagaacttcgtcaccggttgggcttacggatggcgttcaaagcacgaaccgcagcccagccagcgcatgcagtggtggtccgtactgtttgaggggagcttccgggtaggtaatctgaaggtgctgaagcagttgctcgaatgcggaatcggtccagccaaggcgttcggtttcgggctcttgtccatcgcgccggtcaggtagagtttcccggtcgaatagccgatgggtgtaatgcggatggcgtatctgcccatcgaatcgcgatctttgctgtccagtacgaagggattctggaaatgacggatacgcagaagttttttcagacgctctgctctggcattggcccggccaagggactggggatgggtctgctaagcattgcccgcgcttaggagaacctatggctgatctgcacgaactgccgaagttcgaggaccgctggacgcacctctacctggagcgcggcggcctggacaaggacaaagaaggcctggtctttcgtcagggcgaaggacgaacgctcattccgatagaccagttgtccctggtcatgctggggccgggcacgtcgatcacccagcaagcagccaaggcgctggcggccaacaactgcctgatgtgcttcgtcggtgaggagggcgtcaagatgtacgccttcggcacgggaggaacgcacagcgcccaccgactgctccggcaggccgaattgtatgcctctccgcagcagcgggaactcgtcgcacgccggatgtacctgaagcgattcccgtctccagtctcggcggatgtgaccatccagcagctcagggggatggaaggggcgcgggtccgcaagacctacgagcaaatggcggcaacctgcggcgtgaagtgggaagggcgcgactacgatcagagcagttggtacaccgccgacccgctgaatcgggcgctgtcgtctgccaattcttgcctctacagcttgtgccacgccgcgattctgtccgccggttacagccccgccatcggcttcatccacacaggcaaggtgctgagcttcgtctacgatgtggccgacctgtacaagacggagatcacgattccgctggcgttccagaccgtatccggctccaaggacgacgttgaaagacgaacccgactggcctgtcgagacatgttcaaacaggccaagctgatacggcgtatcttgcctgatattgcggaggtgctcgatgctcgtgatgatgttggagaacgtgccgatgagcttgaggggcgagctatctcgctggctgatcgagcccaaggctggggttttccttggaagtccgacggccagaatacgggataagctgtggcagaacgccctgaagaagcgcaagggcggctacgtccttcagatatggtctgattccagcccgcagggctacagcttccggtccgaaggcgaatcgtctcgccaactgcaagacttcgagggcattgccttggtggcttacaaagacaagcgtaggccgagccaggtatcaacatcttgaggtctgcccagtcccggcatacaatgccgtggtattgtccccacgcacgtgggggtgaaccgatatggcaatacttcttttaatgcagacacagattgtccccacgcacgtgggggtgaaccggcactgcaagcgatgtacacacggcgactgctattgtccccacgcacgtgggggtgaaccgtccacgactgttattacccgcccgatccacagattgtccccacgcacgtgggggtgaaccgacggtttctctgcctgtgggtgctccgtatctattgtccccacgcacgtgggggtgaaccgcgtgctgagtgtgctggatgggagttttcggtcattgtccccacgcacgtgggggtgaaccggtgtgggccgggcggccataaggggagatttgattgtccccacgcacgtgggggtgaaccgctcagccagcttctccaagcaatcaccacaaaattctccccacgcacgtgggggtgaaccggtgatcccggccgacgagaacgtcgcacacggattgtccccacgcacgtgggggtgaaccgaccgccgccgccgtgctcccggcggcgagacattgtccccacgcacgtgggggtgaaccgccagatgaacatggactgggagggctccgcggattgtccccacgcacgtgggggtgaaccggggagttgttcgtatcctcgcacagccgcaattcgacttcccactcggcctgcgtaaagcccgtcactccattctgcatgtcctcgaacggcacgtcgacacacaggttgcctctggatgctgtgagggatgaggattccctcatccggggcaatttggccatctgatctccgtggggcagcatttgtcaagacaccccgcgtcgtaggggacccgtccaccatacgccgctgggcgtcagcccgcctccgggccaaacggacggaatcaccacaggtcccggaccaagtatcggggcttctgcgtcagctcgatctcggccgccaccttcgccttgaagtgctcatcgtactcatcggtccgcagatcgagcacccaggtgctcacaaacatcacgctggcgagcaggtcctggcagccttgttcgacttcgagttccaggtggtcgatgtgctctccctgcggcggggacgccacccctttcagcccgcccgccagcaggaatagatcccgcccttcccccacgagcggctggcggcgccctttggccgccatcaatgcctccgctctgtccttgtcgaaactgacctcacgcatgaagccaccatcctttcgccggcgtcctggcccgaccgccgcctgtgaatcctaccttgccttgcccttcgcagaaccaacccgccccgtgcgaaacataccgtaccgcatgggacccgctccacagaggcccacagagctcgccacgggccttctgggcgttccaattcacagagacggcccttgggtcgggtccgggccagatcgtggctaattccgtcgcgaatcgcacacgtattcgagttggggcgacgctgtgagtcgtctcgacggccgtgggcgtcttgcgccccgtcagtctgtaggcgaacaaggggcagcccgtgtcggtgcagtcccgaaccgcgttcgccacgtaagccatgcactccagacacaacgaccggatggcagcactttggctgcgtccggtcatggccagccggtagagcctctgaaaacgtcttggcacatctctgtccgtcatgctgttggatctccttcggccgttccgtcaaaaggggccgatgccccatgtccgtcgtctttgctgatgtcactggctctcgtcggcggcatcgccggcctgattccacatctcgggcggccggacgtaccactgggggcgtttccctccctggcgccggacccggctaatcatgcctgcttcgctcagctttcgaagatggcgtttgatggcctttgtgcgtagcatcccttgctccggtggtgcgcagagccgagccagcctcatgatcggcgcttcacacggttgtcttccgccgtccgtccattcacagagccagccaaacacccgcagtgccccgattccgacgcatcggctggcggcctcgcgccacgccggcggaatcagaagctccgcgcgtgggaaggcccccggtctttggtcgggttggcttctgctcgcggcagcgtcctcgtggggcttggacgggggctcgggtacaggcctgtccagcgcagggtttcgcctgattctcgtagggaagctcaaacgccagtcttggccgctcggcttgtacacatcttcccggcgcccgtagtagcccttccggtaggtcgtcacacgagcatcgaactccacgcagtccccctggtgcagcacgcccagggcccggaaccccttcgtctccgtgaaccagagatgatcggtcacacggacgcccccatccacagggcacacctcacgaaacaaaagcgtcttgaggggcgctcctcgataggcactcttctggccataccgctcgaagatggcacggaacctcattcgttgaccgtccagattcttccattcgtctcttggcatgttggctcctctctgaggcccgatctcgggccgttcgtcaaccacagcgattcacaaaccgtccgcgcattaccagatccgcaccgcaagagcgagagatagtactgtggggccgggggtgccgggggggctccccccggtggggtccgggccgcaatcgtgaagcccgttgccgggccgggaccgaaacacgacaaaacgtgttgtcttttcccgttgcctcctcgcgcgcccgggcgcgagacttcttggctccgagagccagggaacggcacatccccgggataccttcttactcgcccgtcagtgcctccgccgccatccatgccccgagcatcatcctgctttcctcgtccagctccgcagcgccctgcttggccgcctccatcagggcctcgtggtacttgtcgagcacagcattgagcaagtccgggtcgccgtggtcgccgtccgacagggcccaggacaggctcacggccagcatcgtctccagcggccgctgctccagccacgtcgcgatcaggtctttcggctgcctctgcggggtcatcgtgtctcgttcactttccatcgctcagcctccgtcaaaaggggttccgcgccgccggctgctcgcacgagaggcccggccggcacagggttacgttctatgcaggcgcctcaggggtcggcctgtggctcctgaccaggtgcaggatcttccgcttcacatcctccggcaggtccggccaggccgccacgatctgagccaagtcggggtcacccgacgcaatctcgcgcaccaaatgcgcacctattctgtgttcgggagtatcatttcgctgttcgggaagtgcaagagtctgtccctcgaaatccccttcaaatggctttcggtcgcattctgtgcaggaattggagcggtcctgtggtgattctgttaccccacgaatcgggttcaaatcctgtctccccgatttcccctcttgttctgccgcttgccgcattcgatctcgtcgcaggggccagcggcagcttgccgatgggtcccacgtccaagtactcagaccagagccgtttatggaacttgcctcggccctggggcgacggtatagttagaggtcctcgcggctgctccgtgggagctatgtatgtaagtgggctcgccgcgcgggccgtgagagtgcggcgccgcctgggcgcgttggaacatggatgggaagaagggttctgggcaaggaaagctgtggtagattcgggtgcggcaagtctggactacgagcaatttgaagaacgcggattgcgtcttgtcctaaaggggacgttgaacgccgccgacgcacagcggttctggccccaggttatgcagaaggtggcgcagtgtgacccttccgccatcgaagtcgatgccggaggtgtggaaagcttggatacggcgggcatggcccttctgctcgaattgaaggctggacaggagcagcggcagcgaggttttcggattcagggcctgcgggacgatctgaccgaactgatgaggcggttcgatccgggcccgcccgcgccgcctaagccagcgccgccgtggctggtccgcgcgatccatcgtgtcggtgagatctcgcatggatcccttgtgggctttcacacgcaggtcgctttcctgggggagattttcgtccgcctgctgagtgttctggttcgcccgcgtcgtctgcgctgggccgatacattcctgatcgccgagaaggcgggagccaatgcggtcggaatcgtcgcattgatgggttttctgatcgggctgatcctggcctttcagtcggccatcggtatgcgcaagttcggcgccgagatctacgtggccgacctcgttgtgctggtgctgtttcgcgagctgggacctttaatcactgcgttcatcctgaccagccgcagcggatcagcctttgcggccgaattgggcacgatgaaggtcaacgaggaggtcgatgcgctggtgacgatgggcgtggaccccgttcagttcctggccttgccccggctggttgccgcgatctgcgtgatgccgctgctgacactgttcaacgagctgttcggtctgatcggctgcgggctggtcatgcgatcgttcggtttccctgtggcggcttacatcgaccagattcaggaggccgccagcctgggcgacctgttcggcgggctggtcaagacctttgtattcggcgctctgatcgccggcattgggtgtctgcgcggtttgcagacgggcaacagccccagcgccgtcggcgattcggcgacccgcgccgtcgtcagcggcatcgtcgccatcgtggttgctgacggcgtgttcgccgtgctgtactactacttgggggtatgacgatggggtccgacgcaccgccgatcattcaggtcagcgacgtgaccgtgggctacgatcatcacatcgtcctgaaggacgtgaccttcgaggtgggcgccggcgaggtcttctgtatcctgggcggttccggctgcggcaagagcacgctgctcaagcacatgatcggactgcatcggccgctgacggggcgcatcctcatcgacgggaccgatatcgtcaccgccgaaggcgaggagcggcgtgcgctgctgggccggatcggtgtggcgtaccagaacggcgcgctgttcggctccatgagcctgatcgagaacatctgcctggtcctggaagagttcacgagcctgccgcgacaggccatgcagacgatcgcccggatgaagatgaaggtggtcgggcttcaggacgccggcgatcgactgccctccgaactcagcggcggcatgcgcaagagggcggccattgcgcgggcgctggccctggacccgaagattctgtttctggacgaaccttcggccggactggacccgatcactgcggcgcagctcgacgacctgattgtcgaactgtcgcagaccctgaagatcacgttcgttatcgtgacgcatgagctggcgagcatcttcgcggtcgccgaccatgtaatcatgctcgacaaggaacggcagacgatcgttgccaggggctcgcccgaagagcttcgtgaccgcagcgacgatccgtgggtgcggcagttcttccatcgagagtcgtcggctgcaggaatcaggaggtaggcatgtttggaaccggtcaacagagagattgggacggatcggcctgatgggaaggaaaccaagctacttcaagatcggcgtctttgtgattctcgcaacggccttgctgctgacggccgtgatcctgttcggttccggcgtgtttgcgaaggacaagctgagattcgagacctatttcgacgagtccatcacagggctgacggtcgggtcaccggtagagtttcgtggtgtgcgcatcggtcaggtcgagaccatcacattcgccggcagtgtgtatgcgatcccgccggacagcggacgattgtccgtcttccagcctatcgtccgcgtcgtctacgcggtgccgcgagagacgatgcccgaactcggcgtcgaaaaggccggtgccatgcttcaaaagatgattgctcgcggcctgcgcgttcgcgtcaattcgaatatcctgacgggccagggctacctggaggccgactatctcgatccgaatcgcttcccgatcctcgaggtgccgtggacgccggtgtacacctacatgccgtcggcgcccagtgagatcacgacgttgaaagactcgctcgaaaagattttcacccggctggaggagattgatttcgaagggctggtggattctttcgagcggaccctggtggccgccgagagggcggtgggggatgcgaatctggcccggatcagcgaggaagccacgagcctgctggcggaaacacgggagaaggtccaggccctcgacgtagcgggcatcaacgacgcgacgcagcgtttgctggcctcgctggagcggaccgtcgcggatgccaacgtgccggaactgagcgccgaactgacgcggtttgttcaggaaatccgcatcacgaacgacggccttcggcgtctgctggcgtcgccgacggggaccgcgggcgggtccaaccttccggaggttgtcgcgcggctgaaccgggtgctgtcgagcatcgaccggctggtgacgaccgagaaaccagagattgaaatcatcatcggcaatttccgggagatttccgacaatctgcgcgacctgaccgacagtctcagggagcgtccttcggagctgatcttcagcaaacccccacgtgaatcggaggcatacaaatgatatgtaaggggacccggccggccctgtttctggccctgaccatgttcgcgcttgtcctgacgggttgcgcgaggccgcagtcggccaacagccgcttctacttgcttcagacgtctcgctcgttgtccccggccgttcgcgaaggcaaggctgttctggcggttccacggttcaccatcgatgcggcgtacgccggcagggggctggtctaccggctcgacgaacatcgatacgaatccgacgcttacaacgagtttcttgtttcaccgaccgtgatgatcacggagaggacacgcgactggttgacccagtcgggtctgttcgcgcaggttctcggctcgggcagcggcgccgagcccacgcatcgaatcgaagccaatattgccgctctctacggtgactttcgcgacaggcgcgcgccgaaggcggtcatggagattcgtttcttcctgctgcggaccgaaagcggcgtagacccggagatcatcctggccaagtcctacgccgcgacggccgacgtggcgaccgccgggccggaagggctggtcgccggtctcgaccgctgccttcagacgatcctgacccagttggagaacgatttggccggtgccgtctgacgctgaaccgttcgaatcagagtcgcacgatctgacaggcgatgtcacttcgcaccaccggcacggcgacactcaatcggtcctggtcgtgtcgaacgcggtgcgtcttgatgcaagtgccctgacttgtatcccaccactgaacggcgtactcgcccggcgaaaagtctgggatttcgagggtcgcaccttcgatctcttgaggtgtctgccccgcgacgaccttccaccacgtggcgtcccggctggacagccacagataggtgcgatccgttccctgatagcccagcacgcgtagacgcgcgtcggacacagttgcgcctgtcgctctcaatccctcgaaggagatgtcccgcaggtatgccgccagcggccgatagtgacggtaggcgtcctgctggtccaattgctcccaccaccagaacatggccgtgcccgacggtccggcgaaggtcgacgcccagagagcattatggaagtgcacgccatcggtgtcttgtctcatgtgctcgctcaggccccacttgtcggtggccaggccgaactcgccgatcagcgccggtttgttcggcgcgtgctctcgcagaaaggccgccttttcgaggatggcctggacttcgtctttgaagtctgcttcgccagggcgcaagtagtggtgcagttgggcgacgtcgagggctgcgaggccacagtcgcgcgccgacggatgccatgtgctggtggtccgcaggtggcggtagatgtcgatttcgtcgaggtagccgcccacctcctcatagaagtggtccgttggcttgcccgggtcgatctcgttgaagtactcccacgcgccgacgctggtcgagtagccccaccgggcgacggcatagcgcatgaactttctggcatccgcgatggctcggtcgtaaggcacattgttcggattgccaagctcattcatgtaaagatcccgcgtcagcaggcaaagcatcagatagatgccgtgtttctcggcggcctggacgatctgatcgaccatgaagcagtcgagcggattgtagtaaccccgcacgggacgattgacatccgcttcccatagcagctccgcgctgtcgtcgctttccttcagcgacagaccggtcagccacgcagtgccttcgcccgaaagtgcaactgtggtgtggcccagccagtactcatcggggccggtggtgaattcttctgcgaagtcctgccaggtggcggtgtgtgccggcacccgccaatcgtgtctgccgacctggattcgcaaaccgtccgctccgtcggccttgaaccttccgcggagtgtgtaccgcgtgtccggccgcagcgccacccggtgcgagggcgaaacctcgatcgaagcgccgtcctggccctgcagttgtacgcacttgccctcggcttcaggcaggggaaccacgggcgattgccggttccatgaacgggtccacgcgctcttgggagcctcgacggcgagggcccagtcatggcaacacgtccaaatgcgcgcgaagttcgcgccgtttcgcgccatctccgcgaagatcgcctcggccttcgggacgttgacatactggctctcgccgatgaaggcgaggttctggccgatggcgaagaagggctggccttcggcgaattcgagaaacctcgggtcctcgcggccgacgcgcaaaaatcccttatttgtggaagggacgcactcgatccggatggtctgcgacagcgattggccctcacggtcgttcaggcgagcccggatcgtgtatgtccccgtctccgtgggtgcgaaccgtgctttccacgtcccttgaccgatcgggtagcaccaggccacggttttgccatcgctggggaaatctcgccgttggtaatcctggccgaaaaaggccggcagaacgagcgcccgcccgctcgggcaatcgatcagcagatcgatcgcaacctcacatgggtcgaagggattgtcgtacgtccgctccggcgtcagtgtcagttcgagcttgtcatacttgccgacatgggccggacaaggcccgatggcgaccagccgcggtgcggcaaggaggctgccggacgccgccagacagcccgcgaacacgtgggtaaaaaccatcctgcatcgcatgcgatgttctccttatgacctgaccattcacgaggcacagcctaccatgccgcgtccgtgcgaggaagcgcccttgcatttgcccggcgaaggccgcatactcagcgtgcggggttcggaggggatggcacgcaggcggcaagccccgattggggcgacggaggtttgcactatggcagatcgattgacaacgcggcggacgtttcttgcggatgcggttctggcgacaggggcgatcgcactttcgccggctcaagttcgtccggcggcgggctccgagggtgagcggatgcacgtcgcctgcaactcgtactcctggaccgtgttctatcagcgtcaagggcgcaatttcgaccagtcgctcgatgaaggtctggccgaggtggctgccagcggtcttgacgggtttgagccgtcgttcggcgacgtcgcacaggtcgagcgtctggcgcctctgctgaagaagcaccgcctcgggatgcggtctttttacgtcaacagcctgctgcatgaggccggccgggccgatgagagcatccggcagatcctcacgattgctccgagggcccgggacgctggagcgcggatcgtcgtgaccaaccccaatccgctcgcctggggcggcgcgcaggacaagaacgacgaacagctcaaggtccaggcggccgcactgaaccggctcggggccgaactgcggaagctcggcctgacgctggcctaccacaatcacaacatggaactgcggcaggccgcacgcgagttccaccacatgatgctcggcaccgatccggccgatgtgacactctgcctcgacgcccactgggtctatcgcggcgcgggcaactcgcaggtcgccctgttcgacatcgtcaagctctacggcaagcgcatccgcgagctgcacctgcggcagtcccagggcggcgtctggaccgagacatttggcgagggcgatatcgattaccgcgccctggccgatgccctgcgccaggagggcgttcgcccgcacatcgtcctggaacaggcgatcgaaaacggctcgcccaacaccatgccgcccctggaagcgttcaccagaagcaccgagtacgtccgccggctctttgcgggcctgggcgaaaaagcttgaacccagacgcacgttccgataaaatggccgcagtgaatcaaggttcgaaggccggccggaattgaccatcatatccgtgcttgtcgctatcatattattgtcgcatatcatcgcaccggcaccttcggagaccttgcggagatagctcagcgtggcttgagggattttcggggcacgggcggcggttccacaaactatggcggcgaacgatgattcgcccgcactatcagccaaaggtacgccccctgtctggtcgaagagaaggcaggtgctggatttacggttattatccattcattcatcccaatctaaggagcggcacaatggcacggagaatcaggtttgcagggtttctggtcctggggctggtggcggcagtcgcccgggcggggaccgtcgatgtgatgatggtcgtccccaagacgttgtacagtggcgcctcgacctcggcgacgatcacggtggtcagcgcacgccagtcgtcggcagggatcggcgtgagtctgcgcctcaaggcccatgaagggaacgtagacctcgccgccgggcagaccgatgaggcagggcggttcgtcgcccgattcgacacgcccaacttggcggatggctcctatatcctggaggcacacgtcgatggcgccgaggagactctgacaactcagatcatgatccggcggatgcccgtggtgttgatcgaaacggacaagccaatctacaagccgggccagacgatccagggccgcgtgctggtgctgacgaacgagcttcgtccgagcgcctccgacgtgaccgtgcagatcaccgacggcaagggcgtcaaaatcttccgcaaggacctcacgacgaacgccttcggtgtcgcgccgttcaacctcgatctggccagcgagctgaactacggcacgtggaagatcaccgccgaatcgggggccggccggggaaccatcgacctgcgagtcgaggagtacgtgctgccgcgattcgaggtcaagctcgacacgccacgggattacttccgcaccgacgagagaatccccgggaccgtcacggcgacgtatttcttcggcaagcccgtcgacggcgaggttcagatcagcgccagtcgctacgtcggtgtctgggaggaatacgctcgctacacggcgccgctgacggaagggcgggcggagttctcgctgcccgaggtcaagtacgtcagcgggaccacgggagccggcggtgcgggcagcgtgcagctcgacgtgaccgtcaccgacacgtcggatcaccaggagaagacgaccaagctgctgaagatcgtctcgtcgggaatcgagcaccggctgatcgcctcgtctcggtcgttcacgcccgcgcaatcgtatgacgttttggtggtggccgagacgcccgacggtgtgcccgtctccgtgacaggacagttgatcggcgagtactacgccgaatcgggtgagatgatctccaaggaggcccattcgctggcgttcgaaggctcgacctcgatcaccctgagggcgccgcagaaggcttcctgggccacactgaagagcgaggttcgaggcgatggcgaaagcgggcaggcggagttgtacgtctatgcgacatactcgcccagcgacagcttccttcatctgagtcgcgaatccaccggcgccgtcggcatgggtgacacagtcacgatcgatgtgtttcgcacgcacgatgcaaccatctactacgatgtctttgcgaacggccataccgtctggtcggacgcggtgaccggctcggcgatccggttccaggcgacgcagcagatggtgccggccgcccgggtggtggcgtacgtgatcaacccgaacaacgagatttccgccgccacgatcgagttcgaggtgacgatggaccacgcagccagcctggccctgggagtcagtgccgaagaggtcgggccgggtgagccggttcgcgtctcggttcgttcggagggtcagtcgatggtcggcctggccatcgtcgacgagtcggtctatgcgctgaacgaaggccggctcaacatgcaggaggtgttcggcgagctggaacagcggttcatggagccgcaggcggaaacgcacgaccagccgtacagctatggcgcccgcaacatatttgaggacgccgggcttgccgtggtgacttcgcgcgggctggatgttcccgagggccggcgaatcaacgggctgtggtggattggtccggtcgtccgaaggggtggcgccgacgatgttgccgagaacgccggcaaaggagatgggttggcggaggtcgatcgggtccgccagttcttccctgagacgtgggtgtggatgccggatctgctcaccgagcccaatgggaccgcgatgctggacctgacggcgccggacagcatcacgacgtggcggcttcatgcggtgtccacgagcgacaacgggcttggcgtgacggagtcgtcagtccgcgtgttccaggagttctttggcgagcccgatctgccgtatgcggtgacgcggggcgagcaattcccggtccgggtccaggtgttcaactacctcgacgaacctcaggtggtctatgtggagatggcggacgccgactggttcaacctgctcgacatcagcgaacagcaggtgcaggtaaatgcaaattccgtgtcgtctgtttcgtttgtcattgagccgacgaagctcggacatcatccgctggaggtccgtctgcgttcggtccggcgggccgatgccgtgcgcaaggaagtgctcgtggagccggaaggcacccggcgtgagctggtcaccaacggcgcgatccgagcgggcgagacggtggtcctcgacgcgaatacgccggaattcgccgtgcccgattcgcagaagattctcctgagcatcacgcccagcctggttgcccagagcatcaacggtgtggatgacctgctcggaatgccctacggctgcggcgagcagaacatgatcttcttcgccccggacgtggagattctgcgctatctcaacgcgaccggccagctcacgcccgaggtgcgggccaaggccgagcacttcatcacggtgggctaccagcgagaactgacattccgccatcaggacggttcgttctccgccttcggccagagcgatgccgagggcagcctctggctgacggcattcgtgctcggcacgttcagcgccgcgcgtgaggtgacgacgatcgacgagacgattctggccgaggcggccgcgtggatcgcctcgcaccaggcatccgacggatcgtggccgccggtggggttcgtatgccacagtgaaatggtcggcggggtgcaggggacgtacgcgctgaccgcgttcgtgtcgattgcgatggcggattacggtatggccgatccgcacgtgcagggagcggcgacgcaatatctgcgtgacaacctcgcgtcggtccgggacgatgcgtatgccctagcaattgcggcgctggccttcgcgcgggtaggtgatccggccgccgacgcggcgctcgaacggctgctggcgatcgccgtcaccgatgccgacggtctgcactggcaacctcacccggtggagacaaccgcctacgcggcgctggcgatgatcgagaaggaatggccgcaggcgaacgaagcggtcaagtggctttcgctccagcgtaacagcctgggcggctacggcagtacgcaggatacggtcatggggctgaaggccctgatgatggcggcccgcagtcagagccgcaacgtggaccttacggtgaccgccaaggcgcggggcggggaaacgctggcgcagttcaccgtgaacagcaccaacttcgacgtccttcagacggcggagctgccgctcgaatcggccgtcgaaatcagcgctgtcggctcggggcaggtgcgattccaactggttcgacggttcaacgttctgctgcgtgacgatccggtccagaaggacatgaccctggaggtgatgtacgacgccgaccacgtggaggtcgatgatatcgtcaacgtcaccgcgacggtgcggtacctcgggccaaaggactcgacaggaatgatgatcgtggatgtcggtgtgcctacaggcttcgccgctgtcgccgagtcgctcgatgcgctgcttgccgacaatctcgtcacgcggtacgaggtggccggacgcaaggtgatcttctatctcgacggcctggaacgcggcgaacaacggaccctgcacttccaagtcaaggcccgcttcccggtgcgcgcgacaattcccgacagccaggcatactcctactacgaaccacaggtgcgtgccgaggctggcggcaatgagatcaccatcgagccggccccgcagcagtaagcgaggaccgtggcgtcaagtccaggcgtactgctgcgggttgctcgcggccctacccggcccgatgccgggcggacaatatcgcatcgcccctcatgtgccgagctttagagcgttcggcgtcggcgcagccagctcaccgcactgacaccgatgccggccaagagcagggctcccggcgccggaattggtggcgtcgtgctgcagatcttcgcccagagcgggagcggaggacaggtggtacggcattcttccgtgctaagcgacgagatgatgctgctggggcaactgccgaaacccagcacgcacaactcgtagtccgcgcccccgacctcaaacgcgatgggatcgaacgacgtcggcagcgtgatgacatccgcaggatggccacccgggccgaccgtttccgtaacgcccagcgtcagggacgtgttgaccggcgtcccctcaaagtccatcgccaggtccagatcgaccgccgtgatgccggtgccgacgactatgggcgtattgtaatggcgcagcgcgcccacgacaaagggcgtatcgagcaccacgtcggtgggcgtcgcgacgggtgtgaagcccaagctgctcttgagaccaaacagataggccggagtgccccaggatatgagctgttcgcccatcaaagaagaccagtaggcaggggcaggggccaaggactgaagtacaggatcgctccaggtgccgctggcgctggaaagcgtcagcgcaccactggcggtgccgacgacggcgagcagcgccagcgccggcagtattgcaggtaaccgtctcatcttgtgtctccttacactccgtgtgtgactctgtggaaaccgtcagcttaccttgtatccgtggaacccccaggcacctcctttctccgggtttctcccacccatccgtacatctcccctttactccgtccggacaaacctcgcccgcacggattttactcatccagacactctctatgtccacatagcgtctgcgtgtagctattccgcgtgagcagaaccacacgtgtattcatcaccgccccatccgggttaaatatacgcgcaatatgggacgccctgcaagcaattccacggaggaaaatgcttattttgatgtgggaagattgggggacatgggaagactgtcggtgacattggtttcttttcgagattccgtgtcccatcggatgatgaggcgccgcacaggatcgggtcagcgtcgggtggaccagcgggccgaccggctggccgatccggactcacagaggttgccgaccacggcgcgcacggtgttgcggagaattgagagaaacccagcgacttacgactgcatcgacgcgagcacgtcttcgagtgacaatgcggcgcagcagaccgttgtgtcggaggcgccatagtagaccttcaaagtcgtctgttcgacgagcaggccgcaggtgaagaccacggggccgaagaagccggagcactcgtattcggtctgcggctcgagaatcggccgcgctgagcgggcccgcaccatccagggctggcgggcgtcgagcaggacggcgccgaggcagtaacgatggttgcggtcggcgccgtggtaaatctccagccacccctcgtcgaggcggacgggcggtgcgccggccccgatgcgggcctcgtcccagaatccgtcgcgcagccccatcaagtggcgatggcggccccagcagagcaaatcgggcgattcggcgatccacatgttgttggtgtgacaaagcggcgagtgcggccgatgcaatgcgtagtatcgtccgtcgaccgtctcggggaagaggacgacgtccttgttttccgggccgaagataacgccgtgacgttcgaaggtcgcgaaatcacacgtcgacgccagcgccgtggtcacccccagcggcgagaccgcgacgtagctgatgtaatacgtctggccgatccgcgtgatgcgcgggtcctcgacaccgaagctctcccaggggtcggccggaccaagggtgggatgctcatcgatggtgaagcggataccgtctttgcttctcgccacgcgcagatgcgatattgaggtcaggtatgtcctgccccggcgcacgatcaaccgaggatcggagaaatcgttggccgggtcgggtcgagtgaacgccttggtgacgatccggccgcaggccgggtcgagaaacgcggtctgcaccacctccgggtcagtctggatcggacgctcggctacgcgcaccagcaggacgatttcctcgccaaggcgggccaccgcgggattgaagacgccgaggacctcgaaatcgccacgcgacggcgttacgtcctgtggggtgaggatcggattggctggatcgcgaaatgctgccatggcgacattctcccgaactctgtcggcggccttggcgtcaaggccacgattgcatagcgaatcgtaaccggtcggatcgtatccggcaaggcgtcggctcgatctcgacgaggtcggcggtgtagacttggcggcccggcggggcaaataacgttgattttcaggccgcgaatggtagaatacagtctgatgcgcatgtgcgaatatgccttcacggcgggcggagtcgcgaggtcattggggatcgacgacggtcccggattctggaacaccagcgtacttgcacgcctgtcaccgcttggattgtcgggagtgaggaatgagtgtgacgcgtgaatcccgtcgggccgctcgtcttgtgctggcttcgtttcttctgagtgtcggtcctgtctcggcgaccccggcaggccggggggcgggtctgccgctggcgatcaatgagctgatggcggccaacagcagtgtcaaggccgacccccaaggccagtacgacgactgggtcgagatccataattacagcgatgcgccgatcgacctggcccgcatgtacctgacggacgatccgggcgaaccgacaaaatggcagttcccaggcggtgcctcgcagccggccaccgttccggcggggggatatctcatcgtctggctcgacggccccacaagcgacagcgggctgcatgcgtcgtttgcgctcgattccgacggggacaccctggcactgtttgcccccgatgggaccacgctcatcgacagcgttgcattcgaagaacagaggaccgacatctcctatggccgctcgcccgacggcaccgggccgtacggcttcctgctgacgcccacgcccggctcgcgcaacagcggcctgtacgacggtctcgtcgccgatacgaagttcagccatgaccgcggtttctacgatatgccgtttgacgtgacgatcacgtgcgagacgcccggcgcgaccatctactacaccctcgacggcagcgcgccgtattcgcaggctcggcaggttcctgccggcagtgtctacaacggcccgatccggatcaccaggaccacgtgcctgcgggcccaggcggtcaagccgcagtgcgtacccagcaacgcggacacgcacacgtacatcttcctggccgatgcggcgaggcgctcgcagtccgaggtgctggcacgtggctatccgagcacgtggttcggctcctacccggccgactacgagatggaccccgagatctacaacagccccgcatatgccgacgtcatggacgatgcgctgctggcgattccgacgttgtctctggtgaccgacagggaccatttgttcagcaagaccaatgatgcgcagaccggcggcatctacatctacaccgggcacagcagcacgggcggccaggattgggaacggcccgtgtccgccgagctgttcagcatcgacggcgccaaggaatttcagatcgactgcggcctgcgcatccagggcggcgaaagccgcaacccgcccaagtgtcccaagcacagtttcagcctccgctttcgcgacgtctacggctcgtcgaagctccggttcccgttgttcgacggcagccccgtggaaacgttcgattcgcttcaactgcgcggcttctttaacaacgcctggacgcactgggatcccggccagcgccagcgggcgcagtacattcgcgaccagtggatgcgcgactcgttgctcgagatggggcaggccgacgccggacgcgggttctacgtgcacttgtacctcaacgggatttactggggcctgtatctggtccaggagcggccggtcgcctcgcactacgccgcctacaacggaggcgacccggatcgactcgattcgattaacggaggacgcgacgcccacgacgtcaccccccagacctggcaacaggccaggagcatcgccgccggcggcgattgggcccggatctgccaggtcatcgacatcgacaacttcatcgacttcacgctcctgaacctgttcgccggcaaccaggatctcaagaccgacggaaactggcgcgccgccggaggcggcgccgacaacaagccctggcgcttctatagctgggacggcgaacgagttcttgagaaggcgaccgagaccgtgataagggatacgttggacccgaccggcctgtatcgccccctttcgcaaatcgaggaattccgcgttcgcttcggtgatcgcgtgcacaagcatctgttcaacggcggcgccctgacgaccgagcgcaacatcgcgcgatggacccgacgggccgacgagatcgacgccgctgtcatcgccgagtcggcccgctggggcgactatcgccgggatgtgcattcctacagttcgggcccctattacctgtacacccgcaacgatttctggatcgtggaacgtcagaatctgctcgacaactatttccctcgccgcaacgaggtggcactgtcgcagttcaaagccctggggctctacccgagcgtggaggcgccggtcttccatatcgacggtgtctatcagcacggcggccacatcgccgagggctcacggctcacaatgacttccaacgccgcaacggtctggtacacgctcgacggcagcgatccgcggcgccccggcgtcagcggcagcacgggcgctgagctggtcctcgtgccggaagcggcggccaagcgcgcgttcgtccccaccacggatatcggcagcgcctggcgcagcgaggtggatttcgacgattccgcctggatcgccggctccggcggcgtcggctacgaacgcagcaccggctacgaggcgttcttcgacatcgacgtccaggcccagatgtacaaccgcaacgagagctgctacatccgcattccgttcgacgtcacacccgaggggttgcaatacgccggcggcctgacgctcaaggcgcggtacgacgacggtttcatcgcttacctcaacggcgtcgaagtccagcgcgtcatgttcgaggggacgcccgcctggaactccggcgccaccgacaaccactccgacctcgacgcggtcgagttcgagcggttcgacctctccggccatatcagccggcttcgcctgggacgcaacctcctggcgatccaggggctcaacgcaggtgccaacagttccgacttcctgatctcggttgagctggtcgcgtcgcaggggggcgcggacgttccagccggtgtcgcgccgacggcggtccgctacgccggcccgatccggctcgatgccagcgcgatggtccgcgcccgtgcccagagcggcagcacctggagcgcgctgaacgaggcggtctacgccgtcggtccggtggccgagagcctgcggatcagcgagatcatgtatcatcctgtcgatccgaacaccgaatacgtcgagttgctcaacatcggctctcagccggttaatctccatctggtgcgcttcacgaatgggatcgacttcaccttcggcgacgtcactctcgacccgggtgcatatgccctcgttgtcaaagacatcggggcgttcgaggcgcggtatggggaccagtcgcccgtcgtcggccagtacgccggcagcctgaacaatgcgggggaaagcatcgagttgcaggatgccgccggccagatgatcctcgccttccggtacaaggacggatggtacgacctcaccgatggggctggctactcgctgacggtgattgaccccctgaccgccgattcggccaccctcgacaagaagggcgcctggcgtgccagcgccgaggtcggcggctcgcccggctacaatgactgaacagagactcgaaacacgaaatccgaaacaagcccgaaatccgcaagctaaaatgaacgaaatgctgacgctgtgccgaaccccgtttcgaattcgcagtttggtgccttcggatctatttcggatttcgtgtttcggatttcggatttaacgcaacgccgtcacttcttcggataggcgtagtaaaacgtctcggcacgggagaaggcctcgacgtgcccgtcgaggaacgcgcagttgccgcgtccgcccagcttgtcgcccgaaggggcgtggtggaaacccgcgatcacatcccagaattgcccgaccccctcgggacccgggatgatgcgacgcaggtcgcctccggtctggctgaaccaactcttgaccatcgtatcgctgccgggggccatgaacgtgtcattgagcccggacatgttgtaggccgtatcgacgatcgcgctctcctctgcgaacgaaaacgtcgtcgcaggatgcttgacgtccgtgtccttgagaacgcgggtctcctgaacgtcactgcgggcgctgcccagataggcgttcatcgtgtagttgtaccagggttcgtagttcttgacgttcttgccataggcgaggaagaactggtcgtcgctgtggcgcactgcgaggttcttgaaggttgggcagatgaatgccctggcatcgccgaggtaccgggccatcatccctccgtactccgggtgactcttcaactcgatgtcgccgttgcaccagcgcagatgcaggtactcggaaatgcctgcctcgacggggtagggtgttagttggctgaagtagcatctctgtggttccgcgaacctgcggtcgttgtcgtcgaggtacatcgccatcgcgatggtatagttcttcaggttgcccttgcaggcggcgccctgggccagctcacgggccttgcctagcgccggtatcaggatccccatgagcacggcgatgacggcgatgacgaccagcagctcgatcagtgtgaatgccttcgacttccgcatgacatggtcctccacgttctcgggaagcgcttacccagacctatcgtctcggcccacccgtctccgggcgcacccggcagggcatgccagtcagggtgcctgatcgcgttgcatcgcggcatttaccattctatcgacagaggttgccgtctgcaagagatatcggtatccgccggccgcccatcatccgtctatggggcggggatcaggcggacgagggccacgccgtgacgcgatacgttggcggcgaagcggctgtcgtacgtgcccaggtccttctgccgccaaaggtcccgcacgaggcgcttgcccgacaggcccagtagcggccagtcgaccgacatctcgcgaggcaattcggccaggttgaacaggcccaccgccagcgagccgtcggccatcgccttggccataatcagagtctcgtcgtcctgcaccagcggcctggcctggatgcccagcgggtcctgatcgacgtcgatcacctcggcattgcatagtacgttgagggtgaattcgtcgagatagcgcatgtcgcccgagtagaacagcggggcggccatcaggcaccacatcgacatgtagctgtactgctcgcttggcgtcagtggggtgggtttgggcggctcatcatgctgataggcgttgccgatgtgcccgatcaggatgtagtcggggtcgttccactgtccgggccgggcgtactcaaagtgccgggcgttgctcaggccgatccggtagaagccgggcagcaggccgccttgttcgaggcccaggtcgcccgtggtgcgccagcagtgcccgccgacctcgccaccccaggtccagacgttgcccatgccgtactggcacaggttcaggatgatgtcccggtcgagactcttgaggatgtcgcccatcaactgatatgggcgcttcaggtgctccaggtctgtgccgccggcgacctcactgtacgagcaccagtcgtgcttgaggaaatcgaaaccccgctcggcgaacttctccgcgtccacccgttcgtgttcgtagctggcgacgtacccggcgcacgtccagggtcccggccctgtgtagaggcctgccttgagacctttgctgtggatgtgatcgaccatgcccttgatgtcggggaacttggcgttgggcaggatcgcgcctttcgcgtcgcggtagggctcatcgccgcgcctcttcatccagcagtcgtcgatgttgacgtagctgtacccgtagtcggccatgccggagctgatcatgacgtcggcggcgtttcgcatgtgctcttcggtgacgtgataatagtggatgtaccaactgttccagcccatcggcggcgtcagcgcgagcgtgtcgccgacgatgatcgcgaaggtgcggcggtcgctgccgtggtcgtttttcgcttcgagtgtcacgacgtactcgcctcgcggcgtgggcacggtccccgtgatgattcccgtgctcgcgtcgagccgcagcgtctcgggcagcccggcggcgccaaacgcgatcggccgcgtccccgtgcaggggatgcggtagaggaacggatgtcccggtcggcagccgtagaccttcggcccattgatctgcggcgccgggcccggcttgggcgtcagcagcaccttctcctcggcagggggccgtggtgcgtcgacggtcgtcggcttgtcaccccccacgatgaactcggcgcccgcccagttggcgtggtcgtaatcgatgccgtcgccgccggaactgaccagcaggatcatctgcgtcacgccagccagcgagacgtcgacacgcttggcttcgtcgttgccggtcatcaggccgctgtcgaacagcaccttgccgtcgccatagaccttgaaccggaccgagccgcgaggcccggtggcgtcgtcgacgcccacccaggcgctgaaccgctcggttttgccgtccagggcgatgtagcagatcgattcggcgtgtgtcgccacgcccgtttcgaacgagcgcccgccgatcgacagcgttcgggcggtgatgctcttgttgacctggggcttgccccacccggtggacatcttcgtcaggtccagctcgcccagcggcaccgttgcgcccgaggcgactaccgcgccgagacagatcagagaacacaccggaatccatcgctgccttacgctcgaacgcatgttcacctcccgttgcctgagccccgtgtttgccgcagccacgatcgggccgcccccgaatcctaccacgatcctgtcgcggcatcaatggcggggcgagcggttcgctcacgttttcgccggcgtctttgtgcttctgtgcgttgccatgtgagcgcacaacaaaggggccggcgtcactgggacgcaggcccctgatcatggacattcgactgtggcgaaccttggcaagggttcactacggcgcgacggtgccgaggaactccacttccgcgatctgcatgttgccatcgctgttggcccgaagggtcgggaacaggatctgatagtacctgtaggcaaccgtgttggcgaactcgatcggggtg

SEQ ID NO: 980 - DNA, 103547 bp, Artificial Sequence
  Synthetic Oligonucleotide
  misc_feature (1)..(72844): n is a, c, g, or t
nnnnnnnnnnnnnnnnnnnnnnnnnnnnnnnnnnnnnnnnnnnnnnnnnnnnnnnnnnnnnnnnnnnnnnnnnnnnnnnnnnnnnnnnnnnnnnnnnnnnnnnnnnnnnnnnnnnnnnnnnnnnnnnnnnnnnnnnnnnnnnnnnnnnnnnnnnnnnnnnnnnnnnnnnnnnnnnnnnnnnnnnnnnnnnnnnnnnnnnnnnnnnnnnnnnnnnnnnnnnnnnnnnnnnnnnnnnnnnnnnnnnnnnnnnnnnnnnnnnnnnnnnnnnnnnnnnnnnnnnnnnnnnnnnnnnnnnnnnnnnnnnnnnnnnnnnnnnnnnnnnnnnnnnnnnnnnnnnnnnnnnnnnnnnnnnnnnnnnnnnnnnnnnnnnnnnnnnnnnnnnnnnnnnnnnnnnnnnnnnnnnnnnnnnnnnnnnnnnnnnnnnnnnnnnnnnnnnnnnnnnnnnnnnnnnnnnnnnnnnnnnnnnnnnnnnnnnnnnnnnnnnnnnnnnnnnnnnnnnnnnnnnnnnnnnnnnnnnnnnnnnnnnnnnnnnnnnnnnnnnnnnnnnnnnnnnnnnnnnnnnnnnnnnnnnnnnnnnnnnnnnnnnnnnnnnnnnnnnnnnnnnnnnnnnnnnnnnnnnnnnnnnnnnnnnnnnnnnnnnnnnnnnnnnnnnnnnnnnnnnnnnnnnnnnnnnnnnnnnnnnnnnnnnnnnnnnnnnnnnnnnnnnnnnnnnnnnnnnnnnnnnnnnnnnnnnnnnnnnnnnnnnnnnnnnnnnnnnnnnnnnnnnnnnnnnnnnnnnnnnnnnnnnnnnnnnnnnnnnnnnnnnnnnnnnnnnnnnnnnnnnnnnnnnnnnnnnnnnnnnnnnnnnnnnnnnnnnnnnnnnnnnnnnnnnnnnnnnnnnnnnnnnnnnnnnnnnnnnnnnnnnnnnnnnnnnnnnnnnnnnnnnnnnnnnnnnnnnnnnnnnnnnnnnnnnnnnnnnnnnnnnnnnnnnnnnnnnnnnnnnnnnnnnnnnnnnnnnnnnnnnnnnnnnnnnnnnnnnnnnnnnnnnnnnnnnnnnnnnnnnnnnnnnnnnnnnnnnnnnnnnnnnnnnnnnnnnnnnnnnnnnnnnnnnnnnnnnnnnnnnnnnnnnnnnnnnnnnnnnnnnnnnnnnnnnnnnnnnnnnnnnnnnnnnnnnnnnnnnnnnnnnnnnnnnnnnnnnnnnnnnnnnnnnnnnnnnnnnnnnnnnnnnnnnnnnnnnnnnnnnnnnnnnnnnnnnnnnnnnnnnnnnnnnnnnnnnnnnnnnnnnnnnnnnnnnnnnnnnnnnnnnnnnnnnnnnnnnnnnnnnnnnnnnnnnnnnnnnnnnnnnnnnnnnnnnnnnnnnnnnnnnnnnnnnnnnnnnnnnnnnnnnnnnnnnnnnnnnnnnnnnnnnnnnnnnnnnnnnnnnnnnnnnnnnnnnnnnnnnnnnnnnnnnnnnnnnnnnnnnnnnnnnnnnnnnnnnnnnnnnnnnnnnnnnnnnnnnnnnnnnnnnnnnnnnnnnnnnnnnnnnnnnnnnnnnnnnnnnnnnnnnnnnnnnnnnnnnnnnnnnnnnnnnnnnnnnnnnnnnnnnnnnnnnnnnnnnnnnnnnnnnnnnnnnnnnnnnnnnnnnnnnnnnnnnnnnnnnnnnnnnnnnnnnnnnnnnnnnnnnnnnnnnnnnnnnnnnnnnnnnnnnnnnnnnnnnnnnnnnnnnnnnnnnnnnnnnnnnnnnnnnnnnnnnnnnnnnnnnnnnnnnnnnnnnnnnnnnnnnnnnnnnnnnnnnnnnnnnnnnnnnnnnnnnnnnnnnnnnnnnnnnnnnnnnnnnnnnnnnnnnnnnnnnnnnnnnnnnnnnnnnnnnnnnnnnnnnnnnnnnnnnnnnnnnnnnnnnnnnnnnnnnnnnnnnnnnnnnnnnnnnnnnnnnnnnnnnnnnnnnnnnnnnnnnnnnnnnnnnnnnnnnnnnnnnnnnnnnnnnnnnnnnnnnnnnnnnnnnnnnnnnnnnnnnnnnnnnnnnnnnnnnnnnnnnnnnnnnnnnnnnnnnnnnnnnnnnnnnnnnnnnnnnnnnnnnnnnnnnnnnnnnnnnnnnnnnnnnnnnnnnnnnnnnnnnnnnnnnnnnnnnnnnnnnnnnnnnnnnnnnnnnnnnnnnnnnnnnnnnnnnnnnnnnnnnnnnnnnnnnnnnnnnnnnnnnnnnnnnnnnnnnnnnnnnnnnnnnnnnnnnnnnnnnnnnnnnnnnnnnnnnnnnnnnnnnnnnnnnnnnnnnnnnnnnnnnnnnnnnnnnnnnnnnnnnnnnnnnnnnnnnnnnnnnnnnnnnnnnnnnnnnnnnnnnnnnnnnnnnnnnnnnnnnnnnnnnnnnnnnnnnnnnnnnnnnnnnnnnnnnnnnnnnnnnnnnnnnnnnnnnnnnnnnnnnnnnnnnnnnnnnnnnnnnnnnnnnnnnnnnnnnnnnnnnnnnnnnnnnnnnnnnnnnnnnnnnnnnnnnnnnnnnnnnnnnnnnnnnnnnnnnnnnnnnnnnnnnnnnnnnnnnnnnnnnnnnnnnnnnnnnnnnnnnnnnnnnnnnnnnnnnnnnnnnnnnnnnnnnnnnnnnnnnnnnnnnnnnnnnnnnnnnnnnnnnnnnnnnnnnnnnnnnnnnnnnnnnnnnnnnnnnnnnnnnnnnnnnnnnnnnnnnnnnnnnnnnnnnnnnnnnnnnnnnnnnnnnnnnnnnnnnnnnnnnnnnnnnnnnnnnnnnnnnnnnnnnnnnnnnnnnnnnnnnnnnnnnnnnnnnnnnnnnnnnnnnnnnnnnnnnnnnnnnnnnnnnnnnnnnnnnnnnnnnnnnnnnnnnnnnnnnnnnnnnnnnnnnnnnnnnnnnnnnnnnnnnnnnnnnnnnnnnnnnnnnnnnnnnnnnnnnnnnnnnnnnnnnnnnnnnnnnnnnnnnnnnnnnnnnnnnnnnnnnnnnnnnnnnnnnnnnnnnnnnnnnnnnnnnnnnnnnnnnnnnnnnnnnnnnnnnnnnnnnnnnnnnnnnnnnnnnnnnnnnnnnnnnnnnnnnnnnnnnnnnnnnnnnnnnnnnnnnnnnnnnnnnnnnnnnnnnnnnnnnnnnnnnnnnnnnnnnnnnnnnnnnnnnnnnnnnnnnnnnnnnnnnnnnnnnnnnnnnnnnnnnnnnnnnnnnnnnnnnnnnnnnnnnnnnnnnnnnnnnnnnnnnnnnnnnnnnnnnnnnnnnnnnnnnnnnnnnnnnnnnnnnnnnnnnnnnnnnnnnnnnnnnnnnnnnnnnnnnnnnnnnnnnnnnnnnnnnnnnnnnnnnnnnnnnnnnnnnnnnnnnnnnnnnnnnnnnnnnnnnnnnnnnnnnnnnnnnnnnnnnnnnnnnnnnnnnnnnnnnnnnnnnnnnnnnnnnnnnnnnnnnnnnnnnnnnnnnnnnnnnnnnnnnnnnnnnnnnnnnnnnnnnnnnnnnnnnnnnnnnnnnnnnnnnnnnnnnnnnnnnnnnnnnnnnnnnnnnnnnnnnnnnnnnnnnnnnnnnnnnnnnnnnnnnnnnnnnnnnnnnnnnnnnnnnnnnnnnnnnnnnnnnnnnnnnnnnnnnnnnnnnnnnnnnnnnnnnnnnnnnnnnnnnnnnnnnnnnnnnnnnnnnnnnnnnnnnnnnnnnnnnnnnnnnnnnnnnnnnnnnnnnnnnnnnnnnnnnnnnnnnnnnnnnnnnnnnnnnnnnnnnnnnnnnnnnnnnnnnnnnnnnnnnnnnnnnnnnnnnnnnnnnnnnnnnnnnnnnnnnnnnnnnnnnnnnnnnnnnnnnnnnnnnnnnnnnnnnnnnnnnnnnnnnnnnnnnnnnnnnnnnnnnnnnnnnnnnnnnnnnnnnnnnnnnnnnnnnnnnnnnnnnnnnnnnnnnnnnnnnnnnnnnnnnnnnnnnnnnnnnnnnnnnnnnnnnnnnnnnnnnnnnnnnnnnnnnnnnnnnnnnnnnnnnnnnnnnnnnnnnnnnnnnnnnnnnnnnnnnnnnnnnnnnnnnnnnnnnnnnnnnnnnnnnnnnnnnnnnnnnnnnnnnnnnnnnnnnnnnnnnnnnnnnnnnnnnnnnnnnnnnnnnnnnnnnnnnnnnnnnnnnnnnnnnnnnnnnnnnnnnnnnnnnnnnnnnnnnnnnnnnnnnnnnnnnnnnnnnnnnnnnnnnnnnnnnnnnnnnnnnnnnnnnnnnnnnnnnnnnnnnnnnnnnnnnnnnnnnnnnnnnnnnnnnnnnnnnnnnnnnnnnnnnnnnnnnnnnnnnnnnnnnnnnnnnnnnnnnnnnnnnnnnnnnnnnnnnnnnnnnnnnnnnnnnnnnnnnnnnnnnnnnnnnnnnnnnnnnnnnnnnnnnnnnnnnnnnnnnnnnnnnnnnnnnnnnnnnnnnnnnnnnnnnnnnnnnnnnnnnnnnnnnnnnnnnnnnnnnnnnnnnnnnnnnnnnnnnnnnnnnnnnnnnnnnnnnnnnnnnnnnnnnnnnnnnnnnnnnnnnnnnnnnnnnnnnnnnnnnnnnnnnnnnnnnnnnnnnnnnnnnnnnnnnnnnnnnnnnnnnnnnnnnnnnnnnnnnnnnnnnnnnnnnnnnnnnnnnnnnnnnnnnnnnnnnnnnnnnnnnnnnnnnnnnnnnnnnnnnnnnnnnnnnnnnnnnnnnnnnnnnnnnnnnnnnnnnnnnnnnnnnnnnnnnnnnnnnnnnnnnnnnnnnnnnnnnnnnnnnnnnnnnnnnnnnnnnnnnnnnnnnnnnnnnnnnnnnnnnnnnnnnnnnnnnnnnnnnnnnnnnnnnnnnnnnnnnnnnnnnnnnnnnnnnnnnnnnnnnnnnnnnnnnnnnnnnnnnnnnnnnnnnnnnnnnnnnnnnnnnnnnnnnnnnnnnnnnnnnnnnnnnnnnnnnnnnnnnnnnnnnnnnnnnnnnnnnnnnnnnnnnnnnnnnnnnnnnnnnnnnnnnnnnnnnnnnnnnnnnnnnnnnnnnnnnnnnnnnnnnnnnnnnnnnnnnnnnnnnnnnnnnnnnnnnnnnnnnnnnnnnnnnnnnnnnnnnnnnnnnnnnnnnnnnnnnnnnnnnnnnnnnnnnnnnnnnnnnnnnnnnnnnnnnnnnnnnnnnnnnnnnnnnnnnnnnnnnnnnnnnnnnnnnnnnnnnnnnnnnnnnnnnnnnnnnnnnnnnnnnnnnnnnnnnnnnnnnnnnnnnnnnnnnnnnnnnnnnnnnnnnnnnnnnnnnnnnnnnnnnnnnnnnnnnnnnnnnnnnnnnnnnnnnnnnnnnnnnnnnnnnnnnnnnnnnnnnnnnnnnnnnnnnnnnnnnnnnnnnnnnnnnnnnnnnnnnnnnnnnnnnnnnnnnnnnnnnnnnnnnnnnnnnnnnnnnnnnnnnnnnnnnnnnnnnnnnnnnnnnnnnnnnnnnnnnnnnnnnnnnnnnnnnnnnnnnnnnnnnnnnnnnnnnnnnnnnnnnnnnnnnnnnnnnnnnnnnnnnnnnnnnnnnnnnnnnnnnnnnnnnnnnnnnnnnnnnnnnnnnnnnnnnnnnnnnnnnnnnnnnnnnnnnnnnnnnnnnnnnnnnnnnnnnnnnnnnnnnnnnnnnnnnnnnnnnnnnnnnnnnnnnnnnnnnnnnnnnnnnnnnnnnnnnnnnnnnnnnnnnnnnnnnnnnnnnnnnnnnnnnnnnnnnnnnnnnnnnnnnnnnnnnnnnnnnnnnnnnnnnnnnnnnnnnnnnnnnnnnnnnnnnnnnnnnnnnnnnnnnnnnnnnnnnnnnnnnnnnnnnnnnnnnnnnnnnnnnnnnnnnnnnnnnnnnnnnnnnnnnnnnnnnnnnnnnnnnnnnnnnnnnnnnnnnnnnnnnnnnnnnnnnnnnnnnnnnnnnnnnnnnnnnnnnnnnnnnnnnnnnnnnnnnnnnnnnnnnnnnnnnnnnnnnnnnnnnnnnnnnnnnnnnnnnnnnnnnnnnnnnnnnnnnnnnnnnnnnnnnnnnnnnnnnnnnnnnnnnnnnnnnnnnnnnnnnnnnnnnnnnnnnnnnnnnnnnnnnnnnnnnnnnnnnnnnnnnnnnnnnnnnnnnnnnnnnnnnnnnnnnnnnnnnnnnnnnnnnnnnnnnnnnnnnnnnnnnnnnnnnnnnnnnnnnnnnnnnnnnnnnnnnnnnnnnnnnnnnnnnnnnnnnnnnnnnnnnnnnnnnnnnnnnnnnnnnnnnnnnnnnnnnnnnnnnnnnnnnnnnnnnnnnnnnnnnnnnnnnnnnnnnnnnnnnnnnnnnnnnnnnnnnnnnnnnnnnnnnnnnnnnnnnnnnnnnnnnnnnnnnnnnnnnnnnnnnnnnnnnnnnnnnnnnnnnnnnnnnnnnnnnnnnnnnnnnnnnnnnnnnnnnnnnnnnnnnnnnnnnnnnnnnnnnnnnnnnnnnnnnnnnnnnnnnnnnnnnnnnnnnnnnnnnnnnnnnnnnnnnnnnnnnnnnnnnnnnnnnnnnnnnnnnnnnnnnnnnnnnnnnnnnnnnnnnnnnnnnnnnnnnnnnnnnnnnnnnnnnnnnnnnnnnnnnnnnnnnnnnnnnnnnnnnnnnnnnnnnnnnnnnnnnnnnnnnnnnnnnnnnnnnnnnnnnnnnnnnnnnnnnnnnnnnnnnnnnnnnnnnnnnnnnnnnnnnnnnnnnnnnnnnnnnnnnnnnnnnnnnnnnnnnnnnnnnnnnnnnnnnnnnnnnnnnnnnnnnnnnnnnnnnnnnnnnnnnnnnnnnnnnnnnnnnnnnnnnnnnnnnnnnnnnnnnnnnnnnnnnnnnnnnnnnnnnnnnnnnnnnnnnnnnnnnnnnnnnnnnnnnnnnnnnnnnnnnnnnnnnnnnnnnnnnnnnnnnnnnnnnnnnnnnnnnnnnnnnnnnnnnnnnnnnnnnnnnnnnnnnnnnnnnnnnnnnnnnnnnnnnnnnnnnnnnnnnnnnnnnnnnnnnnnnnnnnnnnnnnnnnnnnnnnnnnnnnnnnnnnnnnnnnnnnnnnnnnnnnnnnnnnnnnnnnnnnnnnnnnnnnnnnnnnnnnnnnnnnnnnnnnnnnnnnnnnnnnnnnnnnnnnnnnnnnnnnnnnnnnnnnnnnnnnnnnnnnnnnnnnnnnnnnnnnnnnnnnnnnnnnnnnnnnnnnnnnnnnnnnnnnnnnnnnnnnnnnnnnnnnnnnnnnnnnnnnnnnnnnnnnnnnnnnnnnnnnnnnnnnnnnnnnnnnnnnnnnnnnnnnnnnnnnnnnnnnnnnnnnnnnnnnnnnnnnnnnnnnnnnnnnnnnnnnnnnnnnnnnnnnnnnnnnnnnnnnnnnnnnnnnnnnnnnnnnnnnnnnnnnnnnnnnnnnnnnnnnnnnnnnnnnnnnnnnnnnnnnnnnnnnnnnnnnnnnnnnnnnnnnnnnnnnnnnnnnnnnnnnnnnnnnnnnnnnnnnnnnnnnnnnnnnnnnnnnnnnnnnnnnnnnnnnnnnnnnnnnnnnnnnnnnnnnnnnnnnnnnnnnnnnnnnnnnnnnnnnnnnnnnnnnnnnnnnnnnnnnnnnnnnnnnnnnnnnnnnnnnnnnnnnnnnnnnnnnnnnnnnnnnnnnnnnnnnnnnnnnnnnnnnnnnnnnnnnnnnnnnnnnnnnnnnnnnnnnnnnnnnnnnnnnnnnnnnnnnnnnnnnnnnnnnnnnnnnnnnnnnnnnnnnnnnnnnnnnnnnnnnnnnnnnnnnnnnnnnnnnnnnnnnnnnnnnnnnnnnnnnnnnnnnnnnnnnnnnnnnnnnnnnnnnnnnnnnnnnnnnnnnnnnnnnnnnnnnnnnnnnnnnnnnnnnnnnnnnnnnnnnnnnnnnnnnnnnnnnnnnnnnnnnnnnnnnnnnnnnnnnnnnnnnnnnnnnnnnnnnnnnnnnnnnnnnnnnnnnnnnnnnnnnnnnnnnnnnnnnnnnnnnnnnnnnnnnnnnnnnnnnnnnnnnnnnnnnnnnnnnnnnnnnnnnnnnnnnnnnnnnnnnnnnnnnnnnnnnnnnnnnnnnnnnnnnnnnnnnnnnnnnnnnnnnnnnnnnnnnnnnnnnnnnnnnnnnnnnnnnnnnnnnnnnnnnnnnnnnnnnnnnnnnnnnnnnnnnnnnnnnnnnnnnnnnnnnnnnnnnnnnnnnnnnnnnnnnnnnnnnnnnnnnnnnnnnnnnnnnnnnnnnnnnnnnnnnnnnnnnnnnnnnnnnnnnnnnnnnnnnnnnnnnnnnnnnnnnnnnnnnnnnnnnnnnnnnnnnnnnnnnnnnnnnnnnnnnnnnnnnnnnnnnnnnnnnnnnnnnnnnnnnnnnnnnnnnnnnnnnnnnnnnnnnnnnnnnnnnnnnnnnnnnnnnnnnnnnnnnnnnnnnnnnnnnnnnnnnnnnnnnnnnnnnnnnnnnnnnnnnnnnnnnnnnnnnnnnnnnnnnnnnnnnnnnnnnnnnnnnnnnnnnnnnnnnnnnnnnnnnnnnnnnnnnnnnnnnnnnnnnnnnnnnnnnnnnnnnnnnnnnnnnnnnnnnnnnnnnnnnnnnnnnnnnnnnnnnnnnnnnnnnnnnnnnnnnnnnnnnnnnnnnnnnnnnnnnnnnnnnnnnnnnnnnnnnnnnnnnnnnnnnnnnnnnnnnnnnnnnnnnnnnnnnnnnnnnnnnnnnnnnnnnnnnnnnnnnnnnnnnnnnnnnnnnnnnnnnnnnnnnnnnnnnnnnnnnnnnnnnnnnnnnnnnnnnnnnnnnnnnnnnnnnnnnnnnnnnnnnnnnnnnnnnnnnnnnnnnnnnnnnnnnnnnnnnnnnnnnnnnnnnnnnnnnnnnnnnnnnnnnnnnnnnnnnnnnnnnnnnnnnnnnnnnnnnnnnnnnnnnnnnnnnnnnnnnnnnnnnnnnnnnnnnnnnnnnnnnnnnnnnnnnnnnnnnnnnnnnnnnnnnnnnnnnnnnnnnnnnnnnnnnnnnnnnnnnnnnnnnnnnnnnnnnnnnnnnnnnnnnnnnnnnnnnnnnnnnnnnnnnnnnnnnnnnnnnnnnnnnnnnnnnnnnnnnnnnnnnnnnnnnnnnnnnnnnnnnnnnnnnnnnnnnnnnnnnnnnnnnnnnnnnnnnnnnnnnnnnnnnnnnnnnnnnnnnnnnnnnnnnnnnnnnnnnnnnnnnnnnnnnnnnnnnnnnnnnnnnnnnnnnnnnnnnnnnnnnnnnnnnnnnnnnnnnnnnnnnnnnnnnnnnnnnnnnnnnnnnnnnnnnnnnnnnnnnnnnnnnnnnnnnnnnnnnnnnnnnnnnnnnnnnnnnnnnnnnnnnnnnnnnnnnnnnnnnnnnnnnnnnnnnnnnnnnnnnnnnnnnnnnnnnnnnnnnnnnnnnnnnnnnnnnnnnnnnnnnnnnnnnnnnnnnnnnnnnnnnnnnnnnnnnnnnnnnnnnnnnnnnnnnnnnnnnnnnnnnnnnnnnnnnnnnnnnnnnnnnnnnnnnnnnnnnnnnnnnnnnnnnnnnnnnnnnnnnnnnnnnnnnnnnnnnnnnnnnnnnnnnnnnnnnnnnnnnnnnnnnnnnnnnnnnnnnnnnnnnnnnnnnnnnnnnnnnnnnnnnnnnnnnnnnnnnnnnnnnnnnnnnnnnnnnnnnnnnnnnnnnnnnnnnnnnnnnnnnnnnnnnnnnnnnnnnnnnnnnnnnnnnnnnnnnnnnnnnnnnnnnnnnnnnnnnnnnnnnnnnnnnnnnnnnnnnnnnnnnnnnnnnnnnnnnnnnnnnnnnnnnnnnnnnnnnnnnnnnnnnnnnnnnnnnnnnnnnnnnnnnnnnnnnnnnnnnnnnnnnnnnnnnnnnnnnnnnnnnnnnnnnnnnnnnnnnnnnnnnnnnnnnnnnnnnnnnnnnnnnnnnnnnnnnnnnnnnnnnnnnnnnnnnnnnnnnnnnnnnnnnnnnnnnnnnnnnnnnnnnnnnnnnnnnnnnnnnnnnnnnnnnnnnnnnnnnnnnnnnnnnnnnnnnnnnnnnnnnnnnnnnnnnnnnnnnnnnnnnnnnnnnnnnnnnnnnnnnnnnnnnnnnnnnnnnnnnnnnnnnnnnnnnnnnnnnnnnnnnnnnnnnnnnnnnnnnnnnnnnnnnnnnnnnnnnnnnnnnnnnnnnnnnnnnnnnnnnnnnnnnnnnnnnnnnnnnnnnnnnnnnnnnnnnnnnnnnnnnnnnnnnnnnnnnnnnnnnnnnnnnnnnnnnnnnnnnnnnnnnnnnnnnnnnnnnnnnnnnnnnnnnnnnnnnnnnnnnnnnnnnnnnnnnnnnnnnnnnnnnnnnnnnnnnnnnnnnnnnnnnnnnnnnnnnnnnnnnnnnnnnnnnnnnnnnnnnnnnnnnnnnnnnnnnnnnnnnnnnnnnnnnnnnnnnnnnnnnnnnnnnnnnnnnnnnnnnnnnnnnnnnnnnnnnnnnnnnnnnnnnnnnnnnnnnnnnnnnnnnnnnnnnnnnnnnnnnnnnnnnnnnnnnnnnnnnnnnnnnnnnnnnnnnnnnnnnnnnnnnnnnnnnnnnnnnnnnnnnnnnnnnnnnnnnnnnnnnnnnnnnnnnnnnnnnnnnnnnnnnnnnnnnnnnnnnnnnnnnnnnnnnnnnnnnnnnnnnnnnnnnnnnnnnnnnnnnnnnnnnnnnnnnnnnnnnnnnnnnnnnnnnnnnnnnnnnnnnnnnnnnnnnnnnnnnnnnnnnnnnnnnnnnnnnnnnnnnnnnnnnnnnnnnnnnnnnnnnnnnnnnnnnnnnnnnnnnnnnnnnnnnnnnnnnnnnnnnnnnnnnnnnnnnnnnnnnnnnnnnnnnnnnnnnnnnnnnnnnnnnnnnnnnnnnnnnnnnnnnnnnnnnnnnnnnnnnnnnnnnnnnnnnnnnnnnnnnnnnnnnnnnnnnnnnnnnnnnnnnnnnnnnnnnnnnnnnnnnnnnnnnnnnnnnnnnnnnnnnnnnnnnnnnnnnnnnnnnnnnnnnnnnnnnnnnnnnnnnnnnnnnnnnnnnnnnnnnnnnnnnnnnnnnnnnnnnnnnnnnnnnnnnnnnnnnnnnnnnnnnnnnnnnnnnnnnnnnnnnnnnnnnnnnnnnnnnnnnnnnnnnnnnnnnnnnnnnnnnnnnnnnnnnnnnnnnnnnnnnnnnnnnnnnnnnnnnnnnnnnnnnnnnnnnnnnnnnnnnnnnnnnnnnnnnnnnnnnnnnnnnnnnnnnnnnnnnnnnnnnnnnnnnnnnnnnnnnnnnnnnnnnnnnnnnnnnnnnnnnnnnnnnnnnnnnnnnnnnnnnnnnnnnnnnnnnnnnnnnnnnnnnnnnnnnnnnnnnnnnnnnnnnnnnnnnnnnnnnnnnnnnnnnnnnnnnnnnnnnnnnnnnnnnnnnnnnnnnnnnnnnnnnnnnnnnnnnnnnnnnnnnnnnnnnnnnnnnnnnnnnnnnnnnnnnnnnnnnnnnnnnnnnnnnnnnnnnnnnnnnnnnnnnnnnnnnnnnnnnnnnnnnnnnnnnnnnnnnnnnnnnnnnnnnnnnnnnnnnnnnnnnnnnnnnnnnnnnnnnnnnnnnnnnnnnnnnnnnnnnnnnnnnnnnnnnnnnnnnnnnnnnnnnnnnnnnnnnnnnnnnnnnnnnnnnnnnnnnnnnnnnnnnnnnnnnnnnnnnnnnnnnnnnnnnnnnnnnnnnnnnnnnnnnnnnnnnnnnnnnnnnnnnnnnnnnnnnnnnnnnnnnnnnnnnnnnnnnnnnnnnnnnnnnnnnnnnnnnnnnnnnnnnnnnnnnnnnnnnnnnnnnnnnnnnnnnnnnnnnnnnnnnnnnnnnnnnnnnnnnnnnnnnnnnnnnnnnnnnnnnnnnnnnnnnnnnnnnnnnnnnnnnnnnnnnnnnnnnnnnnnnnnnnnnnnnnnnnnnnnnnnnnnnnnnnnnnnnnnnnnnnnnnnnnnnnnnnnnnnnnnnnnnnnnnnnnnnnnnnnnnnnnnnnnnnnnnnnnnnnnnnnnnnnnnnnnnnnnnnnnnnnnnnnnnnnnnnnnnnnnnnnnnnnnnnnnnnnnnnnnnnnnnnnnnnnnnnnnnnnnnnnnnnnnnnnnnnnnnnnnnnnnnnnnnnnnnnnnnnnnnnnnnnnnnnnnnnnnnnnnnnnnnnnnnnnnnnnnnnnnnnnnnnnnnnnnnnnnnnnnnnnnnnnnnnnnnnnnnnnnnnnnnnnnnnnnnnnnnnnnnnnnnnnnnnnnnnnnnnnnnnnnnnnnnnnnnnnnnnnnnnnnnnnnnnnnnnnnnnnnnnnnnnnnnnnnnnnnnnnnnnnnnnnnnnnnnnnnnnnnnnnnnnnnnnnnnnnnnnnnnnnnnnnnnnnnnnnnnnnnnnnnnnnnnnnnnnnnnnnnnnnnnnnnnnnnnnnnnnnnnnnnnnnnnnnnnnnnnnnnnnnnnnnnnnnnnnnnnnnnnnnnnnnnnnnnnnnnnnnnnnnnnnnnnnnnnnnnnnnnnnnnnnnnnnnnnnnnnnnnnnnnnnnnnnnnnnnnnnnnnnnnnnnnnnnnnnnnnnnnnnnnnnnnnnnnnnnnnnnnnnnnnnnnnnnnnnnnnnnnnnnnnnnnnnnnnnnnnnnnnnnnnnnnnnnnnnnnnnnnnnnnnnnnnnnnnnnnnnnnnnnnnnnnnnnnnnnnnnnnnnnnnnnnnnnnnnnnnnnnnnnnnnnnnnnnnnnnnnnnnnnnnnnnnnnnnnnnnnnnnnnnnnnnnnnnnnnnnnnnnnnnnnnnnnnnnnnnnnnnnnnnnnnnnnnnnnnnnnnnnnnnnnnnnnnnnnnnnnnnnnnnnnnnnnnnnnnnnnnnnnnnnnnnnnnnnnnnnnnnnnnnnnnnnnnnnnnnnnnnnnnnnnnnnnnnnnnnnnnnnnnnnnnnnnnnnnnnnnnnnnnnnnnnnnnnnnnnnnnnnnnnnnnnnnnnnnnnnnnnnnnnnnnnnnnnnnnnnnnnnnnnnnnnnnnnnnnnnnnnnnnnnnnnnnnnnnnnnnnnnnnnnnnnnnnnnnnnnnnnnnnnnnnnnnnnnnnnnnnnnnnnnnnnnnnnnnnnnnnnnnnnnnnnnnnnnnnnnnnnnnnnnnnnnnnnnnnnnnnnnnnnnnnnnnnnnnnnnnnnnnnnnnnnnnnnnnnnnnnnnnnnnnnnnnnnnnnnnnnnnnnnnnnnnnnnnnnnnnnnnnnnnnnnnnnnnnnnnnnnnnnnnnnnnnnnnnnnnnnnnnnnnnnnnnnnnnnnnnnnnnnnnnnnnnnnnnnnnnnnnnnnnnnnnnnnnnnnnnnnnnnnnnnnnnnnnnnnnnnnnnnnnnnnnnnnnnnnnnnnnnnnnnnnnnnnnnnnnnnnnnnnnnnnnnnnnnnnnnnnnnnnnnnnnnnnnnnnnnnnnnnnnnnnnnnnnnnnnnnnnnnnnnnnnnnnnnnnnnnnnnnnnnnnnnnnnnnnnnnnnnnnnnnnnnnnnnnnnnnnnnnnnnnnnnnnnnnnnnnnnnnnnnnnnnnnnnnnnnnnnnnnnnnnnnnnnnnnnnnnnnnnnnnnnnnnnnnnnnnnnnnnnnnnnnnnnnnnnnnnnnnnnnnnnnnnnnnnnnnnnnnnnnnnnnnnnnnnnnnnnnnnnnnnnnnnnnnnnnnnnnnnnnnnnnnnnnnnnnnnnnnnnnnnnnnnnnnnnnnnnnnnnnnnnnnnnnnnnnnnnnnnnnnnnnnnnnnnnnnnnnnnnnnnnnnnnnnnnnnnnnnnnnnnnnnnnnnnnnnnnnnnnnnnnnnnnnnnnnnnnnnnnnnnnnnnnnnnnnnnnnnnnnnnnnnnnnnnnnnnnnnnnnnnnnnnnnnnnnnnnnnnnnnnnnnnnnnnnnnnnnnnnnnnnnnnnnnnnnnnnnnnnnnnnnnnnnnnnnnnnnnnnnnnnnnnnnnnnnnnnnnnnnnnnnnnnnnnnnnnnnnnnnnnnnnnnnnnnnnnnnnnnnnnnnnnnnnnnnnnnnnnnnnnnnnnnnnnnnnnnnnnnnnnnnnnnnnnnnnnnnnnnnnnnnnnnnnnnnnnnnnnnnnnnnnnnnnnnnnnnnnnnnnnnnnnnnnnnnnnnnnnnnnnnnnnnnnnnnnnnnnnnnnnnnnnnnnnnnnnnnnnnnnnnnnnnnnnnnnnnnnnnnnnnnnnnnnnnnnnnnnnnnnnnnnnnnnnnnnnnnnnnnnnnnnnnnnnnnnnnnnnnnnnnnnnnnnnnnnnnnnnnnnnnnnnnnnnnnnnnnnnnnnnnnnnnnnnnnnnnnnnnnnnnnnnnnnnnnnnnnnnnnnnnnnnnnnnnnnnnnnnnnnnnnnnnnnnnnnnnnnnnnnnnnnnnnnnnnnnnnnnnnnnnnnnnnnnnnnnnnnnnnnnnnnnnnnnnnnnnnnnnnnnnnnnnnnnnnnnnnnnnnnnnnnnnnnnnnnnnnnnnnnnnnnnnnnnnnnnnnnnnnnnnnnnnnnnnnnnnnnnnnnnnnnnnnnnnnnnnnnnnnnnnnnnnnnnnnnnnnnnnnnnnnnnnnnnnnnnnnnnnnnnnnnnnnnnnnnnnnnnnnnnnnnnnnnnnnnnnnnnnnnnnnnnnnnnnnnnnnnnnnnnnnnnnnnnnnnnnnnnnnnnnnnnnnnnnnnnnnnnnnnnnnnnnnnnnnnnnnnnnnnnnnnnnnnnnnnnnnnnnnnnnnnnnnnnnnnnnnnnnnnnnnnnnnnnnnnnnnnnnnnnnnnnnnnnnnnnnnnnnnnnnnnnnnnnnnnnnnnnnnnnnnnnnnnnnnnnnnnnnnnnnnnnnnnnnnnnnnnnnnnnnnnnnnnnnnnnnnnnnnnnnnnnnnnnnnnnnnnnnnnnnnnnnnnnnnnnnnnnnnnnnnnnnnnnnnnnnnnnnnnnnnnnnnnnnnnnnnnnnnnnnnnnnnnnnnnnnnnnnnnnnnnnnnnnnnnnnnnnnnnnnnnnnnnnnnnnnnnnnnnnnnnnnnnnnnnnnnnnnnnnnnnnnnnnnnnnnnnnnnnnnnnnnnnnnnnnnnnnnnnnnnnnnnnnnnnnnnnnnnnnnnnnnnnnnnnnnnnnnnnnnnnnnnnnnnnnnnnnnnnnnnnnnnnnnnnnnnnnnnnnnnnnnnnnnnnnnnnnnnnnnnnnnnnnnnnnnnnnnnnnnnnnnnnnnnnnnnnnnnnnnnnnnnnnnnnnnnnnnnnnnnnnnnnnnnnnnnnnnnnnnnnnnnnnnnnnnnnnnnnnnnnnnnnnnnnnnnnnnnnnnnnnnnnnnnnnnnnnnnnnnnnnnnnnnnnnnnnnnnnnnnnnnnnnnnnnnnnnnnnnnnnnnnnnnnnnnnnnnnnnnnnnnnnnnnnnnnnnnnnnnnnnnnnnnnnnnnnnnnnnnnnnnnnnnnnnnnnnnnnnnnnnnnnnnnnnnnnnnnnnnnnnnnnnnnnnnnnnnnnnnnnnnnnnnnnnnnnnnnnnnnnnnnnnnnnnnnnnnnnnnnnnnnnnnnnnnnnnnnnnnnnnnnnnnnnnnnnnnnnnnnnnnnnnnnnnnnnnnnnnnnnnnnnnnnnnnnnnnnnnnnnnnnnnnnnnnnnnnnnnnnnnnnnnnnnnnnnnnnnnnnnnnnnnnnnnnnnnnnnnnnnnnnnnnnnnnnnnnnnnnnnnnnnnnnnnnnnnnnnnnnnnnnnnnnnnnnnnnnnnnnnnnnnnnnnnnnnnnnnnnnnnnnnnnnnnnnnnnnnnnnnnnnnnnnnnnnnnnnnnnnnnnnnnnnnnnnnnnnnnnnnnnnnnnnnnnnnnnnnnnnnnnnnnnnnnnnnnnnnnnnnnnnnnnnnnnnnnnnnnnnnnnnnnnnnnnnnnnnnnnnnnnnnnnnnnnnnnnnnnnnnnnnnnnnnnnnnnnnnnnnnnnnnnnnnnnnnnnnnnnnnnnnnnnnnnnnnnnnnnnnnnnnnnnnnnnnnnnnnnnnnnnnnnnnnnnnnnnnnnnnnnnnnnnnnnnnnnnnnnnnnnnnnnnnnnnnnnnnnnnnnnnnnnnnnnnnnnnnnnnnnnnnnnnnnnnnnnnnnnnnnnnnnnnnnnnnnnnnnnnnnnnnnnnnnnnnnnnnnnnnnnnnnnnnnnnnnnnnnnnnnnnnnnnnnnnnnnnnnnnnnnnnnnnnnnnnnnnnnnnnnnnnnnnnnnnnnnnnnnnnnnnnnnnnnnnnnnnnnnnnnnnnnnnnnnnnnnnnnnnnnnnnnnnnnnnnnnnnnnnnnnnnnnnnnnnnnnnnnnnnnnnnnnnnnnnnnnnnnnnnnnnnnnnnnnnnnnnnnnnnnnnnnnnnnnnnnnnnnnnnnnnnnnnnnnnnnnnnnnnnnnnnnnnnnnnnnnnnnnnnnnnnnnnnnnnnnnnnnnnnnnnnnnnnnnnnnnnnnnnnnnnnnnnnnnnnnnnnnnnnnnnnnnnnnnnnnnnnnnnnnnnnnnnnnnnnnnnnnnnnnnnnnnnnnnnnnnnnnnnnnnnnnnnnnnnnnnnnnnnnnnnnnnnnnnnnnnnnnnnnnnnnnnnnnnnnnnnnnnnnnnnnnnnnnnnnnnnnnnnnnnnnnnnnnnnnnnnnnnnnnnnnnnnnnnnnnnnnnnnnnnnnnnnnnnnnnnnnnnnnnnnnnnnnnnnnnnnnnnnnnnnnnnnnnnnnnnnnnnnnnnnnnnnnnnnnnnnnnnnnnnnnnnnnnnnnnnnnnnnnnnnnnnnnnnnnnnnnnnnnnnnnnnnnnnnnnnnnnnnnnnnnnnnnnnnnnnnnnnnnnnnnnnnnnnnnnnnnnnnnnnnnnnnnnnnnnnnnnnnnnnnnnnnnnnnnnnnnnnnnnnnnnnnnnnnnnnnnnnnnnnnnnnnnnnnnnnnnnnnnnnnnnnnnnnnnnnnnnnnnnnnnnnnnnnnnnnnnnnnnnnnnnnnnnnnnnnnnnnnnnnnnnnnnnnnnnnnnnnnnnnnnnnnnnnnnnnnnnnnnnnnnnnnnnnnnnnnnnnnnnnnnnnnnnnnnnnnnnnnnnnnnnnnnnnnnnnnnnnnnnnnnnnnnnnnnnnnnnnnnnnnnnnnnnnnnnnnnnnnnnnnnnnnnnnnnnnnnnnnnnnnnnnnnnnnnnnnnnnnnnnnnnnnnnnnnnnnnnnnnnnnnnnnnnnnnnnnnnnnnnnnnnnnnnnnnnnnnnnnnnnnnnnnnnnnnnnnnnnnnnnnnnnnnnnnnnnnnnnnnnnnnnnnnnnnnnnnnnnnnnnnnnnnnnnnnnnnnnnnnnnnnnnnnnnnnnnnnnnnnnnnnnnnnnnnnnnnnnnnnnnnnnnnnnnnnnnnnnnnnnnnnnnnnnnnnnnnnnnnnnnnnnnnnnnnnnnnnnnnnnnnnnnnnnnnnnnnnnnnnnnnnnnnnnnnnnnnnnnnnnnnnnnnnnnnnnnnnnnnnnnnnnnnnnnnnnnnnnnnnnnnnnnnnnnnnnnnnnnnnnnnnnnnnnnnnnnnnnnnnnnnnnnnnnnnnnnnnnnnnnnnnnnnnnnnnnnnnnnnnnnnnnnnnnnnnnnnnnnnnnnnnnnnnnnnnnnnnnnnnnnnnnnnnnnnnnnnnnnnnnnnnnnnnnnnnnnnnnnnnnnnnnnnnnnnnnnnnnnnnnnnnnnnnnnnnnnnnnnnnnnnnnnnnnnnnnnnnnnnnnnnnnnnnnnnnnnnnnnnnnnnnnnnnnnnnnnnnnnnnnnnnnnnnnnnnnnnnnnnnnnnnnnnnnnnnnnnnnnnnnnnnnnnnnnnnnnnnnnnnnnnnnnnnnnnnnnnnnnnnnnnnnnnnnnnnnnnnnnnnnnnnnnnnnnnnnnnnnnnnnnnnnnnnnnnnnnnnnnnnnnnnnnnnnnnnnnnnnnnnnnnnnnnnnnnnnnnnnnnnnnnnnnnnnnnnnnnnnnnnnnnnnnnnnnnnnnnnnnnnnnnnnnnnnnnnnnnnnnnnnnnnnnnnnnnnnnnnnnnnnnnnnnnnnnnnnnnnnnnnnnnnnnnnnnnnnnnnnnnnnnnnnnnnnnnnnnnnnnnnnnnnnnnnnnnnnnnnnnnnnnnnnnnnnnnnnnnnnnnnnnnnnnnnnnnnnnnnnnnnnnnnnnnnnnnnnnnnnnnnnnnnnnnnnnnnnnnnnnnnnnnnnnnnnnnnnnnnnnnnnnnnnnnnnnnnnnnnnnnnnnnnnnnnnnnnnnnnnnnnnnnnnnnnnnnnnnnnnnnnnnnnnnnnnnnnnnnnnnnnnnnnnnnnnnnnnnnnnnnnnnnnnnnnnnnnnnnnnnnnnnnnnnnnnnnnnnnnnnnnnnnnnnnnnnnnnnnnnnnnnnnnnnnnnnnnnnnnnnnnnnnnnnnnnnnnnnnnnnnnnnnnnnnnnnnnnnnnnnnnnnnnnnnnnnnnnnnnnnnnnnnnnnnnnnnnnnnnnnnnnnnnnnnnnnnnnnnnnnnnnnnnnnnnnnnnnnnnnnnnnnnnnnnnnnnnnnnnnnnnnnnnnnnnnnnnnnnnnnnnnnnnnnnnnnnnnnnnnnnnnnnnnnnnnnnnnnnnnnnnnnnnnnnnnnnnnnnnnnnnnnnnnnnnnnnnnnnnnnnnnnnnnnnnnnnnnnnnnnnnnnnnnnnnnnnnnnnnnnnnnnnnnnnnnnnnnnnnnnnnnnnnnnnnnnnnnnnnnnnnnnnnnnnnnnnnnnnnnnnnnnnnnnnnnnnnnnnnnnnnnnnnnnnnnnnnnnnnnnnnnnnnnnnnnnnnnnnnnnnnnnnnnnnnnnnnnnnnnnnnnnnnnnnnnnnnnnnnnnnnnnnnnnnnnnnnnnnnnnnnnnnnnnnnnnnnnnnnnnnnnnnnnnnnnnnnnnnnnnnnnnnnnnnnnnnnnnnnnnnnnnnnnnnnnnnnnnnnnnnnnnnnnnnnnnnnnnnnnnnnnnnnnnnnnnnnnnnnnnnnnnnnnnnnnnnnnnnnnnnnnnnnnnnnnnnnnnnnnnnnnnnnnnnnnnnnnnnnnnnnnnnnnnnnnnnnnnnnnnnnnnnnnnnnnnnnnnnnnnnnnnnnnnnnnnnnnnnnnnnnnnnnnnnnnnnnnnnnnnnnnnnnnnnnnnnnnnnnnnnnnnnnnnnnnnnnnnnnnnnnnnnnnnnnnnnnnnnnnnnnnnnnnnnnnnnnnnnnnnnnnnnnnnnnnnnnnnnnnnnnnnnnnnnnnnnnnnnnnnnnnnnnnnnnnnnnnnnnnnnnnnnnnnnnnnnnnnnnnnnnnnnnnnnnnnnnnnnnnnnnnnnnnnnnnnnnnnnnnnnnnnnnnnnnnnnnnnnnnnnnnnnnnnnnnnnnnnnnnnnnnnnnnnnnnnnnnnnnnnnnnnnnnnnnnnnnnnnnnnnnnnnnnnnnnnnnnnnnnnnnnnnnnnnnnnnnnnnnnnnnnnnnnnnnnnnnnnnnnnnnnnnnnnnnnnnnnnnnnnnnnnnnnnnnnnnnnnnnnnnnnnnnnnnnnnnnnnnnnnnnnnnnnnnnnnnnnnnnnnnnnnnnnnnnnnnnnnnnnnnnnnnnnnnnnnnnnnnnnnnnnnnnnnnnnnnnnnnnnnnnnnnnnnnnnnnnnnnnnnnnnnnnnnnnnnnnnnnnnnnnnnnnnnnnnnnnnnnnnnnnnnnnnnnnnnnnnnnnnnnnnnnnnnnnnnnnnnnnnnnnnnnnnnnnnnnnnnnnnnnnnnnnnnnnnnnnnnnnnnnnnnnnnnnnnnnnnnnnnnnnnnnnnnnnnnnnnnnnnnnnnnnnnnnnnnnnnnnnnnnnnnnnnnnnnnnnnnnnnnnnnnnnnnnnnnnnnnnnnnnnnnnnnnnnnnnnnnnnnnnnnnnnnnnnnnnnnnnnnnnnnnnnnnnnnnnnnnnnnnnnnnnnnnnnnnnnnnnnnnnnnnnnnnnnnnnnnnnnnnnnnnnnnnnnnnnnnnnnnnnnnnnnnnnnnnnnnnnnnnnnnnnnnnnnnnnnnnnnnnnnnnnnnnnnnnnnnnnnnnnnnnnnnnnnnnnnnnnnnnnnnnnnnnnnnnnnnnnnnnnnnnnnnnnnnnnnnnnnnnnnnnnnnnnnnnnnnnnnnnnnnnnnnnnnnnnnnnnnnnnnnnnnnnnnnnnnnnnnnnnnnnnnnnnnnnnnnnnnnnnnnnnnnnnnnnnnnnnnnnnnnnnnnnnnnnnnnnnnnnnnnnnnnnnnnnnnnnnnnnnnnnnnnnnnnnnnnnnnnnnnnnnnnnnnnnnnnnnnnnnnnnnnnnnnnnnnnnnnnnnnnnnnnnnnnnnnnnnnnnnnnnnnnnnnnnnnnnnnnnnnnnnnnnnnnnnnnnnnnnnnnnnnnnnnnnnnnnnnnnnnnnnnnnnnnnnnnnnnnnnnnnnnnnnnnnnnnnnnnnnnnnnnnnnnnnnnnnnnnnnnnnnnnnnnnnnnnnnnnnnnnnnnnnnnnnnnnnnnnnnnnnnnnnnnnnnnnnnnnnnnnnnnnnnnnnnnnnnnnnnnnnnnnnnnnnnnnnnnnnnnnnnnnnnnnnnnnnnnnnnnnnnnnnnnnnnnnnnnnnnnnnnnnnnnnnnnnnnnnnnnnnnnnnnnnnnnnnnnnnnnnnnnnnnnnnnnnnnnnnnnnnnnnnnnnnnnnnnnnnnnnnnnnnnnnnnnnnnnnnnnnnnnnnnnnnnnnnnnnnnnnnnnnnnnnnnnnnnnnnnnnnnnnnnnnnnnnnnnnnnnnnnnnnnnnnnnnnnnnnnnnnnnnnnnnnnnnnnnnnnnnnnnnnnnnnnnnnnnnnnnnnnnnnnnnnnnnnnnnnnnnnnnnnnnnnnnnnnnnnnnnnnnnnnnnnnnnnnnnnnnnnnnnnnnnnnnnnnnnnnnnnnnnnnnnnnnnnnnnnnnnnnnnnnnnnnnnnnnnnnnnnnnnnnnnnnnnnnnnnnnnnnnnnnnnnnnnnnnnnnnnnnnnnnnnnnnnnnnnnnnnnnnnnnnnnnnnnnnnnnnnnnnnnnnnnnnnnnnnnnnnnnnnnnnnnnnnnnnnnnnnnnnnnnnnnnnnnnnnnnnnnnnnnnnnnnnnnnnnnnnnnnnnnnnnnnnnnnnnnnnnnnnnnnnnnnnnnnnnnnnnnnnnnnnnnnnnnnnnnnnnnnnnnnnnnnnnnnnnnnnnnnnnnnnnnnnnnnnnnnnnnnnnnnnnnnnnnnnnnnnnnnnnnnnnnnnnnnnnnnnnnnnnnnnnnnnnnnnnnnnnnnnnnnnnnnnnnnnnnnnnnnnnnnnnnnnnnnnnnnnnnnnnnnnnnnnnnnnnnnnnnnnnnnnnnnnnnnnnnnnnnnnnnnnnnnnnnnnnnnnnnnnnnnnnnnnnnnnnnnnnnnnnnnnnnnnnnnnnnnnnnnnnnnnnnnnnnnnnnnnnnnnnnnnnnnnnnnnnnnnnnnnnnnnnnnnnnnnnnnnnnnnnnnnnnnnnnnnnnnnnnnnnnnnnnnnnnnnnnnnnnnnnnnnnnnnnnnnnnnnnnnnnnnnnnnnnnnnnnnnnnnnnnnnnnnnnnnnnnnnnnnnnnnnnnnnnnnnnnnnnnnnnnnnnnnnnnnnnnnnnnnnnnnnnnnnnnnnnnnnnnnnnnnnnnnnnnnnnnnnnnnnnnnnnnnnnnnnnnnnnnnnnnnnnnnnnnnnnnnnnnnnnnnnnnnnnnnnnnnnnnnnnnnnnnnnnnnnnnnnnnnnnnnnnnnnnnnnnnnnnnnnnnnnnnnnnnnnnnnnnnnnnnnnnnnnnnnnnnnnnnnnnnnnnnnnnnnnnnnnnnnnnnnnnnnnnnnnnnnnnnnnnnnnnnnnnnnnnnnnnnnnnnnnnnnnnnnnnnnnnnnnnnnnnnnnnnnnnnnnnnnnnnnnnnnnnnnnnnnnnnnnnnnnnnnnnnnnnnnnnnnnnnnnnnnnnnnnnnnnnnnnnnnnnnnnnnnnnnnnnnnnnnnnnnnnnnnnnnnnnnnnnnnnnnnnnnnnnnnnnnnnnnnnnnnnnnnnnnnnnnnnnnnnnnnnnnnnnnnnnnnnnnnnnnnnnnnnnnnnnnnnnnnnnnnnnnnnnnnnnnnnnnnnnnnnnnnnnnnnnnnnnnnnnnnnnnnnnnnnnnnnnnnnnnnnnnnnnnnnnnnnnnnnnnnnnnnnnnnnnnnnnnnnnnnnnnnnnnnnnnnnnnnnnnnnnnnnnnnnnnnnnnnnnnnnnnnnnnnnnnnnnnnnnnnnnnnnnnnnnnnnnnnnnnnnnnnnnnnnnnnnnnnnnnnnnnnnnnnnnnnnnnnnnnnnnnnnnnnnnnnnnnnnnnnnnnnnnnnnnnnnnnnnnnnnnnnnnnnnnnnnnnnnnnnnnnnnnnnnnnnnnnnnnnnnnnnnnnnnnnnnnnnnnnnnnnnnnnnnnnnnnnnnnnnnnnnnnnnnnnnnnnnnnnnnnnnnnnnnnnnnnnnnnnnnnnnnnnnnnnnnnnnnnnnnnnnnnnnnnnnnnnnnnnnnnnnnnnnnnnnnnnnnnnnnnnnnnnnnnnnnnnnnnnnnnnnnnnnnnnnnnnnnnnnnnnnnnnnnnnnnnnnnnnnnnnnnnnnnnnnnnnnnnnnnnnnnnnnnnnnnnnnnnnnnnnnnnnnnnnnnnnnnnnnnnnnnnnnnnnnnnnnnnnnnnnnnnnnnnnnnnnnnnnnnnnnnnnnnnnnnnnnnnnnnnnnnnnnnnnnnnnnnnnnnnnnnnnnnnnnnnnnnnnnnnnnnnnnnnnnnnnnnnnnnnnnnnnnnnnnnnnnnnnnnnnnnnnnnnnnnnnnnnnnnnnnnnnnnnnnnnnnnnnnnnnnnnnnnnnnnnnnnnnnnnnnnnnnnnnnnnnnnnnnnnnnnnnnnnnnnnnnnnnnnnnnnnnnnnnnnnnnnnnnnnnnnnnnnnnnnnnnnnnnnnnnnnnnnnnnnnnnnnnnnnnnnnnnnnnnnnnnnnnnnnnnnnnnnnnnnnnnnnnnnnnnnnnnnnnnnnnnnnnnnnnnnnnnnnnnnnnnnnnnnnnnnnnnnnnnnnnnnnnnnnnnnnnnnnnnnnnnnnnnnnnnnnnnnnnnnnnnnnnnnnnnnnnnnnnnnnnnnnnnnnnnnnnnnnnnnnnnnnnnnnnnnnnnnnnnnnnnnnnnnnnnnnnnnnnnnnnnnnnnnnnnnnnnnnnnnnnnnnnnnnnnnnnnnnnnnnnnnnnnnnnnnnnnnnnnnnnnnnnnnnnnnnnnnnnnnnnnnnnnnnnnnnnnnnnnnnnnnnnnnnnnnnnnnnnnnnnnnnnnnnnnnnnnnnnnnnnnnnnnnnnnnnnnnnnnnnnnnnnnnnnnnnnnnnnnnnnnnnnnnnnnnnnnnnnnnnnnnnnnnnnnnnnnnnnnnnnnnnnnnnnnnnnnnnnnnnnnnnnnnnnnnnnnnnnnnnnnnnnnnnnnnnnnnnnnnnnnnnnnnnnnnnnnnnnnnnnnnnnnnnnnnnnnnnnnnnnnnnnnnnnnnnnnnnnnnnnnnnnnnnnnnnnnnnnnnnnnnnnnnnnnnnnnnnnnnnnnnnnnnnnnnnnnnnnnnnnnnnnnnnnnnnnnnnnnnnnnnnnnnnnnnnnnnnnnnnnnnnnnnnnnnnnnnnnnnnnnnnnnnnnnnnnnnnnnnnnnnnnnnnnnnnnnnnnnnnnnnnnnnnnnnnnnnnnnnnnnnnnnnnnnnnnnnnnnnnnnnnnnnnnnnnnnnnnnnnnnnnnnnnnnnnnnnnnnnnnnnnnnnnnnnnnnnnnnnnnnnnnnnnnnnnnnnnnnnnnnnnnnnnnnnnnnnnnnnnnnnnnnnnnnnnnnnnnnnnnnnnnnnnnnnnnnnnnnnnnnnnnnnnnnnnnnnnnnnnnnnnnnnnnnnnnnnnnnnnnnnnnnnnnnnnnnnnnnnnnnnnnnnnnnnnnnnnnnnnnnnnnnnnnnnnnnnnnnnnnnnnnnnnnnnnnnnnnnnnnnnnnnnnnnnnnnnnnnnnnnnnnnnnnnnnnnnnnnnnnnnnnnnnnnnnnnnnnnnnnnnnnnnnnnnnnnnnnnnnnnnnnnnnnnnnnnnnnnnnnnnnnnnnnnnnnnnnnnnnnnnnnnnnnnnnnnnnnnnnnnnnnnnnnnnnnnnnnnnnnnnnnnnnnnnnnnnnnnnnnnnnnnnnnnnnnnnnnnnnnnnnnnnnnnnnnnnnnnnnnnnnnnnnnnnnnnnnnnnnnnnnnnnnnnnnnnnnnnnnnnnnnnnnnnnnnnnnnnnnnnnnnnnnnnnnnnnnnnnnnnnnnnnnnnnnnnnnnnnnnnnnnnnnnnnnnnnnnnnnnnnnnnnnnnnnnnnnnnnnnnnnnnnnnnnnnnnnnnnnnnnnnnnnnnnnnnnnnnnnnnnnnnnnnnnnnnnnnnnnnnnnnnnnnnnnnnnnnnnnnnnnnnnnnnnnnnnnnnnnnnnnnnnnnnnnnnnnnnnnnnnnnnnnnnnnnnnnnnnnnnnnnnnnnnnnnnnnnnnnnnnnnnnnnnnnnnnnnnnnnnnnnnnnnnnnnnnnnnnnnnnnnnnnnnnnnnnnnnnnnnnnnnnnnnnnnnnnnnnnnnnnnnnnnnnnnnnnnnnnnnnnnnnnnnnnnnnnnnnnnnnnnnnnnnnnnnnnnnnnnnnnnnnnnnnnnnnnnnnnnnnnnnnnnnnnnnnnnnnnnnnnnnnnnnnnnnnnnnnnnnnnnnnnnnnnnnnnnnnnnnnnnnnnnnnnnnnnnnnnnnnnnnnnnnnnnnnnnnnnnnnnnnnnnnnnnnnnnnnnnnnnnnnnnnnnnnnnnnnnnnnnnnnnnnnnnnnnnnnnnnnnnnnnnnnnnnnnnnnnnnnnnnnnnnnnnnnnnnnnnnnnnnnnnnnnnnnnnnnnnnnnnnnnnnnnnnnnnnnnnnnnnnnnnnnnnnnnnnnnnnnnnnnnnnnnnnnnnnnnnnnnnnnnnnnnnnnnnnnnnnnnnnnnnnnnnnnnnnnnnnnnnnnnnnnnnnnnnnnnnnnnnnnnnnnnnnnnnnnnnnnnnnnnnnnnnnnnnnnnnnnnnnnnnnnnnnnnnnnnnnnnnnnnnnnnnnnnnnnnnnnnnnnnnnnnnnnnnnnnnnnnnnnnnnnnnnnnnnnnnnnnnnnnnnnnnnnnnnnnnnnnnnnnnnnnnnnnnnnnnnnnnnnnnnnnnnnnnnnnnnnnnnnnnnnnnnnnnnnnnnnnnnnnnnnnnnnnnnnnnnnnnnnnnnnnnnnnnnnnnnnnnnnnnnnnnnnnnnnnnnnnnnnnnnnnnnnnnnnnnnnnnnnnnnnnnnnnnnnnnnnnnnnnnnnnnnnnnnnnnnnnnnnnnnnnnnnnnnnnnnnnnnnnnnnnnnnnnnnnnnnnnnnnnnnnnnnnnnnnnnnnnnnnnnnnnnnnnnnnnnnnnnnnnnnnnnnnnnnnnnnnnnnnnnnnnnnnnnnnnnnnnnnnnnnnnnnnnnnnnnnnnnnnnnnnnnnnnnnnnnnnnnnnnnnnnnnnnnnnnnnnnnnnnnnnnnnnnnnnnnnnnnnnnnnnnnnnnnnnnnnnnnnnnnnnnnnnnnnnnnnnnnnnnnnnnnnnnnnnnnnnnnnnnnnnnnnnnnnnnnnnnnnnnnnnnnnnnnnnnnnnnnnnnnnnnnnnnnnnnnnnnnnnnnnnnnnnnnnnnnnnnnnnnnnnnnnnnnnnnnnnnnnnnnnnnnnnnnnnnnnnnnnnnnnnnnnnnnnnnnnnnnnnnnnnnnnnnnnnnnnnnnnnnnnnnnnnnnnnnnnnnnnnnnnnnnnnnnnnnnnnnnnnnnnnnnnnnnnnnnnnnnnnnnnnnnnnnnnnnnnnnnnnnnnnnnnnnnnnnnnnnnnnnnnnnnnnnnnnnnnnnnnnnnnnnnnnnnnnnnnnnnnnnnnnnnnnnnnnnnnnnnnnnnnnnnnnnnnnnnnnnnnnnnnnnnnnnnnnnnnnnnnnnnnnnnnnnnnnnnnnnnnnnnnnnnnnnnnnnnnnnnnnnnnnnnnnnnnnnnnnnnnnnnnnnnnnnnnnnnnnnnnnnnnnnnnnnnnnnnnnnnnnnnnnnnnnnnnnnnnnnnnnnnnnnnnnnnnnnnnnnnnnnnnnnnnnnnnnnnnnnnnnnnnnnnnnnnnnnnnnnnnnnnnnnnnnnnnnnnnnnnnnnnnnnnnnnnnnnnnnnnnnnnnnnnnnnnnnnnnnnnnnnnnnnnnnnnnnnnnnnnnnnnnnnnnnnnnnnnnnnnnnnnnnnnnnnnnnnnnnnnnnnnnnnnnnnnnnnnnnnnnnnnnnnnnnnnnnnnnnnnnnnnnnnnnnnnnnnnnnnnnnnnnnnnnnnnnnnnnnnnnnnnnnnnnnnnnnnnnnnnnnnnnnnnnnnnnnnnnnnnnnnnnnnnnnnnnnnnnnnnnnnnnnnnnnnnnnnnnnnnnnnnnnnnnnnnnnnnnnnnnnnnnnnnnnnnnnnnnnnnnnnnnnnnnnnnnnnnnnnnnnnnnnnnnnnnnnnnnnnnnnnnnnnnnnnnnnnnnnnnnnnnnnnnnnnnnnnnnnnnnnnnnnnnnnnnnnnnnnnnnnnnnnnnnnnnnnnnnnnnnnnnnnnnnnnnnnnnnnnnnnnnnnnnnnnnnnnnnnnnnnnnnnnnnnnnnnnnnnnnnnnnnnnnnnnnnnnnnnnnnnnnnnnnnnnnnnnnnnnnnnnnnnnnnnnnnnnnnnnnnnnnnnnnnnnnnnnnnnnnnnnnnnnnnnnnnnnnnnnnnnnnnnnnnnnnnnnnnnnnnnnnnnnnnnnnnnnnnnnnnnnnnnnnnnnnnnnnnnnnnnnnnnnnnnnnnnnnnnnnnnnnnnnnnnnnnnnnnnnnnnnnnnnnnnnnnnnnnnnnnnnnnnnnnnnnnnnnnnnnnnnnnnnnnnnnnnnnnnnnnnnnnnnnnnnnnnnnnnnnnnnnnnnnnnnnnnnnnnnnnnnnnnnnnnnnnnnnnnnnnnnnnnnnnnnnnnnnnnnnnnnnnnnnnnnnnnnnnnnnnnnnnnnnnnnnnnnnnnnnnnnnnnnnnnnnnnnnnnnnnnnnnnnnnnnnnnnnnnnnnnnnnnnnnnnnnnnnnnnnnnnnnnnnnnnnnnnnnnnnnnnnnnnnnnnnnnnnnnnnnnnnnnnnnnnnnnnnnnnnnnnnnnnnnnnnnnnnnnnnnnnnnnnnnnnnnnnnnnnnnnnnnnnnnnnnnnnnnnnnnnnnnnnnnnnnnnnnnnnnnnnnnnnnnnnnnnnnnnnnnnnnnnnnnnnnnnnnnnnnnnnnnnnnnnnnnnnnnnnnnnnnnnnnnnnnnnnnnnnnnnnnnnnnnnnnnnnnnnnnnnnnnnnnnnnnnnnnnnnnnnnnnnnnnnnnnnnnnnnnnnnnnnnnnnnnnnnnnnnnnnnnnnnnnnnnnnnnnnnnnnnnnnnnnnnnnnnnnnnnnnnnnnnnnnnnnnnnnnnnnnnnnnnnnnnnnnnnnnnnnnnnnnnnnnnnnnnnnnnnnnnnnnnnnnnnnnnnnnnnnnnnnnnnnnnnnnnnnnnnnnnnnnnnnnnnnnnnnnnnnnnnnnnnnnnnnnnnnnnnnnnnnnnnnnnnnnnnnnnnnnnnnnnnnnnnnnnnnnnnnnnnnnnnnnnnnnnnnnnnnnnnnnnnnnnnnnnnnnnnnnnnnnnnnnnnnnnnnnnnnnnnnnnnnnnnnnnnnnnnnnnnnnnnnnnnnnnnnnnnnnnnnnnnnnnnnnnnnnnnnnnnnnnnnnnnnnnnnnnnnnnnnnnnnnnnnnnnnnnnnnnnnnnnnnnnnnnnnnnnnnnnnnnnnnnnnnnnnnnnnnnnnnnnnnnnnnnnnnnnnnnnnnnnnnnnnnnnnnnnnnnnnnnnnnnnnnnnnnnnnnnnnnnnnnnnnnnnnnnnnnnnnnnnnnnnnnnnnnnnnnnnnnnnnnnnnnnnnnnnnnnnnnnnnnnnnnnnnnnnnnnnnnnnnnnnnnnnnnnnnnnnnnnnnnnnnnnnnnnnnnnnnnnnnnnnnnnnnnnnnnnnnnnnnnnnnnnnnnnnnnnnnnnnnnnnnnnnnnnnnnnnnnnnnnnnnnnnnnnnnnnnnnnnnnnnnnnnnnnnnnnnnnnnnnnnnnnnnnnnnnnnnnnnnnnnnnnnnnnnnnnnnnnnnnnnnnnnnnnnnnnnnnnnnnnnnnnnnnnnnnnnnnnnnnnnnnnnnnnnnnnnnnnnnnnnnnnnnnnnnnnnnnnnnnnnnnnnnnnnnnnnnnnnnnnnnnnnnnnnnnnnnnnnnnnnnnnnnnnnnnnnnnnnnnnnnnnnnnnnnnnnnnnnnnnnnnnnnnnnnnnnnnnnnnnnnnnnnnnnnnnnnnnnnnnnnnnnnnnnnnnnnnnnnnnnnnnnnnnnnnnnnnnnnnnnnnnnnnnnnnnnnnnnnnnnnnnnnnnnnnnnnnnnnnnnnnnnnnnnnnnnnnnnnnnnnnnnnnnnnnnnnnnnnnnnnnnnnnnnnnnnnnnnnnnnnnnnnnnnnnnnnnnnnnnnnnnnnnnnnnnnnnnnnnnnnnnnnnnnnnnnnnnnnnnnnnnnnnnnnnnnnnnnnnnnnnnnnnnnnnnnnnnnnnnnnnnnnnnnnnnnnnnnnnnnnnnnnnnnnnnnnnnnnnnnnnnnnnnnnnnnnnnnnnnnnnnnnnnnnnnnnnnnnnnnnnnnnnnnnnnnnnnnnnnnnnnnnnnnnnnnnnnnnnnnnnnnnnnnnnnnnnnnnnnnnnnnnnnnnnnnnnnnnnnnnnnnnnnnnnnnnnnnnnnnnnnnnnnnnnnnnnnnnnnnnnnnnnnnnnnnnnnnnnnnnnnnnnnnnnnnnnnnnnnnnnnnnnnnnnnnnnnnnnnnnnnnnnnnnnnnnnnnnnnnnnnnnnnnnnnnnnnnnnnnnnnnnnnnnnnnnnnnnnnnnnnnnnnnnnnnnnnnnnnnnnnnnnnnnnnnnnnnnnnnnnnnnnnnnnnnnnnnnnnnnnnnnnnnnnnnnnnnnnnnnnnnnnnnnnnnnnnnnnnnnnnnnnnnnnnnnnnnnnnnnnnnnnnnnnnnnnnnnnnnnnnnnnnnnnnnnnnnnnnnnnnnnnnnnnnnnnnnnnnnnnnnnnnnnnnnnnnnnnnnnnnnnnnnnnnnnnnnnnnnnnnnnnnnnnnnnnnnnnnnnnnnnnnnnnnnnnnnnnnnnnnnnnnnnnnnnnnnnnnnnnnnnnnnnnnnnnnnnnnnnnnnnnnnnnnnnnnnnnnnnnnnnnnnnnnnnnnnnnnnnnnnnnnnnnnnnnnnnnnnnnnnnnnnnnnnnnnnnnnnnnnnnnnnnnnnnnnnnnnnnnnnnnnnnnnnnnnnnnnnnnnnnnnnnnnnnnnnnnnnnnnnnnnnnnnnnnnnnnnnnnnnnnnnnnnnnnnnnnnnnnnnnnnnnnnnnnnnnnnnnnnnnnnnnnnnnnnnnnnnnnnnnnnnnnnnnnnnnnnnnnnnnnnnnnnnnnnnnnnnnnnnnnnnnnnnnnnnnnnnnnnnnnnnnnnnnnnnnnnnnnnnnnnnnnnnnnnnnnnnnnnnnnnnnnnnnnnnnnnnnnnnnnnnnnnnnnnnnnnnnnnnnnnnnnnnnnnnnnnnnnnnnnnnnnnnnnnnnnnnnnnnnnnnnnnnnnnnnnnnnnnnnnnnnnnnnnnnnnnnnnnnnnnnnnnnnnnnnnnnnnnnnnnnnnnnnnnnnnnnnnnnnnnnnnnnnnnnnnnnnnnnnnnnnnnnnnnnnnnnnnnnnnnnnnnnnnnnnnnnnnnnnnnnnnnnnnnnnnnnnnnnnnnnnnnnnnnnnnnnnnnnnnnnnnnnnnnnnnnnnnnnnnnnnnnnnnnnnnnnnnnnnnnnnnnnnnnnnnnnnnnnnnnnnnnnnnnnnnnnnnnnnnnnnnnnnnnnnnnnnnnnnnnnnnnnnnnnnnnnnnnnnnnnnnnnnnnnnnnnnnnnnnnnnnnnnnnnnnnnnnnnnnnnnnnnnnnnnnnnnnnnnnnnnnnnnnnnnnnnnnnnnnnnnnnnnnnnnnnnnnnnnnnnnnnnnnnnnnnnnnnnnnnnnnnnnnnnnnnnnnnnnnnnnnnnnnnnnnnnnnnnnnnnnnnnnnnnnnnnnnnnnnnnnnnnnnnnnnnnnnnnnnnnnnnnnnnnnnnnnnnnnnnnnnnnnnnnnnnnnnnnnnnnnnnnnnnnnnnnnnnnnnnnnnnnnnnnnnnnnnnnnnnnnnnnnnnnnnnnnnnnnnnnnnnnnnnnnnnnnnnnnnnnnnnnnnnnnnnnnnnnnnnnnnnnnnnnnnnnnnnnnnnnnnnnnnnnnnnnnnnnnnnnnnnnnnnnnnnnnnnnnnnnnnnnnnnnnnnnnnnnnnnnnnnnnnnnnnnnnnnnnnnnnnnnnnnnnnnnnnnnnnnnnnnnnnnnnnnnnnnnnnnnnnnnnnnnnnnnnnnnnnnnnnnnnnnnnnnnnnnnnnnnnnnnnnnnnnnnnnnnnnnnnnnnnnnnnnnnnnnnnnnnnnnnnnnnnnnnnnnnnnnnnnnnnnnnnnnnnnnnnnnnnnnnnnnnnnnnnnnnnnnnnnnnnnnnnnnnnnnnnnnnnnnnnnnnnnnnnnnnnnnnnnnnnnnnnnnnnnnnnnnnnnnnnnnnnnnnnnnnnnnnnnnnnnnnnnnnnnnnnnnnnnnnnnnnnnnnnnnnnnnnnnnnnnnnnnnnnnnnnnnnnnnnnnnnnnnnnnnnnnnnnnnnnnnnnnnnnnnnnnnnnnnnnnnnnnnnnnnnnnnnnnnnnnnnnnnnnnnnnnnnnnnnnnnnnnnnnnnnnnnnnnnnnnnnnnnnnnnnnnnnnnnnnnnnnnnnnnnnnnnnnnnnnnnnnnnnnnnnnnnnnnnnnnnnnnnnnnnnnnnnnnnnnnnnnnnnnnnnnnnnnnnnnnnnnnnnnnnnnnnnnnnnnnnnnnnnnnnnnnnnnnnnnnnnnnnnnnnnnnnnnnnnnnnnnnnnnnnnnnnnnnnnnnnnnnnnnnnnnnnnnnnnnnnnnnnnnnnnnnnnnnnnnnnnnnnnnnnnnnnnnnnnnnnnnnnnnnnnnnnnnnnnnnnnnnnnnnnnnnnnnnnnnnnnnnnnnnnnnnnnnnnnnnnnnnnnnnnnnnnnnnnnnnnnnnnnnnnnnnnnnnnnnnnnnnnnnnnnnnnnnnnnnnnnnnnnnnnnnnnnnnnnnnnnnnnnnnnnnnnnnnnnnnnnnnnnnnnnnnnnnnnnnnnnnnnnnnnnnnnnnnnnnnnnnnnnnnnnnnnnnnnnnnnnnnnnnnnnnnnnnnnnnnnnnnnnnnnnnnnnnnnnnnnnnnnnnnnnnnnnnnnnnnnnnnnnnnnnnnnnnnnnnnnnnnnnnnnnnnnnnnnnnnnnnnnnnnnnnnnnnnnnnnnnnnnnnnnnnnnnnnnnnnnnnnnnnnnnnnnnnnnnnnnnnnnnnnnnnnnnnnnnnnnnnnnnnnnnnnnnnnnnnnnnnnnnnnnnnnnnnnnnnnnnnnnnnnnnnnnnnnnnnnnnnnnnnnnnnnnnnnnnnnnnnnnnnnnnnnnnnnnnnnnnnnnnnnnnnnnnnnnnnnnnnnnnnnnnnnnnnnnnnnnnnnnnnnnnnnnnnnnnnnnnnnnnnnnnnnnnnnnnnnnnnnnnnnnnnnnnnnnnnnnnnnnnnnnnnnnnnnnnnnnnnnnnnnnnnnnnnnnnnnnnnnnnnnnnnnnnnnnnnnnnnnnnnnnnnnnnnnnnnnnnnnnnnnnnnnnnnnnnnnnnnnnnnnnnnnnnnnnnnnnnnnnnnnnnnnnnnnnnnnnnnnnnnnnnnnnnnnnnnnnnnnnnnnnnnnnnnnnnnnnnnnnnnnnnnnnnnnnnnnnnnnnnnnnnnnnnnnnnnnnnnnnnnnnnnnnnnnnnnnnnnnnnnnnnnnnnnnnnnnnnnnnnnnnnnnnnnnnnnnnnnnnnnnnnnnnnnnnnnnnnnnnnnnnnnnnnnnnnnnnnnnnnnnnnnnnnnnnnnnnnnnnnnnnnnnnnnnnnnnnnnnnnnnnnnnnnnnnnnnnnnnnnnnnnnnnnnnnnnnnnnnnnnnnnnnnnnnnnnnnnnnnnnnnnnnnnnnnnnnnnnnnnnnnnnnnnnnnnnnnnnnnnnnnnnnnnnnnnnnnnnnnnnnnnnnnnnnnnnnnnnnnnnnnnnnnnnnnnnnnnnnnnnnnnnnnnnnnnnnnnnnnnnnnnnnnnnnnnnnnnnnnnnnnnnnnnnnnnnnnnnnnnnnnnnnnnnnnnnnnnnnnnnnnnnnnnnnnnnnnnnnnnnnnnnnnnnnnnnnnnnnnnnnnnnnnnnnnnnnnnnnnnnnnnnnnnnnnnnnnnnnnnnnnnnnnnnnnnnnnnnnnnnnnnnnnnnnnnnnnnnnnnnnnnnnnnnnnnnnnnnnnnnnnnnnnnnnnnnnnnnnnnnnnnnnnnnnnnnnnnnnnnnnnnnnnnnnnnnnnnnnnnnnnnnnnnnnnnnnnnnnnnnnnnnnnnnnnnnnnnnnnnnnnnnnnnnnnnnnnnnnnnnnnnnnnnnnnnnnnnnnnnnnnnnnnnnnnnnnnnnnnnnnnnnnnnnnnnnnnnnnnnnnnnnnnnnnnnnnnnnnnnnnnnnnnnnnnnnnnnnnnnnnnnnnnnnnnnnnnnnnnnnnnnnnnnnnnnnnnnnnnnnnnnnnnnnnnnnnnnnnnnnnnnnnnnnnnnnnnnnnnnnnnnnnnnnnnnnnnnnnnnnnnnnnnnnnnnnnnnnnnnnnnnnnnnnnnnnnnnnnnnnnnnnnnnnnnnnnnnnnnnnnnnnnnnnnnnnnnnnnnnnnnnnnnnnnnnnnnnnnnnnnnnnnnnnnnnnnnnnnnnnnnnnnnnnnnnnnnnnnnnnnnnnnnnnnnnnnnnnnnnnnnnnnnnnnnnnnnnnnnnnnnnnnnnnnnnnnnnnnnnnnnnnnnnnnnnnnnnnnnnnnnnnnnnnnnnnnnnnnnnnnnnnnnnnnnnnnnnnnnnnnnnnnnnnnnnnnnnnnnnnnnnnnnnnnnnnnnnnnnnnnnnnnnnnnnnnnnnnnnnnnnnnnnnnnnnnnnnnnnnnnnnnnnnnnnnnnnnnnnnnnnnnnnnnnnnnnnnnnnnnnnnnnnnnnnnnnnnnnnnnnnnnnnnnnnnnnnnnnnnnnnnnnnnnnnnnnnnnnnnnnnnnnnnnnnnnnnnnnnnnnnnnnnnnnnnnnnnnnnnnnnnnnnnnnnnnnnnnnnnnnnnnnnnnnnnnnnnnnnnnnnnnnnnnnnnnnnnnnnnnnnnnnnnnnnnnnnnnnnnnnnnnnnnnnnnnnnnnnnnnnnnnnnnnnnnnnnnnnnnnnnnnnnnnnnnnnnnnnnnnnnnnnnnnnnnnnnnnnnnnnnnnnnnnnnnnnnnnnnnnnnnnnnnnnnnnnnnnnnnnnnnnnnnnnnnnnnnnnnnnnnnnnnnnnnnnnnnnnnnnnnnnnnnnnnnnnnnnnnnnnnnnnnnnnnnnnnnnnnnnnnnnnnnnnnnnnnnnnnnnnnnnnnnnnnnnnnnnnnnnnnnnnnnnnnnnnnnnnnnnnnnnnnnnnnnnnnnnnnnnnnnnnnnnnnnnnnnnnnnnnnnnnnnnnnnnnnnnnnnnnnnnnnnnnnnnnnnnnnnnnnnnnnnnnnnnnnnnnnnnnnnnnnnnnnnnnnnnnnnnnnnnnnnnnnnnnnnnnnnnnnnnnnnnnnnnnnnnnnnnnnnnnnnnnnnnnnnnnnnnnnnnnnnnnnnnnnnnnnnnnnnnnnnnnnnnnnnnnnnnnnnnnnnnnnnnnnnnnnnnnnnnnnnnnnnnnnnnnnnnnnnnnnnnnnnnnnnnnnnnnnnnnnnnnnnnnnnnnnnnnnnnnnnnnnnnnnnnnnnnnnnnnnnnnnnnnnnnnnnnnnnnnnnnnnnnnnnnnnnnnnnnnnnnnnnnnnnnnnnnnnnnnnnnnnnnnnnnnnnnnnnnnnnnnnnnnnnnnnnnnnnnnnnnnnnnnnnnnnnnnnnnnnnnnnnnnnnnnnnnnnnnnnnnnnnnnnnnnnnnnnnnnnnnnnnnnnnnnnnnnnnnnnnnnnnnnnnnnnnnnnnnnnnnnnnnnnnnnnnnnnnnnnnnnnnnnnnnnnnnnnnnnnnnnnnnnnnnnnnnnnnnnnnnnnnnnnnnnnnnnnnnnnnnnnnnnnnnnnnnnnnnnnnnnnnnnnnnnnnnnnnnnnnnnnnnnnnnnnnnnnnnnnnnnnnnnnnnnnnnnnnnnnnnnnnnnnnnnnnnnnnnnnnnnnnnnnnnnnnnnnnnnnnnnnnnnnnnnnnnnnnnnnnnnnnnnnnnnnnnnnnnnnnnnnnnnnnnnnnnnnnnnnnnnnnnnnnnnnnnnnnnnnnnnnnnnnnnnnnnnnnnnnnnnnnnnnnnnnnnnnnnnnnnnnnnnnnnnnnnnnnnnnnnnnnnnnnnnnnnnnnnnnnnnnnnnnnnnnnnnnnnnnnnnnnnnnnnnnnnnnnnnnnnnnnnnnnnnnnnnnnnnnnnnnnnnnnnnnnnnnnnnnnnnnnnnnnnnnnnnnnnnnnnnnnnnnnnnnnnnnnnnnnnnnnnnnnnnnnnnnnnnnnnnnnnnnnnnnnnnnnnnnnnnnnnnnnnnnnnnnnnnnnnnnnnnnnnnnnnnnnnnnnnnnnnnnnnnnnnnnnnnnnnnnnnnnnnnnnnnnnnnnnnnnnnnnnnnnnnnnnnnnnnnnnnnnnnnnnnnnnnnnnnnnnnnnnnnnnnnnnnnnnnnnnnnnnnnnnnnnnnnnnnnnnnnnnnnnnnnnnnnnnnnnnnnnnnnnnnnnnnnnnnnnnnnnnnnnnnnnnnnnnnnnnnnnnnnnnnnnnnnnnnnnnnnnnnnnnnnnnnnnnnnnnnnnnnnnnnnnnnnnnnnnnnnnnnnnnnnnnnnnnnnnnnnnnnnnnnnnnnnnnnnnnnnnnnnnnnnnnnnnnnnnnnnnnnnnnnnnnnnnnnnnnnnnnnnnnnnnnnnnnnnnnnnnnnnnnnnnnnnnnnnnnnnnnnnnnnnnnnnnnnnnnnnnnnnnnnnnnnnnnnnnnnnnnnnnnnnnnnnnnnnnnnnnnnnnnnnnnnnnnnnnnnnnnnnnnnnnnnnnnnnnnnnnnnnnnnnnnnnnnnnnnnnnnnnnnnnnnnnnnnnnnnnnnnnnnnnnnnnnnnnnnnnnnnnnnnnnnnnnnnnnnnnnnnnnnnnnnnnnnnnnnnnnnnnnnnnnnnnnnnnnnnnnnnnnnnnnnnnnnnnnnnnnnnnnnnnnnnnnnnnnnnnnnnnnnnnnnnnnnnnnnnnnnnnnnnnnnnnnnnnnnnnnnnnnnnnnnnnnnnnnnnnnnnnnnnnnnnnnnnnnnnnnnnnnnnnnnnnnnnnnnnnnnnnnnnnnnnnnnnnnnnnnnnnnnnnnnnnnnnnnnnnnnnnnnnnnnnnnnnnnnnnnnnnnnnnnnnnnnnnnnnnnnnnnnnnnnnnnnnnnnnnnnnnnnnnnnnnnnnnnnnnnnnnnnnnnnnnnnnnnnnnnnnnnnnnnnnnnnnnnnnnnnnnnnnnnnnnnnnnnnnnnnnnnnnnnnnnnnnnnnnnnnnnnnnnnnnnnnnnnnnnnnnnnnnnnnnnnnnnnnnnnnnnnnnnnnnnnnnnnnnnnnnnnnnnnnnnnnnnnnnnnnnnnnnnnnnnnnnnnnnnnnnnnnnnnnnnnnnnnnnnnnnnnnnnnnnnnnnnnnnnnnnnnnnnnnnnnnnnnnnnnnnnnnnnnnnnnnnnnnnnnnnnnnnnnnnnnnnnnnnnnnnnnnnnnnnnnnnnnnnnnnnnnnnnnnnnnnnnnnnnnnnnnnnnnnnnnnnnnnnnnnnnnnnnnnnnnnnnnnnnnnnnnnnnnnnnnnnnnnnnnnnnnnnnnnnnnnnnnnnnnnnnnnnnnnnnnnnnnnnnnnnnnnnnnnnnnnnnnnnnnnnnnnnnnnnnnnnnnnnnnnnnnnnnnnnnnnnnnnnnnnnnnnnnnnnnnnnnnnnnnnnnnnnnnnnnnnnnnnnnnnnnnnnnnnnnnnnnnnnnnnnnnnnnnnnnnnnnnnnnnnnnnnnnnnnnnnnnnnnnnnnnnnnnnnnnnnnnnnnnnnnnnnnnnnnnnnnnnnnnnnnnnnnnnnnnnnnnnnnnnnnnnnnnnnnnnnnnnnnnnnnnnnnnnnnnnnnnnnnnnnnnnnnnnnnnnnnnnnnnnnnnnnnnnnnnnnnnnnnnnnnnnnnnnnnnnnnnnnnnnnnnnnnnnnnnnnnnnnnnnnnnnnnnnnnnnnnnnnnnnnnnnnnnnnnnnnnnnnnnnnnnnnnnnnnnnnnnnnnnnnnnnnnnnnnnnnnnnnnnnnnnnnnnnnnnnnnnnnnnnnnnnnnnnnnnnnnnnnnnnnnnnnnnnnnnnnnnnnnnnnnnnnnnnnnnnnnnnnnnnnnnnnnnnnnnnnnnnnnnnnnnnnnnnnnnnnnnnnnnnnnnnnnnnnnnnnnnnnnnnnnnnnnnnnnnnnnnnnnnnnnnnnnnnnnnnnnnnnnnnnnnnnnnnnnnnnnnnnnnnnnnnnnnnnnnnnnnnnnnnnnnnnnnnnnnnnnnnnnnnnnnnnnnnnnnnnnnnnnnnnnnnnnnnnnnnnnnnnnnnnnnnnnnnnnnnnnnnnnnnnnnnnnnnnnnnnnnnnnnnnnnnnnnnnnnnnnnnnnnnnnnnnnnnnnnnnnnnnnnnnnnnnnnnnnnnnnnnnnnnnnnnnnnnnnnnnnnnnnnnnnnnnnnnnnnnnnnnnnnnnnnnnnnnnnnnnnnnnnnnnnnnnnnnnnnnnnnnnnnnnnnnnnnnnnnnnnnnnnnnnnnnnnnnnnnnnnnnnnnnnnnnnnnnnnnnnnnnnnnnnnnnnnnnnnnnnnnnnnnnnnnnnnnnnnnnnnnnnnnnnnnnnnnnnnnnnnnnnnnnnnnnnnnnnnnnnnnnnnnnnnnnnnnnnnnnnnnnnnnnnnnnnnnnnnnnnnnnnnnnnnnnnnnnnnnnnnnnnnnnnnnnnnnnnnnnnnnnnnnnnnnnnnnnnnnnnnnnnnnnnnnnnnnnnnnnnnnnnnnnnnnnnnnnnnnnnnnnnnnnnnnnnnnnnnnnnnnnnnnnnnnnnnnnnnnnnnnnnnnnnnnnnnnnnnnnnnnnnnnnnnnnnnnnnnnnnnnnnnnnnnnnnnnnnnnnnnnnnnnnnnnnnnnnnnnnnnnnnnnnnnnnnnnnnnnnnnnnnnnnnnnnnnnnnnnnnnnnnnnnnnnnnnnnnnnnnnnnnnnnnnnnnnnnnnnnnnnnnnnnnnnnnnnnnnnnnnnnnnnnnnnnnnnnnnnnnnnnnnnnnnnnnnnnnnnnnnnnnnnnnnnnnnnnnnnnnnnnnnnnnnnnnnnnnnnnnnnnnnnnnnnnnnnnnnnnnnnnnnnnnnnnnnnnnnnnnnnnnnnnnnnnnnnnnnnnnnnnnnnnnnnnnnnnnnnnnnnnnnnnnnnnnnnnnnnnnnnnnnnnnnnnnnnnnnnnnnnnnnnnnnnnnnnnnnnnnnnnnnnnnnnnnnnnnnnnnnnnnnnnnnnnnnnnnnnnnnnnnnnnnnnnnnnnnnnnnnnnnnnnnnnnnnnnnnnnnnnnnnnnnnnnnnnnnnnnnnnnnnnnnnnnnnnnnnnnnnnnnnnnnnnnnnnnnnnnnnnnnnnnnnnnnnnnnnnnnnnnnnnnnnnnnnnnnnnnnnnnnnnnnnnnnnnnnnnnnnnnnnnnnnnnnnnnnnnnnnnnnnnnnnnnnnnnnnnnnnnnnnnnnnnnnnnnnnnnnnnnnnnnnnnnnnnnnnnnnnnnnnnnnnnnnnnnnnnnnnnnnnnnnnnnnnnnnnnnnnnnnnnnnnnnnnnnnnnnnnnnnnnnnnnnnnnnnnnnnnnnnnnnnnnnnnnnnnnnnnnnnnnnnnnnnnnnnnnnnnnnnnnnnnnnnnnnnnnnnnnnnnnnnnnnnnnnnnnnnnnnnnnnnnnnnnnnnnnnnnnnnnnnnnnnnnnnnnnnnnnnnnnnnnnnnnnnnnnnnnnnnnnnnnnnnnnnnnnnnnnnnnnnnnnnnnnnnnnnnnnnnnnnnnnnnnnnnnnnnnnnnnnnnnnnnnnnnnnnnnnnnnnnnnnnnnnnnnnnnnnnnnnnnnnnnnnnnnnnnnnnnnnnnnnnnnnnnnnnnnnnnnnnnnnnnnnnnnnnnnnnnnnnnnnnnnnnnnnnnnnnnnnnnnnnnnnnnnnnnnnnnnnnnnnnnnnnnnnnnnnnnnnnnnnnnnnnnnnnnnnnnnnnnnnnnnnnnnnnnnnnnnnnnnnnnnnnnnnnnnnnnnnnnnnnnnnnnnnnnnnnnnnnnnnnnnnnnnnnnnnnnnnnnnnnnnnnnnnnnnnnnnnnnnnnnnnnnnnnnnnnnnnnnnnnnnnnnnnnnnnnnnnnnnnnnnnnnnnnnnnnnnnnnnnnnnnnnnnnnnnnnnnnnnnnnnnnnnnnnnnnnnnnnnnnnnnnnnnnnnnnnnnnnnnnnnnnnnnnnnnnnnnnnnnnnnnnnnnnnnnnnnnnnnnnnnnnnnnnnnnnnnnnnnnnnnnnnnnnnnnnnnnnnnnnnnnnnnnnnnnnnnnnnnnnnnnnnnnnnnnnnnnnnnnnnnnnnnnnnnnnnnnnnnnnnnnnnnnnnnnnnnnnnnnnnnnnnnnnnnnnnnnnnnnnnnnnnnnnnnnnnnnnnnnnnnnnnnnnnnnnnnnnnnnnnnnnnnnnnnnnnnnnnnnnnnnnnnnnnnnnnnnnnnnnnnnnnnnnnnnnnnnnnnnnnnnnnnnnnnnnnnnnnnnnnnnnnnnnnnnnnnnnnnnnnnnnnnnnnnnnnnnnnnnnnnnnnnnnnnnnnnnnnnnnnnnnnnnnnnnnnnnnnnnnnnnnnnnnnnnnnnnnnnnnnnnnnnnnnnnnnnnnnnnnnnnnnnnnnnnnnnnnnnnnnnnnnnnnnnnnnnnnnnnnnnnnnnnnnnnnnnnnnnnnnnnnnnnnnnnnnnnnnnnnnnnnnnnnnnnnnnnnnnnnnnnnnnnnnnnnnnnnnnnnnnnnnnnnnnnnnnnnnnnnnnnnnnnnnnnnnnnnnnnnnnnnnnnnnnnnnnnnnnnnnnnnnnnnnnnnnnnnnnnnnnnnnnnnnnnnnnnnnnnnnnnnnnnnnnnnnnnnnnnnnnnnnnnnnnnnnnnnnnnnnnnnnnnnnnnnnnnnnnnnnnnnnnnnnnnnnnnnnnnnnnnnnnnnnnnnnnnnnnnnnnnnnnnnnnnnnnnnnnnnnnnnnnnnnnnnnnnnnnnnnnnnnnnnnnnnnnnnnnnnnnnnnnnnnnnnnnnnnnnnnnnnnnnnnnnnnnnnnnnnnnnnnnnnnnnnnnnnnnnnnnnnnnnnnnnnnnnnnnnnnnnnnnnnnnnnnnnnnnnnnnnnnnnnnnnnnnnnnnnnnnnnnnnnnnnnnnnnnnnnnnnnnnnnnnnnnnnnnnnnnnnnnnnnnnnnnnnnnnnnnnnnnnnnnnnnnnnnnnnnnnnnnnnnnnnnnnnnnnnnnnnnnnnnnnnnnnnnnnnnnnnnnnnnnnnnnnnnnnnnnnnnnnnnnnnnnnnnnnnnnnnnnnnnnnnnnnnnnnnnnnnnnnnnnnnnnnnnnnnnnnnnnnnnnnnnnnnnnnnnnnnnnnnnnnnnnnnnnnnnnnnnnnnnnnnnnnnnnnnnnnnnnnnnnnnnnnnnnnnnnnnnnnnnnnnnnnnnnnnnnnnnnnnnnnnnnnnnnnnnnnnnnnnnnnnnnnnnnnnnnnnnnnnnnnnnnnnnnnnnnnnnnnnnnnnnnnnnnnnnnnnnnnnnnnnnnnnnnnnnnnnnnnnnnnnnnnnnnnnnnnnnnnnnnnnnnnnnnnnnnnnnnnnnnnnnnnnnnnnnnnnnnnnnnnnnnnnnnnnnnnnnnnnnnnnnnnnnnnnnnnnnnnnnnnnnnnnnnnnnnnnnnnnnnnnnnnnnnnnnnnnnnnnnnnnnnnnnnnnnnnnnnnnnnnnnnnnnnnnnnnnnnnnnnnnnnnnnnnnnnnnnnnnnnnnnnnnnnnnnnnnnnnnnnnnnnnnnnnnnnnnnnnnnnnnnnnnnnnnnnnnnnnnnnnnnnnnnnnnnnnnnnnnnnnnnnnnnnnnnnnnnnnnnnnnnnnnnnnnnnnnnnnnnnnnnnnnnnnnnnnnnnnnnnnnnnnnnnnnnnnnnnnnnnnnnnnnnnnnnnnnnnnnnnnnnnnnnnnnnnnnnnnnnnnnnnnnnnnnnnnnnnnnnnnnnnnnnnnnnnnnnnnnnnnnnnnnnnnnnnnnnnnnnnnnnnnnnnnnnnnnnnnnnnnnnnnnnnnnnnnnnnnnnnnnnnnnnnnnnnnnnnnnnnnnnnnnnnnnnnnnnnnnnnnnnnnnnnnnnnnnnnnnnnnnnnnnnnnnnnnnnnnnnnnnnnnnnnnnnnnnnnnnnnnnnnnnnnnnnnnnnnnnnnnnnnnnnnnnnnnnnnnnnnnnnnnnnnnnnnnnnnnnnnnnnnnnnnnnnnnnnnnnnnnnnnnnnnnnnnnnnnnnnnnnnnnnnnnnnnnnnnnnnnnnnnnnnnnnnnnnnnnnnnnnnnnnnnnnnnnnnnnnnnnnnnnnnnnnnnnnnnnnnnnnnnnnnnnnnnnnnnnnnnnnnnnnnnnnnnnnnnnnnnnnnnnnnnnnnnnnnnnnnnnnnnnnnnnnnnnnnnnnnnnnnnnnnnnnnnnnnnnnnnnnnnnnnnnnnnnnnnnnnnnnnnnnnnnnnnnnnnnnnnnnnnnnnnnnnnnnnnnnnnnnnnnnnnnnnnnnnnnnnnnnnnnnnnnnnnnnnnnnnnnnnnnnnnnnnnnnnnnnnnnnnnnnnnnnnnnnnnnnnnnnnnnnnnnnnnnnnnnnnnnnnnnnnnnnnnnnnnnnnnnnnnnnnnnnnnnnnnnnnnnnnnnnnnnnnnnnnnnnnnnnnnnnnnnnnnnnnnnnnnnnnnnnnnnnnnnnnnnnnnnnnnnnnnnnnnnnnnnnnnnnnnnnnnnnnnnnnnnnnnnnnnnnnnnnnnnnnnnnnnnnnnnnnnnnnnnnnnnnnnnnnnnnnnnnnnnnnnnnnnnnnnnnnnnnnnnnnnnnnnnnnnnnnnnnnnnnnnnnnnnnnnnnnnnnnnnnnnnnnnnnnnnnnnnnnnnnnnnnnnnnnnnnnnnnnnnnnnnnnnnnnnnnnnnnnnnnnnnnnnnnnnnnnnnnnnnnnnnnnnnnnnnnnnnnnnnnnnnnnnnnnnnnnnnnnnnnnnnnnnnnnnnnnnnnnnnnnnnnnnnnnnnnnnnnnnnnnnnnnnnnnnnnnnnnnnnnnnnnnnnnnnnnnnnnnnnnnnnnnnnnnnnnnnnnnnnnnnnnnnnnnnnnnnnnnnnnnnnnnnnnnnnnnnnnnnnnnnnnnnnnnnnnnnnnnnnnnnnnnnnnnnnnnnnnnnnnnnnnnnnnnnnnnnnnnnnnnnnnnnnnnnnnnnnnnnnnnnnnnnnnnnnnnnnnnnnnnnnnnnnnnnnnnnnnnnnnnnnnnnnnnnnnnnnnnnnnnnnnnnnnnnnnnnnnnnnnnnnnnnnnnnnnnnnnnnnnnnnnnnnnnnnnnnnnnnnnnnnnnnnnnnnnnnnnnnnnnnnnnnnnnnnnnnnnnnnnnnnnnnnnnnnnnnnnnnnnnnnnnnnnnnnnnnnnnnnnnnnnnnnnnnnnnnnnnnnnnnnnnnnnnnnnnnnnnnnnnnnnnnnnnnnnnnnnnnnnnnnnnnnnnnnnnnnnnnnnnnnnnnnnnnnnnnnnnnnnnnnnnnnnnnnnnnnnnnnnnnnnnnnnnnnnnnnnnnnnnnnnnnnnnnnnnnnnnnnnnnnnnnnnnnnnnnnnnnnnnnnnnnnnnnnnnnnnnnnnnnnnnnnnnnnnnnnnnnnnnnnnnnnnnnnnnnnnnnnnnnnnnnnnnnnnnnnnnnnnnnnnnnnnnnnnnnnnnnnnnnnnnnnnnnnnnnnnnnnnnnnnnnnnnnnnnnnnnnnnnnnnnnnnnnnnnnnnnnnnnnnnnnnnnnnnnnnnnnnnnnnnnnnnnnnnnnnnnnnnnnnnnnnnnnnnnnnnnnnnnnnnnnnnnnnnnnnnnnnnnnnnnnnnnnnnnnnnnnnnnnnnnnnnnnnnnnnnnnnnnnnnnnnnnnnnnnnnnnnnnnnnnnnnnnnnnnnnnnnnnnnnnnnnnnnnnnnnnnnnnnnnnnnnnnnnnnnnnnnnnnnnnnnnnnnnnnnnnnnnnnnnnnnnnnnnnnnnnnnnnnnnnnnnnnnnnnnnnnnnnnnnnnnnnnnnnnnnnnnnnnnnnnnnnnnnnnnnnnnnnnnnnnnnnnnnnnnnnnnnnnnnnnnnnnnnnnnnnnnnnnnnnnnnnnnnnnnnnnnnnnnnnnnnnnnnnnnnnnnnnnnnnnnnnnnnnnnnnnnnnnnnnnnnnnnnnnnnnnnnnnnnnnnnnnnnnnnnnnnnnnnnnnnnnnnnnnnnnnnnnnnnnnnnnnnnnnnnnnnnnnnnnnnnnnnnnnnnnnnnnnnnnnnnnnnnnnnnnnnnnnnnnnnnnnnnnnnnnnnnnnnnnnnnnnnnnnnnnnnnnnnnnnnnnnnnnnnnnnnnnnnnnnnnnnnnnnnnnnnnnnnnnnnnnnnnnnnnnnnnnnnnnnnnnnnnnnnnnnnnnnnnnnnnnnnnnnnnnnnnnnnnnnnnnnnnnnnnnnnnnnnnnnnnnnnnnnnnnnnnnnnnnnnnnnnnnnnnnnnnnnnnnnnnnnnnnnnnnnnnnnnnnnnnnnnnnnnnnnnnnnnnnnnnnnnnnnnnnnnnnnnnnnnnnnnnnnnnnnnnnnnnnnnnnnnnnnnnnnnnnnnnnnnnnnnnnnnnnnnnnnnnnnnnnnnnnnnnnnnnnnnnnnnnnnnnnnnnnnnnnnnnnnnnnnnnnnnnnnnnnnnnnnnnnnnnnnnnnnnnnnnnnnnnnnnnnnnnnnnnnnnnnnnnnnnnnnnnnnnnnnnnnnnnnnnnnnnnnnnnnnnnnnnnnnnnnnnnnnnnnnnnnnnnnnnnnnnnnnnnnnnnnnnnnnnnnnnnnnnnnnnnnnnnnnnnnnnnnnnnnnnnnnnnnnnnnnnnnnnnnnnnnnnnnnnnnnnnnnnnnnnnnnnnnnnnnnnnnnnnnnnnnnnnnnnnnnnnnnnnnnnnnnnnnnnnnnnnnnnnnnnnnnnnnnnnnnnnnnnnnnnnnnnnnnnnnnnnnnnnnnnnnnnnnnnnnnnnnnnnnnnnnnnnnnnnnnnnnnnnnnnnnnnnnnnnnnnnnnnnnnnnnnnnnnnnnnnnnnnnnnnnnnnnnnnnnnnnnnnnnnnnnnnnnnnnnnnnnnnnnnnnnnnnnnnnnnnnnnnnnnnnnnnnnnnnnnnnnnnnnnnnnnnnnnnnnnnnnnnnnnnnnnnnnnnnnnnnnnnnnnnnnnnnnnnnnnnnnnnnnnnnnnnnnnnnnnnnnnnnnnnnnnnnnnnnnnnnnnnnnnnnnnnnnnnnnnnnnnnnnnnnnnnnnnnnnnnnnnnnnnnnnnnnnnnnnnnnnnnnnnnnnnnnnnnnnnnnnnnnnnnnnnnnnnnnnnnnnnnnnnnnnnnnnnnnnnnnnnnnnnnnnnnnnnnnnnnnnnnnnnnnnnnnnnnnnnnnnnnnnnnnnnnnnnnnnnnnnnnnnnnnnnnnnnnnnnnnnnnnnnnnnnnnnnnnnnnnnnnnnnnnnnnnnnnnnnnnnnnnnnnnnnnnnnnnnnnnnnnnnnnnnnnnnnnnnnnnnnnnnnnnnnnnnnnnnnnnnnnnnnnnnnnnnnnnnnnnnnnnnnnnnnnnnnnnnnnnnnnnnnnnnnnnnnnnnnnnnnnnnnnnnnnnnnnnnnnnnnnnnnnnnnnnnnnnnnnnnnnnnnnnnnnnnnnnnnnnnnnnnnnnnnnnnnnnnnnnnnnnnnnnnnnnnnnnnnnnnnnnnnnnnnnnnnnnnnnnnnnnnnnnnnnnnnnnnnnnnnnnnnnnnnnnnnnnnnnnnnnnnnnnnnnnnnnnnnnnnnnnnnnnnnnnnnnnnnnnnnnnnnnnnnnnnnnnnnnnnnnnnnnnnnnnnnnnnnnnnnnnnnnnnnnnnnnnnnnnnnnnnnnnnnnnnnnnnnnnnnnnnnnnnnnnnnnnnnnnnnnnnnnnnnnnnnnnnnnnnnnnnnnnnnnnnnnnnnnnnnnnnnnnnnnnnnnnnnnnnnnnnnnnnnnnnnnnnnnnnnnnnnnnnnnnnnnnnnnnnnnnnnnnnnnnnnnnnnnnnnnnnnnnnnnnnnnnnnnnnnnnnnnnnnnnnnnnnnnnnnnnnnnnnnnnnnnnnnnnnnnnnnnnnnnnnnnnnnnnnnnnnnnnnnnnnnnnnnnnnnnnnnnnnnnnnnnnnnnnnnnnnnnnnnnnnnnnnnnnnnnnnnnnnnnnnnnnnnnnnnnnnnnnnnnnnnnnnnnnnnnnnnnnnnnnnnnnnnnnnnnnnnnnnnnnnnnnnnnnnnnnnnnnnnnnnnnnnnnnnnnnnnnnnnnnnnnnnnnnnnnnnnnnnnnnnnnnnnnnnnnnnnnnnnnnnnnnnnnnnnnnnnnnnnnnnnnnnnnnnnnnnnnnnnnnnnnnnnnnnnnnnnnnnnnnnnnnnnnnnnnnnnnnnnnnnnnnnnnnnnnnnnnnnnnnnnnnnnnnnnnnnnnnnnnnnnnnnnnnnnnnnnnnnnnnnnnnnnnnnnnnnnnnnnnnnnnnnnnnnnnnnnnnnnnnnnnnnnnnnnnnnnnnnnnnnnnnnnnnnnnnnnnnnnnnnnnnnnnnnnnnnnnnnnnnnnnnnnnnnnnnnnnnnnnnnnnnnnnnnnnnnnnnnnnnnnnnnnnnnnnnnnnnnnnnnnnnnnnnnnnnnnnnnnnnnnnnnnnnnnnnnnnnnnnnnnnnnnnnnnnnnnnnnnnnnnnnnnnnnnnnnnnnnnnnnnnnnnnnnnnnnnnnnnnnnnnnnnnnnnnnnnnnnnnnnnnnnnnnnnnnnnnnnnnnnnnnnnnnnnnnnnnnnnnnnnnnnnnnnnnnnnnnnnnnnnnnnnnnnnnnnnnnnnnnnnnnnnnnnnnnnnnnnnnnnnnnnnnnnnnnnnnnnnnnnnnnnnnnnnnnnnnnnnnnnnnnnnnnnnnnnnnnnnnnnnnnnnnnnnnnnnnnnnnnnnnnnnnnnnnnnnnnnnnnnnnnnnnnnnnnnnnnnnnnnnnnnnnnnnnnnnnnnnnnnnnnnnnnnnnnnnnnnnnnnnnnnnnnnnnnnnnnnnnnnnnnnnnnnnnnnnnnnnnnnnnnnnnnnnnnnnnnnnnnnnnnnnnnnnnnnnnnnnnnnnnnnnnnnnnnnnnnnnnnnnnnnnnnnnnnnnnnnnnnnnnnnnnnnnnnnnnnnnnnnnnnnnnnnnnnnnnnnnnnnnnnnnnnnnnnnnnnnnnnnnnnnnnnnnnnnnnnnnnnnnnnnnnnnnnnnnnnnnnnnnnnnnnnnnnnnnnnnnnnnnnnnnnnnnnnnnnnnnnnnnnnnnnnnnnnnnnnnnnnnnnnnnnnnnnnnnnnnnnnnnnnnnnnnnnnnnnnnnnnnnnnnnnnnnnnnnnnnnnnnnnnnnnnnnnnnnnnnnnnnnnnnnnnnnnnnnnnnnnnnnnnnnnnnnnnnnnnnnnnnnnnnnnnnnnnnnnnnnnnnnnnnnnnnnnnnnnnnnnnnnnnnnnnnnnnnnnnnnnnnnnnnnnnnnnnnnnnnnnnnnnnnnnnnnnnnnnnnnnnnnnnnnnnnnnnnnnnnnnnnnnnnnnnnnnnnnnnnnnnnnnnnnnnnnnnnnnnnnnnnnnnnnnnnnnnnnnnnnnnnnnnnnnnnnnnnnnnnnnnnnnnnnnnnnnnnnnnnnnnnnnnnnnnnnnnnnnnnnnnnnnnnnnnnnnnnnnnnnnnnnnnnnnnnnnnnnnnnnnnnnnnnnnnnnnnnnnnnnnnnnnnnnnnnnnnnnnnnnnnnnnnnnnnnnnnnnnnnnnnnnnnnnnnnnnnnnnnnnnnnnnnnnnnnnnnnnnnnnnnnnnnnnnnnnnnnnnnnnnnnnnnnnnnnnnnnnnnnnnnnnnnnnnnnnnnnnnnnnnnnnnnnnnnnnnnnnnnnnnnnnnnnnnnnnnnnnnnnnnnnnnnnnnnnnnnnnnnnnnnnnnnnnnnnnnnnnnnnnnnnnnnnnnnnnnnnnnnnnnnnnnnnnnnnnnnnnnnnnnnnnnnnnnnnnnnnnnnnnnnnnnnnnnnnnnnnnnnnnnnnnnnnnnnnnnnnnnnnnnnnnnnnnnnnnnnnnnnnnnnnnnnnnnnnnnnnnnnnnnnnnnnnnnnnnnnnnnnnnnnnnnnnnnnnnnnnnnnnnnnnnnnnnnnnnnnnnnnnnnnnnnnnnnnnnnnnnnnnnnnnnnnnnnnnnnnnnnnnnnnnnnnnnnnnnnnnnnnnnnnnnnnnnnnnnnnnnnnnnnnnnnnnnnnnnnnnnnnnnnnnnnnnnnnnnnnnnnnnnnnnnnnnnnnnnnnnnnnnnnnnnnnnnnnnnnnnnnnnnnnnnnnnnnnnnnnnnnnnnnnnnnnnnnnnnnnnnnnnnnnnnnnnnnnnnnnnnnnnnnnnnnnnnnnnnnnnnnnnnnnnnnnnnnnnnnnnnnnnnnnnnnnnnnnnnnnnnnnnnnnnnnnnnnnnnnnnnnnnnnnnnnnnnnnnnnnnnnnnnnnnnnnnnnnnnnnnnnnnnnnnnnnnnnnnnnnnnnnnnnnnnnnnnnnnnnnnnnnnnnnnnnnnnnnnnnnnnnnnnnnnnnnnnnnnnnnnnnnnnnnnnnnnnnnnnnnnnnnnnnnnnnnnnnnnnnnnnnnnnnnnnnnnnnnnnnnnnnnnnnnnnnnnnnnnnnnnnnnnnnnnnnnnnnnnnnnnnnnnnnnnnnnnnnnnnnnnnnnnnnnnnnnnnnnnnnnnnnnnnnnnnnnnnnnnnnnnnnnnnnnnnnnnnnnnnnnnnnnnnnnnnnnnnnnnnnnnnnnnnnnnnnnnnnnnnnnnnnnnnnnnnnnnnnnnnnnnnnnnnnnnnnnnnnnnnnnnnnnnnnnnnnnnnnnnnnnnnnnnnnnnnnnnnnnnnnnnnnnnnnnnnnnnnnnnnnnnnnnnnnnnnnnnnnnnnnnnnnnnnnnnnnnnnnnnnnnnnnnnnnnnnnnnnnnnnnnnnnnnnnnnnnnnnnnnnnnnnnnnnnnnnnnnnnnnnnnnnnnnnnnnnnnnnnnnnnnnnnnnnnnnnnnnnnnnnnnnnnnnnnnnnnnnnnnnnnnnnnnnnnnnnnnnnnnnnnnnnnnnnnnnnnnnnnnnnnnnnnnnnnnnnnnnnnnnnnnnnnnnnnnnnnnnnnnnnnnnnnnnnnnnnnnnnnnnnnnnnnnnnnnnnnnnnnnnnnnnnnnnnnnnnnnnnnnnnnnnnnnnnnnnnnnnnnnnnnnnnnnnnnnnnnnnnnnnnnnnnnnnnnnnnnnnnnnnnnnnnnnnnnnnnnnnnnnnnnnnnnnnnnnnnnnnnnnnnnnnnnnnnnnnnnnnnnnnnnnnnnnnnnnnnnnnnnnnnnnnnnnnnnnnnnnnnnnnnnnnnnnnnnnnnnnnnnnnnnnnnnnnnnnnnnnnnnnnnnnnnnnnnnnnnnnnnnnnnnnnnnnnnnnnnnnnnnnnnnnnnnnnnnnnnnnnnnnnnnnnnnnnnnnnnnnnnnnnnnnnnnnnnnnnnnnnnnnnnnnnnnnnnnnnnnnnnnnnnnnnnnnnnnnnnnnnnnnnnnnnnnnnnnnnnnnnnnnnnnnnnnnnnnnnnnnnnnnnnnnnnnnnnnnnnnnnnnnnnnnnnnnnnnnnnnnnnnnnnnnnnnnnnnnnnnnnnnnnnnnnnnnnnnnnnnnnnnnnnnnnnnnnnnnnnnnnnnnnnnnnnnnnnnnnnnnnnnnnnnnnnnnnnnnnnnnnnnnnnnnnnnnnnnnnnnnnnnnnnnnnnnnnnnnnnnnnnnnnnnnnnnnnnnnnnnnnnnnnnnnnnnnnnnnnnnnnnnnnnnnnnnnnnnnnnnnnnnnnnnnnnnnnnnnnnnnnnnnnnnnnnnnnnnnnnnnnnnnnnnnnnnnnnnnnnnnnnnnnnnnnnnnnnnnnnnnnnnnnnnnnnnnnnnnnnnnnnnnnnnnnnnnnnnnnnnnnnnnnnnnnnnnnnnnnnnnnnnnnnnnnnnnnnnnnnnnnnnnnnnnnnnnnnnnnnnnnnnnnnnnnnnnnnnnnnnnnnnnnnnnnnnnnnnnnnnnnnnnnnnnnnnnnnnnnnnnnnnnnnnnnnnnnnnnnnnnnnnnnnnnnnnnnnnnnnnnnnnnnnnnnnnnnnnnnnnnnnnnnnnnnnnnnnnnnnnnnnnnnnnnnnnnnnnnnnnnnnnnnnnnnnnnnnnnnnnnnnnnnnnnnnnnnnnnnnnnnnnnnnnnnnnnnnnnnnnnnnnnnnnnnnnnnnnnnnnnnnnnnnnnnnnnnnnnnnnnnnnnnnnnnnnnnnnnnnnnnnnnnnnnnnnnnnnnnnnnnnnnnnnnnnnnnnnnnnnnnnnnnnnnnnnnnnnnnnnnnnnnnnnnnnnnnnnnnnnnnnnnnnnnnnnnnnnnnnnnnnnnnnnnnnnnnnnnnnnnnnnnnnnnnnnnnnnnnnnnnnnnnnnnnnnnnnnnnnnnnnnnnnnnnnnnnnnnnnnnnnnnnnnnnnnnnnnnnnnnnnnnnnnnnnnnnnnnnnnnnnnnnnnnnnnnnnnnnnnnnnnnnnnnnnnnnnnnnnnnnnnnnnnnnnnnnnnnnnnnnnnnnnnnnnnnnnnnnnnnnnnnnnnnnnnnnnnnnnnnnnnnnnnnnnnnnnnnnnnnnnnnnnnnnnnnnnnnnnnnnnnnnnnnnnnnnnnnnnnnnnnnnnnnnnnnnnnnnnnnnnnnnnnnnnnnnnnnnnnnnnnnnnnnnnnnnnnnnnnnnnnnnnnnnnnnnnnnnnnnnnnnnnnnnnnnnnnnnnnnnnnnnnnnnnnnnnnnnnnnnnnnnnnnnnnnnnnnnnnnnnnnnnnnnnnnnnnnnnnnnnnnnnnnnnnnnnnnnnnnnnnnnnnnnnnnnnnnnnnnnnnnnnnnnnnnnnnnnnnnnnnnnnnnnnnnnnnnnnnnnnnnnnnnnnnnnnnnnnnnnnnnnnnnnnnnnnnnnnnnnnnnnnnnnnnnnnnnnnnnnnnnnnnnnnnnnnnnnnnnnnnnnnnnnnnnnnnnnnnnnnnnnnnnnnnnnnnnnnnnnnnnnnnnnnnnnnnnnnnnnnnnnnnnnnnnnnnnnnnnnnnnnnnnnnnnnnnnnnnnnnnnnnnnnnnnnnnnnnnnnnnnnnnnnnnnnnnnnnnnnnnnnnnnnnnnnnnnnnnnnnnnnnnnnnnnnnnnnnnnnnnnnnnnnnnnnnnnnnnnnnnnnnnnnnnnnnnnnnnnnnnnnnnnnnnnnnnnnnnnnnnnnnnnnnnnnnnnnnnnnnnnnnnnnnnnnnnnnnnnnnnnnnnnnnnnnnnnnnnnnnnnnnnnnnnnnnnnnnnnnnnnnnnnnnnnnnnnnnnnnnnnnnnnnnnnnnnnnnnnnnnnnnnnnnnnnnnnnnnnnnnnnnnnnnnnnnnnnnnnnnnnnnnnnnnnnnnnnnnnnnnnnnnnnnnnnnnnnnnnnnnnnnnnnnnnnnnnnnnnnnnnnnnnnnnnnnnnnnnnnnnnnnnnnnnnnnnnnnnnnnnnnnnnnnnnnnnnnnnnnnnnnnnnnnnnnnnnnnnnnnnnnnnnnnnnnnnnnnnnnnnnnnnnnnnnnnnnnnnnnnnnnnnnnnnnnnnnnnnnnnnnnnnnnnnnnnnnnnnnnnnnnnnnnnnnnnnnnnnnnnnnnnnnnnnnnnnnnnnnnnnnnnnnnnnnnnnnnnnnnnnnnnnnnnnnnnnnnnnnnnnnnnnnnnnnnnnnnnnnnnnnnnnnnnnnnnnnnnnnnnnnnnnnnnnnnnnnnnnnnnnnnnnnnnnnnnnnnnnnnnnnnnnnnnnnnnnnnnnnnnnnnnnnnnnnnnnnnnnnnnnnnnnnnnnnnnnnnnnnnnnnnnnnnnnnnnnnnnnnnnnnnnnnnnnnnnnnnnnnnnnnnnnnnnnnnnnnnnnnnnnnnnnnnnnnnnnnnnnnnnnnnnnnnnnnnnnnnnnnnnnnnnnnnnnnnnnnnnnnnnnnnnnnnnnnnnnnnnnnnnnnnnnnnnnnnnnnnnnnnnnnnnnnnnnnnnnnnnnnnnnnnnnnnnnnnnnnnnnnnnnnnnnnnnnnnnnnnnnnnnnnnnnnnnnnnnnnnnnnnnnnnnnnnnnnnnnnnnnnnnnnnnnnnnnnnnnnnnnnnnnnnnnnnnnnnnnnnnnnnnnnnnnnnnnnnnnnnnnnnnnnnnnnnnnnnnnnnnnnnnnnnnnnnnnnnnnnnnnnnnnnnnnnnnnnnnnnnnnnnnnnnnnnnnnnnnnnnnnnnnnnnnnnnnnnnnnnnnnnnnnnnnnnnnnnnnnnnnnnnnnnnnnnnnnnnnnnnnnnnnnnnnnnnnnnnnnnnnnnnnnnnnnnnnnnnnnnnnnnnnnnnnnnnnnnnnnnnnnnnnnnnnnnnnnnnnnnnnnnnnnnnnnnnnnnnnnnnnnnnnnnnnnnnnnnnnnnnnnnnnnnnnnnnnnnnnnnnnnnnnnnnnnnnnnnnnnnnnnnnnnnnnnnnnnnnnnnnnnnnnnnnnnnnnnnnnnnnnnnnnnnnnnnnnnnnnnnnnnnnnnnnnnnnnnnnnnnnnnnnnnnnnnnnnnnnnnnnnnnnnnnnnnnnnnnnnnnnnnnnnnnnnnnnnnnnnnnnnnnnnnnnnnnnnnnnnnnnnnnnnnnnnnnnnnnnnnnnnnnnnnnnnnnnnnnnnnnnnnnnnnnnnnnnnnnnnnnnnnnnnnnnnnnnnnnnnnnnnnnnnnnnnnnnnnnnnnnnnnnnnnnnnnnnnnnnnnnnnnnnnnnnnnnnnnnnnnnnnnnnnnnnnnnnnnnnnnnnnnnnnnnnnnnnnnnnnnnnnnnnnnnnnnnnnnnnnnnnnnnnnnnnnnnnnnnnnnnnnnnnnnnnnnnnnnnnnnnnnnnnnnnnnnnnnnnnnnnnnnnnnnnnnnnnnnnnnnnnnnnnnnnnnnnnnnnnnnnnnnnnnnnnnnnnnnnnnnnnnnnnnnnnnnnnnnnnnnnnnnnnnnnnnnnnnnnnnnnnnnnnnnnnnnnnnnnnnnnnnnnnnnnnnnnnnnnnnnnnnnnnnnnnnnnnnnnnnnnnnnnnnnnnnnnnnnnnnnnnnnnnnnnnnnnnnnnnnnnnnnnnnnnnnnnnnnnnnnnnnnnnnnnnnnnnnnnnnnnnnnnnnnnnnnnnnnnnnnnnnnnnnnnnnnnnnnnnnnnnnnnnnnnnnnnnnnnnnnnnnnnnnnnnnnnnnnnnnnnnnnnnnnnnnnnnnnnnnnnnnnnnnnnnnnnnnnnnnnnnnnnnnnnnnnnnnnnnnnnnnnnnnnnnnnnnnnnnnnnnnnnnnnnnnnnnnnnnnnnnnnnnnnnnnnnnnnnnnnnnnnnnnnnnnnnnnnnnnnnnnnnnnnnnnnnnnnnnnnnnnnnnnnnnnnnnnnnnnnnnnnnnnnnnnnnnnnnnnnnnnnnnnnnnnnnnnnnnnnnnnnnnnnnnnnnnnnnnnnnnnnnnnnnnnnnnnnnnnnnnnnnnnnnnnnnnnnnnnnnnnnnnnnnnnnnnnnnnnnnnnnnnnnnnnnnnnnnnnnnnnnnnnnnnnnnnnnnnnnnnnnnnnnnnnnnnnnnnnnnnnnnnnnnnnnnnnnnnnnnnnnnnnnnnnnnnnnnnnnnnnnnnnnnnnnnnnnnnnnnnnnnnnnnnnnnnnnnnnnnnnnnnnnnnnnnnnnnnnnnnnnnnnnnnnnnnnnnnnnnnnnnnnnnnnnnnnnnnnnnnnnnnnnnnnnnnnnnnnnnnnnnnnnnnnnnnnnnnnnnnnnnnnnnnnnnnnnnnnnnnnnnnnnnnnnnnnnnnnnnnnnnnnnnnnnnnnnnnnnnnnnnnnnnnnnnnnnnnnnnnnnnnnnnnnnnnnnnnnnnnnnnnnnnnnnnnnnnnnnnnnnnnnnnnnnnnnnnnnnnnnnnnnnnnnnnnnnnnnnnnnnnnnnnnnnnnnnnnnnnnnnnnnnnnnnnnnnnnnnnnnnnnnnnnnnnnnnnnnnnnnnnnnnnnnnnnnnnnnnnnnnnnnnnnnnnnnnnnnnnnnnnnnnnnnnnnnnnnnnnnnnnnnnnnnnnnnnnnnnnnnnnnnnnnnnnnnnnnnnnnnnnnnnnnnnnnnnnnnnnnnnnnnnnnnnnnnnnnnnnnnnnnnnnnnnnnnnnnnnnnnnnnnnnnnnnnnnnnnnnnnnnnnnnnnnnnnnnnnnnnnnnnnnnnnnnnnnnnnnnnnnnnnnnnnnnnnnnnnnnnnnnnnnnnnnnnnnnnnnnnnnnnnnnnnnnnnnnnnnnnnnnnnnnnnnnnnnnnnnnnnnnnnnnnnnnnnnnnnnnnnnnnnnnnnnnnnnnnnnnnnnnnnnnnnnnnnnnnnnnnnnnnnnnnnnnnnnnnnnnnnnnnnnnnnnnnnnnnnnnnnnnnnnnnnnnnnnnnnnnnnnnnnnnnnnnnnnnnnnnnnnnnnnnnnnnnnnnnnnnnnnnnnnnnnnnnnnnnnnnnnnnnnnnnnnnnnnnnnnnnnnnnnnnnnnnnnnnnnnnnnnnnnnnnnnnnnnnnnnnnnnnnnnnnnnnnnnnnnnnnnnnnnnnnnnnnnnnnnnnnnnnnnnnnnnnnnnnnnnnnnnnnnnnnnnnnnnnnnnnnnnnnnnnnnnnnnnnnnnnnnnnnnnnnnnnnnnnnnnnnnnnnnnnnnnnnnnnnnnnnnnnnnnnnnnnnnnnnnnnnnnnnnnnnnnnnnnnnnnnnnnnnnnnnnnnnnnnnnnnnnnnnnnnnnnnnnnnnnnnnnnnnnnnnnnnnnnnnnnnnnnnnnnnnnnnnnnnnnnnnnnnnnnnnnnnnnnnnnnnnnnnnnnnnnnnnnnnnnnnnnnnnnnnnnnnnnnnnnnnnnnnnnnnnnnnnnnnnnnnnnnnnnnnnnnnnnnnnnnnnnnnnnnnnnnnnnnnnnnnnnnnnnnnnnnnnnnnnnnnnnnnnnnnnnnnnnnnnnnnnnnnnnnnnnnnnnnnnnnnnnnnnnnnnnnnnnnnnnnnnnnnnnnnnnnnnnnnnnnnnnnnnnnnnnnnnnnnnnnnnnnnnnnnnnnnnnnnnnnnnnnnnnnnnnnnnnnnnnnnnnnnnnnnnnnnnnnnnnnnnnnnnnnnnnnnnnnnnnnnnnnnnnnnnnnnnnnnnnnnnnnnnnnnnnnnnnnnnnnnnnnnnnnnnnnnnnnnnnnnnnnnnnnnnnnnnnnnnnnnnnnnnnnnnnnnnnnnnnnnnnnnnnnnnnnnnnnnnnnnnnnnnnnnnnnnnnnnnnnnnnnnnnnnnnnnnnnnnnnnnnnnnnnnnnnnnnnnnnnnnnnnnnnnnnnnnnnnnnnnnnnnnnnnnnnnnnnnnnnnnnnnnnnnnnnnnnnnnnnnnnnnnnnnnnnnnnnnnnnnnnnnnnnnnnnnnnnnnnnnnnnnnnnnnnnnnnnnnnnnnnnnnnnnnnnnnnnnnnnnnnnnnnnnnnnnnnnnnnnnnnnnnnnnnnnnnnnnnnnnnnnnnnnnnnnnnnnnnnnnnnnnnnnnnnnnnnnnnnnnnnnnnnnnnnnnnnnnnnnnnnnnnnnnnnnnnnnnnnnnnnnnnnnnnnnnnnnnnnnnnnnnnnnnnnnnnnnnnnnnnnnnnnnnnnnnnnnnnnnnnnnnnnnnnnnnnnnnnnnnnnnnnnnnnnnnnnnnnnnnnnnnnnnnnnnnnnnnnnnnnnnnnnnnnnnnnnnnnnnnnnnnnnnnnnnnnnnnnnnnnnnnnnnnnnnnnnnnnnnnnnnnnnnnnnnnnnnnnnnnnnnnnnnnnnnnnnnnnnnnnnnnnnnnnnnnnnnnnnnnnnnnnnnnnnnnnnnnnnnnnnnnnnnnnnnnnnnnnnnnnnnnnnnnnnnnnnnnnnnnnnnnnnnnnnnnnnnnnnnnnnnnnnnnnnnnnnnnnnnnnnnnnnnnnnnnnnnnnnnnnnnnnnnnnnnnnnnnnnnnnnnnnnnnnnnnnnnnnnnnnnnnnnnnnnnnnnnnnnnnnnnnnnnnnnnnnnnnnnnnnnnnnnnnnnnnnnnnnnnnnnnnnnnnnnnnnnnnnnnnnnnnnnnnnnnnnnnnnnnnnnnnnnnnnnnnnnnnnnnnnnnnnnnnnnnnnnnnnnnnnnnnnnnnnnnnnnnnnnnnnnnnnnnnnnnnnnnnnnnnnnnnnnnnnnnnnnnnnnnnnnnnnnnnnnnnnnnnnnnnnnnnnnnnnnnnnnnnnnnnnnnnnnnnnnnnnnnnnnnnnnnnnnnnnnnnnnnnnnnnnnnnnnnnnnnnnnnnnnnnnnnnnnnnnnnnnnnnnnnnnnnnnnnnnnnnnnnnnnnnnnnnnnnnnnnnnnnnnnnnnnnnnnnnnnnnnnnnnnnnnnnnnnnnnnnnnnnnnnnnnnnnnnnnnnnnnnnnnnnnnnnnnnnnnnnnnnnnnnnnnnnnnnnnnnnnnnnnnnnnnnnnnnnnnnnnnnnnnnnnnnnnnnnnnnnnnnnnnnnnnnnnnnnnnnnnnnnnnnnnnnnnnnnnnnnnnnnnnnnnnnnnnnnnnnnnnnnnnnnnnnnnnnnnnnnnnnnnnnnnnnnnnnnnnnnnnnnnnnnnnnnnnnnnnnnnnnnnnnnnnnnnnnnnnnnnnnnnnnnnnnnnnnnnnnnnnnnnnnnnnnnnnnnnnnnnnnnnnnnnnnnnnnnnnnnnnnnnnnnnnnnnnnnnnnnnnnnnnnnnnnnnnnnnnnnnnnnnnnnnnnnnnnnnnnnnnnnnnnnnnnnnnnnnnnnnnnnnnnnnnnnnnnnnnnnnnnnnnnnnnnnnnnnnnnnnnnnnnnnnnnnnnnnnnnnnnnnnnnnnnnnnnnnnnnnnnnnnnnnnnnnnnnnnnnnnnnnnnnnnnnnnnnnnnnnnnnnnnnnnnnnnnnnnnnnnnnnnnnnnnnnnnnnnnnnnnnnnnnnnnnnnnnnnnnnnnnnnnnnnnnnnnnnnnnnnnnnnnnnnnnnnnnnnnnnnnnnnnnnnnnnnnnnnnnnnnnnnnnnnnnnnnnnnnnnnnnnnnnnnnnnnnnnnnnnnnnnnnnnnnnnnnnnnnnnnnnnnnnnnnnnnnnnnnnnnnnnnnnnnnnnnnnnnnnnnnnnnnnnnnnnnnnnnnnnnnnnnnnnnnnnnnnnnnnnnnnnnnnnnnnnnnnnnnnnnnnnnnnnnnnnnnnnnnnnnnnnnnnnnnnnnnnnnnnnnnnnnnnnnnnnnnnnnnnnnnnnnnnnnnnnnnnnnnnnnnnnnnnnnnnnnnnnnnnnnnnnnnnnnnnnnnnnnnnnnnnnnnnnnnnnnnnnnnnnnnnnnnnnnnnnnnnnnnnnnnnnnnnnnnnnnnnnnnnnnnnnnnnnnnnnnnnnnnnnnnnnnnnnnnnnnnnnnnnnnnnnnnnnnnnnnnnnnnnnnnnnnnnnnnnnnnnnnnnnnnnnnnnnnnnnnnnnnnnnnnnnnnnnnnnnnnnnnnnnnnnnnnnnnnnnnnnnnnnnnnnnnnnnnnnnnnnnnnnnnnnnnnnnnnnnnnnnnnnnnnnnnnnnnnnnnnnnnnnnnnnnnnnnnnnnnnnnnnnnnnnnnnnnnnnnnnnnnnnnnnnnnnnnnnnnnnnnnnnnnnnnnnnnnnnnnnnnnnnnnnnnnnnnnnnnnnnnnnnnnnnnnnnnnnnnnnnnnnnnnnnnnnnnnnnnnnnnnnnnnnnnnnnnnnnnnnnnnnnnnnnnnnnnnnnnnnnnnnnnnnnnnnnnnnnnnnnnnnnnnnnnnnnnnnnnnnnnnnnnnnnnnnnnnnnnnnnnnnnnnnnnnnnnnnnnnnnnnnnnnnnnnnnnnnnnnnnnnnnnnnnnnnnnnnnnnnnnnnnnnnnnnnnnnnnnnnnnnnnnnnnnnnnnnnnnnnnnnnnnnnnnnnnnnnnnnnnnnnnnnnnnnnnnnnnnnnnnnnnnnnnnnnnnnnnnnnnnnnnnnnnnnnnnnnnnnnnnnnnnnnnnnnnnnnnnnnnnnnnnnnnnnnnnnnnnnnnnnnnnnnnnnnnnnnnnnnnnnnnnnnnnnnnnnnnnnnnnnnnnnnnnnnnnnnnnnnnnnnnnnnnnnnnnnnnnnnnnnnnnnnnnnnnnnnnnnnnnnnnnnnnnnnnnnnnnnnnnnnnnnnnnnnnnnnnnnnnnnnnnnnnnnnnnnnnnnnnnnnnnnnnnnnnnnnnnnnnnnnnnnnnnnnnnnnnnnnnnnnnnnnnnnnnnnnnnnnnnnnnnnnnnnnnnnnnnnnnnnnnnnnnnnnnnnnnnnnnnnnnnnnnnnnnnnnnnnnnnnnnnnnnnnnnnnnnnnnnnnnnnnnnnnnnnnnnnnnnnnnnnnnnnnnnnnnnnnnnnnnnnnnnnnnnnnnnnnnnnnnnnnnnnnnnnnnnnnnnnnnnnnnnnnnnnnnnnnnnnnnnnnnnnnnnnnnnnnnnnnnnnnnnnnnnnnnnnnnnnnnnnnnnnnnnnnnnnnnnnnnnnnnnnnnnnnnnnnnnnnnnnnnnnnnnnnnnnnnnnnnnnnnnnnnnnnnnnnnnnnnnnnnnnnnnnnnnnnnnnnnnnnnnnnnnnnnnnnnnnnnnnnnnnnnnnnnnnnnnnnnnnnnnnnnnnnnnnnnnnnnnnnnnnnnnnnnnnnnnnnnnnnnnnnnnnnnnnnnnnnnnnnnnnnnnnnnnnnnnnnnnnnnnnnnnnnnnnnnnnnnnnnnnnnnnnnnnnnnnnnnnnnnnnnnnnnnnnnnnnnnnnnnnnnnnnnnnnnnnnnnnnnnnnnnnnnnnnnnnnnnnnnnnnnnnnnnnnnnnnnnnnnnnnnnnnnnnnnnnnnnnnnnnnnnnnnnnnnnnnnnnnnnnnnnnnnnnnnnnnnnnnnnnnnnnnnnnnnnnnnnnnnnnnnnnnnnnnnnnnnnnnnnnnnnnnnnnnnnnnnnnnnnnnnnnnnnnnnnnnnnnnnnnnnnnnnnnnnnnnnnnnnnnnnnnnnnnnnnnnnnnnnnnnnnnnnnnnnnnnnnnnnnnnnnnnnnnnnnnnnnnnnnnnnnnnnnnnnnnnnnnnnnnnnnnnnnnnnnnnnnnnnnnnnnnnnnnnnnnnnnnnnnnnnnnnnnnnnnnnnnnnnnnnnnnnnnnnnnnnnnnnnnnnnnnnnnnnnnnnnnnnnnnnnnnnnnnnnnnnnnnnnnnnnnnnnnnnnnnnnnnnnnnnnnnnnnnnnnnnnnnnnnnnnnnnnnnnnnnnnnnnnnnnnnnnnnnnnnnnnnnnnnnnnnnnnnnnnnnnnnnnnnnnnnnnnnnnnnnnnnnnnnnnnnnnnnnnnnnnnnnnnnnnnnnnnnnnnnnnnnnnnnnnnnnnnnnnnnnnnnnnnnnnnnnnnnnnnnnnnnnnnnnnnnnnnnnnnnnnnnnnnnnnnnnnnnnnnnnnnnnnnnnnnnnnnnnnnnnnnnnnnnnnnnnnnnnnnnnnnnnnnnnnnnnnnnnnnnnnnnnnnnnnnnnnnnnnnnnnnnnnnnnnnnnnnnnnnnnnnnnnnnnnnnnnnnnnnnnnnnnnnnnnnnnnnnnnnnnnnnnnnnnnnnnnnnnnnnnnnnnnnnnnnnnnnnnnnnnnnnnnnnnnnnnnnnnnnnnnnnnnnnnnnnnnnnnnnnnnnnnnnnnnnnnnnnnnnnnnnnnnnnnnnnnnnnnnnnnnnnnnnnnnnnnnnnnnnnnnnnnnnnnnnnnnnnnnnnnnnnnnnnnnnnnnnnnnnnnnnnnnnnnnnnnnnnnnnnnnnnnnnnnnnnnnnnnnnnnnnnnnnnnnnnnnnnnnnnnnnnnnnnnnnnnnnnnnnnnnnnnnnnnnnnnnnnnnnnnnnnnnnnnnnnnnnnnnnnnnnnnnnnnnnnnnnnnnnnnnnnnnnnnnnnnnnnnnnnnnnnnnnnnnnnnnnnnnnnnnnnnnnnnnnnnnnnnnnnnnnnnnnnnnnnnnnnnnnnnnnnnnnnnnnnnnnnnnnnnnnnnnnnnnnnnnnnnnnnnnnnnnnnnnnnnnnnnnnnnnnnnnnnnnnnnnnnnnnnnnnnnnnnnnnnnnnnnnnnnnnnnnnnnnnnnnnnnnnnnnnnnnnnnnnnnnnnnnnnnnnnnnnnnnnnnnnnnnnnnnnnnnnnnnnnnnnnnnnnnnnnnnnnnnnnnnnnnnnnnnnnnnnnnnnnnnnnnnnnnnnnnnnnnnnnnnnnnnnnnnnnnnnnnnnnnnnnnnnnnnnnnnnnnnnnnnnnnnnnnnnnnnnnnnnnnnnnnnnnnnnnnnnnnnnnnnnnnnnnnnnnnnnnnnnnnnnnnnnnnnnnnnnnnnnnnnnnnnnnnnnnnnnnnnnnnnnnnnnnnnnnnnnnnnnnnnnnnnnnnnnnnnnnnnnnnnnnnnnnnnnnnnnnnnnnnnnnnnnnnnnnnnnnnnnnnnnnnnnnnnnnnnnnnnnnnnnnnnnnnnnnnnnnnnnnnnnnnnnnnnnnnnnnnnnnnnnnnnnnnnnnnnnnnnnnnnnnnnnnnnnnnnnnnnnnnnnnnnnnnnnnnnnnnnnnnnnnnnnnnnnnnnnnnnnnnnnnnnnnnnnnnnnnnnnnnnnnnnnnnnnnnnnnnnnnnnnnnnnnnnnnnnnnnnnnnnnnnnnnnnnnnnnnnnnnnnnnnnnnnnnnnnnnnnnnnnnnnnnnnnnnnnnnnnnnnnnnnnnnnnnnnnnnnnnnnnnnnnnnnnnnnnnnnnnnnnnnnnnnnnnnnnnnnnnnnnnnnnnnnnnnnnnnnnnnnnnnnnnnnnnnnnnnnnnnnnnnnnnnnnnnnnnnnnnnnnnnnnnnnnnnnnnnnnnnnnnnnnnnnnnnnnnnnnnnnnnnnnnnnnnnnnnnnnnnnnnnnnnnnnnnnnnnnnnnnnnnnnnnnnnnnnnnnnnnnnnnnnnnnnnnnnnnnnnnnnnnnnnnnnnnnnnnnnnnnnnnnnnnnnnnnnnnnnnnnnnnnnnnnnnnnnnnnnnnnnnnnnnnnnnnnnnnnnnnnnnnnnnnnnnnnnnnnnnnnnnnnnnnnnnnnnnnnnnnnnnnnnnnnnnnnnnnnnnnnnnnnnnnnnnnnnnnnnnnnnnnnnnnnnnnnnnnnnnnnnnnnnnnnnnnnnnnnnnnnnnnnnnnnnnnnnnnnnnnnnnnnnnnnnnnnnnnnnnnnnnnnnnnnnnnnnnnnnnnnnnnnnnnnnnnnnnnnnnnnnnnnnnnnnnnnnnnnnnnnnnnnnnnnnnnnnnnnnnnnnnnnnnnnnnnnnnnnnnnnnnnnnnnnnnnnnnnnnnnnnnnnnnnnnnnnnnnnnnnnnnnnnnnnnnnnnnnnnnnnnnnnnnnnnnnnnnnnnnnnnnnnnnnnnnnnnnnnnnnnnnnnnnnnnnnnnnnnnnnnnnnnnnnnnnnnnnnnnnnnnnnnnnnnnnnnnnnnnnnnnnnnnnnnnnnnnnnnnnnnnnnnnnnnnnnnnnnnnnnnnnnnnnnnnnnnnnnnnnnnnnnnnnnnnnnnnnnnnnnnnnnnnnnnnnnnnnnnnnnnnnnnnnnnnnnnnnnnnnnnnnnnnnnnnnnnnnnnnnnnnnnnnnnnnnnnnnnnnnnnnnnnnnnnnnnnnnnnnnnnnnnnnnnnnnnnnnnnnnnnnnnnnnnnnnnnnnnnnnnnnnnnnnnnnnnnnnnnnnnnnnnnnnnnnnnnnnnnnnnnnnnnnnnnnnnnnnnnnnnnnnnnnnnnnnnnnnnnnnnnnnnnnnnnnnnnnnnnnnnnnnnnnnnnnnnnnnnnnnnnnnnnnnnnnnnnnnnnnnnnnnnnnnnnnnnnnnnnnnnnnnnnnnnnnnnnnnnnnnnnnnnnnnnnnnnnnnnnnnnnnnnnnnnnnnnnnnnnnnnnnnnnnnnnnnnnnnnnnnnnnnnnnnnnnnnnnnnnnnnnnnnnnnnnnnnnnnnnnnnnnnnnnnnnnnnnnnnnnnnnnnnnnnnnnnnnnnnnnnnnnnnnnnnnnnnnnnnnnnnnnnnnnnnnnnnnnnnnnnnnnnnnnnnnnnnnnnnnnnnnnnnnnnnnnnnnnnnnnnnnnnnnnnnnnnnnnnnnnnnnnnnnnnnnnnnnnnnnnnnnnnnnnnnnnnnnnnnnnnnnnnnnnnnnnnnnnnnnnnnnnnnnnnnnnnnnnnnnnnnnnnnnnnnnnnnnnnnnnnnnnnnnnnnnnnnnnnnnnnnnnnnnnnnnnnnnnnnnnnnnnnnnnnnnnnnnnnnnnnnnnnnnnnnnnnnnnnnnnnnnnnnnnnnnnnnnnnnnnnnnnnnnnnnnnnnnnnnnnnnnnnnnnnnnnnnnnnnnnnnnnnnnnnnnnnnnnnnnnnnnnnnnnnnnnnnnnnnnnnnnnnnnnnnnnnnnnnnnnnnnnnnnnnnnnnnnnnnnnnnnnnnnnnnnnnnnnnnnnnnnnnnnnnnnnnnnnnnnnnnnnnnnnnnnnnnnnnnnnnnnnnnnnnnnnnnnnnnnnnnnnnnnnnnnnnnnnnnnnnnnnnnnnnnnnnnnnnnnnnnnnnnnnnnnnnnnnnnnnnnnnnnnnnnnnnnnnnnnnnnnnnnnnnnnnnnnnnnnnnnnnnnnnnnnnnnnnnnnnnnnnnnnnnnnnnnnnnnnnnnnnnnnnnnnnnnnnnnnnnnnnnnnnnnnnnnnnnnnnnnnnnnnnnnnnnnnnnnnnnnnnnnnnnnnnnnnnnnnnnnnnnnnnnnnnnnnnnnnnnnnnnnnnnnnnnnnnnnnnnnnnnnnnnnnnnnnnnnnnnnnnnnnnnnnnnnnnnnnnnnnnnnnnnnnnnnnnnnnnnnnnnnnnnnnnnnnnnnnnnnnnnnnnnnnnnnnnnnnnnnnnnnnnnnnnnnnnnnnnnnnnnnnnnnnnnnnnnnnnnnnnnnnnnnnnnnnnnnnnnnnnnnnnnnnnnnnnnnnnnnnnnnnnnnnnnnnnnnnnnnnnnnnnnnnnnnnnnnnnnnnnnnnnnnnnnnnnnnnnnnnnnnnnnnnnnnnnnnnnnnnnnnnnnnnnnnnnnnnnnnnnnnnnnnnnnnnnnnnnnnnnnnnnnnnnnnnnnnnnnnnnnnnnnnnnnnnnnnnnnnnnnnnnnnnnnnnnnnnnnnnnnnnnnnnnnnnnnnnnnnnnnnnnnnnnnnnnnnnnnnnnnnnnnnnnnnnnnnnnnnnnnnnnnnnnnnnnnnnnnnnnnnnnnnnnnnnnnnnnnnnnnnnnnnnnnnnnnnnnnnnnnnnnnnnnnnnnnnnnnnnnnnnnnnnnnnnnnnnnnnnnnnnnnnnnnnnnnnnnnnnnnnnnnnnnnnnnnnnnnnnnnnnnnnnnnnnnnnnnnnnnnnnnnnnnnnnnnnnnnnnnnnnnnnnnnnnnnnnnnnnnnnnnnnnnnnnnnnnnnnnnnnnnnnnnnnnnnnnnnnnnnnnnnnnnnnnnnnnnnnnnnnnnnnnnnnnnnnnnnnnnnnnnnnnnnnnnnnnnnnnnnnnnnnnnnnnnnnnnnnnnnnnnnnnnnnnnnnnnnnnnnnnnnnnnnnnnnnnnnnnnnnnnnnnnnnnnnnnnnnnnnnnnnnnnnnnnnnnnnnnnnnnnnnnnnnnnnnnnnnnnnnnnnnnnnnnnnnnnnnnnnnnnnnnnnnnnnnnnnnnnnnnnnnnnnnnnnnnnnnnnnnnnnnnnnnnnnnnnnnnnnnnnnnnnnnnnnnnnnnnnnnnnnnnnnnnnnnnnnnnnnnnnnnnnnnnnnnnnnnnnnnnnnnnnnnnnnnnnnnnnnnnnnnnnnnnnnnnnnnnnnnnnnnnnnnnnnnnnnnnnnnnnnnnnnnnnnnnnnnnnnnnnnnnnnnnnnnnnnnnnnnnnnnnnnnnnnnnnnnnnnnnnnnnnnnnnnnnnnnnnnnnnnnnnnnnnnnnnnnnnnnnnnnnnnnnnnnnnnnnnnnnnnnnnnnnnnnnnnnnnnnnnnnnnnnnnnnnnnnnnnnnnnnnnnnnnnnnnnnnnnnnnnnnnnnnnnnnnnnnnnnnnnnnnnnnnnnnnnnnnnnnnnnnnnnnnnnnnnnnnnnnnnnnnnnnnnnnnnnnnnnnnnnnnnnnnnnnnnnnnnnnnnnnnnnnnnnnnnnnnnnnnnnnnnnnnnnnnnnnnnnnnnnnnnnnnnnnnnnnnnnnnnnnnnnnnnnnnnnnnnnnnnnnnnnnnnnnnnnnnnnnnnnnnnnnnnnnnnnnnnnnnnnnnnnnnnnnnnnnnnnnnnnnnnnnnnnnnnnnnnnnnnnnnnnnnnnnnnnnnnnnnnnnnnnnnnnnnnnnnnnnnnnnnnnnnnnnnnnnnnnnnnnnnnnnnnnnnnnnnnnnnnnnnnnnnnnnnnnnnnnnnnnnnnnnnnnnnnnnnnnnnnnnnnnnnnnnnnnnnnnnnnnnnnnnnnnnnnnnnnnnnnnnnnnnnnnnnnnnnnnnnnnnnnnnnnnnnnnnnnnnnnnnnnnnnnnnnnnnnnnnnnnnnnnnnnnnnnnnnnnnnnnnnnnnnnnnnnnnnnnnnnnnnnnnnnnnnnnnnnnnnnnnnnnnnnnnnnnnnnnnnnnnnnnnnnnnnnnnnnnnnnnnnnnnnnnnnnnnnnnnnnnnnnnnnnnnnnnnnnnnnnnnnnnnnnnnnnnnnnnnnnnnnnnnnnnnnnnnnnnnnnnnnnnnnnnnnnnnnnnnnnnnnnnnnnnnnnnnnnnnnnnnnnnnnnnnnnnnnnnnnnnnnnnnnnnnnnnnnnnnnnnnnnnnnnnnnnnnnnnnnnnnnnnnnnnnnnnnnnnnnnnnnnnnnnnnnnnnnnnnnnnnnnnnnnnnnnnnnnnnnnnnnnnnnnnnnnnnnnnnnnnnnnnnnnnnnnnnnnnnnnnnnnnnnnnnnnnnnnnnnnnnnnnnnnnnnnnnnnnnnnnnnnnnnnnnnnnnnnnnnnnnnnnnnnnnnnnnnnnnnnnnnnnnnnnnnnnnnnnnnnnnnnnnnnnnnnnnnnnnnnnnnnnnnnnnnnnnnnnnnnnnnnnnnnnnnnnnnnnnnnnnnnnnnnnnnnnnnnnnnnnnnnnnnnnnnnnnnnnnnnnnnnnnnnnnnnnnnnnnnnnnnnnnnnnnnnnnnnnnnnnnnnnnnnnnnnnnnnnnnnnnnnnnnnnnnnnnnnnnnnnnnnnnnnnnnnnnnnnnnnnnnnnnnnnnnnnnnnnnnnnnnnnnnnnnnnnnnnnnnnnnnnnnnnnnnnnnnnnnnnnnnnnnnnnnnnnnnnnnnnnnnnnnnnnnnnnnnnnnnnnnnnnnnnnnnnnnnnnnnnnnnnnnnnnnnnnnnnnnnnnnnnnnnnnnnnnnnnnnnnnnnnnnnnnnnnnnnnnnnnnnnnnnnnnnnnnnnnnnnnnnnnnnnnnnnnnnnnnnnnnnnnnnnnnnnnnnnnnnnnnnnnnnnnnnnnnnnnnnnnnnnnnnnnnnnnnnnnnnnnnnnnnnnnnnnnnnnnnnnnnnnnnnnnnnnnnnnnnnnnnnnnnnnnnnnnnnnnnnnnnnnnnnnnnnnnnnnnnnnnnnnnnnnnnnnnnnnnnnnnnnnnnnnnnnnnnnnnnnnnnnnnnnnnnnnnnnnnnnnnnnnnnnnnnnnnnnnnnnnnnnnnnnnnnnnnnnnnnnnnnnnnnnnnnnnnnnnnnnnnnnnnnnnnnnnnnnnnnnnnnnnnnnnnnnnnnnnnnnnnnnnnnnnnnnnnnnnnnnnnnnnnnnnnnnnnnnnnnnnnnnnnnnnnnnnnnnnnnnnnnnnnnnnnnnnnnnnnnnnnnnnnnnnnnnnnnnnnnnnnnnnnnnnnnnnnnnnnnnnnnnnnnnnnnnnnnnnnnnnnnnnnnnnnnnnnnnnnnnnnnnnnnnnnnnnnnnnnnnnnnnnnnnnnnnnnnnnnnnnnnnnnnnnnnnnnnnnnnnnnnnnnnnnnnnnnnnnnnnnnnnnnnnnnnnnnnnnnnnnnnnnnnnnnnnnnnnnnnnnnnnnnnnnnnnnnnnnnnnnnnnnnnnnnnnnnnnnnnnnnnnnnnnnnnnnnnnnnnnnnnnnnnnnnnnnnnnnnnnnnnnnnnnnnnnnnnnnnnnnnnnnnnnnnnnnnnnnnnnnnnnnnnnnnnnnnnnnnnnnnnnnnnnnnnnnnnnnnnnnnnnnnnnnnnnnnnnnnnnnnnnnnnnnnnnnnnnnnnnnnnnnnnnnnnnnnnnnnnnnnnnnnnnnnnnnnnnnnnnnnnnnnnnnnnnnnnnnnnnnnnnnnnnnnnnnnnnnnnnnnnnnnnnnnnnnnnnnnnnnnnnnnnnnnnnnnnnnnnnnnnnnnnnnnnnnnnnnnnnnnnnnnnnnnnnnnnnnnnnnnnnnnnnnnnnnnnnnnnnnnnnnnnnnnnnnnnnnnnnnnnnnnnnnnnnnnnnnnnnnnnnnnnnnnnnnnnnnnnnnnnnnnnnnnnnnnnnnnnnnnnnnnnnnnnnnnnnnnnnnnnnnnnnnnnnnnnnnnnnnnnnnnnnnnnnnnnnnnnnnnnnnnnnnnnnnnnnnnnnnnnnnnnnnnnnnnnnnnnnnnnnnnnnnnnnnnnnnnnnnnnnnnnnnnnnnnnnnnnnnnnnnnnnnnnnnnnnnnnnnnnnnnnnnnnnnnnnnnnnnnnnnnnnnnnnnnnnnnnnnnnnnnnnnnnnnnnnnnnnnnnnnnnnnnnnnnnnnnnnnnnnnnnnnnnnnnnnnnnnnnnnnnnnnnnnnnnnnnnnnnnnnnnnnnnnnnnnnnnnnnnnnnnnnnnnnnnnnnnnnnnnnnnnnnnnnnnnnnnnnnnnnnnnnnnnnnnnnnnnnnnnnnnnnnnnnnnnnnnnnnnnnnnnnnnnnnnnnnnnnnnnnnnnnnnnnnnnnnnnnnnnnnnnnnnnnnnnnnnnnnnnnnnnnnnnnnnnnnnnnnnnnnnnnnnnnnnnnnnnnnnnnnnnnnnnnnnnnnnnnnnnnnnnnnnnnnnnnnnnnnnnnnnnnnnnnnnnnnnnnnnnnnnnnnnnnnnnnnnnnnnnnnnnnnnnnnnnnnnnnnnnnnnnnnnnnnnnnnnnnnnnnnnnnnnnnnnnnnnnnnnnnnnnnnnnnnnnnnnnnnnnnnnnnnnnnnnnnnnnnnnnnnnnnnnnnnnnnnnnnnnnnnnnnnnnnnnnnnnnnnnnnnnnnnnnnnnnnnnnnnnnnnnnnnnnnnnnnnnnnnnnnnnnnnnnnnnnnnnnnnnnnnnnnnnnnnnnnnnnnnnnnnnnnnnnnnnnnnnnnnnnnnnnnnnnnnnnnnnnnnnnnnnnnnnnnnnnnnnnnnnnnnnnnnnnnnnnnnnnnnnnnnnnnnnnnnnnnnnnnnnnnnnnnnnnnnnnnnnnnnnnnnnnnnnnnnnnnnnnnnnnnnnnnnnnnnnnnnnnnnnnnnnnnnnnnnnnnnnnnnnnnnnnnnnnnnnnnnnnnnnnnnnnnnnnnnnnnnnnnnnnnnnnnnnnnnnnnnnnnnnnnnnnnnnnnnnnnnnnnnnnnnnnnnnnnnnnnnnnnnnnnnnnnnnnnnnnnnnnnnnnnnnnnnnnnnnnnnnnnnnnnnnnnnnnnnnnnnnnnnnnnnnnnnnnnnnnnnnnnnnnnnnnnnnnnnnnnnnnnnnnnnnnnnnnnnnnnnnnnnnnnnnnnnnnnnnnnnnnnnnnnnnnnnnnnnnnnnnnnnnnnnnnnnnnnnnnnnnnnnnnnnnnnnnnnnnnnnnnnnnnnnnnnnnnnnnnnnnnnnnnnnnnnnnnnnnnnnnnnnnnnnnnnnnnnnnnnnnnnnnnnnnnnnnnnnnnnnnnnnnnnnnnnnnnnnnnnnnnnnnnnnnnnnnnnnnnnnnnnnnnnnnnnnnnnnnnnnnnnnnnnnnnnnnnnnnnnnnnnnnnnnnnnnnnnnnnnnnnnnnnnnnnnnnnnnnnnnnnnnnnnnnnnnnnnnnnnnnnnnnnnnnnnnnnnnnnnnnnnnnnnnnnnnnnnnnnnnnnnnnnnnnnnnnnnnnnnnnnnnnnnnnnnnnnnnnnnnnnnnnnnnnnnnnnnnnnnnnnnnnnnnnnnnnnnnnnnnnnnnnnnnnnnnnnnnnnnnnnnnnnnnnnnnnnnnnnnnnnnnnnnnnnnnnnnnnnnnnnnnnnnnnnnnnnnnnnnnnnnnnnnnnnnnnnnnnnnnnnnnnnnnnnnnnnnnnnnnnnnnnnnnnnnnnnnnnnnnnnnnnnnnnnnnnnnnnnnnnnnnnnnnnnnnnnnnnnnnnnnnnnnnnnnnnnnnnnnnnnnnnnnnnnnnnnnnnnnnnnnnnnnnnnnnnnnnnnnnnnnnnnnnnnnnnnnnnnnnnnnnnnnnnnnnnnnnnnnnnnnnnnnnnnnnnnnnnnnnnnnnnnnnnnnnnnnnnnnnnnnnnnnnnnnnnnnnnnnnnnnnnnnnnnnnnnnnnnnnnnnnnnnnnnnnnnnnnnnnnnnnnnnnnnnnnnnnnnnnnnnnnnnnnnnnnnnnnnnnnnnnnnnnnnnnnnnnnnnnnnnnnnnnnnnnnnnnnnnnnnnnnnnnnnnnnnnnnnnnnnnnnnnnnnnnnnnnnnnnnnnnnnnnnnnnnnnnnnnnnnnnnnnnnnnnnnnnnnnnnnnnnnnnnnnnnnnnnnnnnnnnnnnnnnnnnnnnnnnnnnnnnnnnnnnnnnnnnnnnnnnnnnnnnnnnnnnnnnnnnnnnnnnnnnnnnnnnnnnnnnnnnnnnnnnnnnnnnnnnnnnnnnnnnnnnnnnnnnnnnnnnnnnnnnnnnnnnnnnnnnnnnnnnnnnnnnnnnnnnnnnnnnnnnnnnnnnnnnnnnnnnnnnnnnnnnnnnnnnnnnnnnnnnnnnnnnnnnnnnnnnnnnnnnnnnnnnnnnnnnnnnnnnnnnnnnnnnnnnnnnnnnnnnnnnnnnnnnnnnnnnnnnnnnnnnnnnnnnnnnnnnnnnnnnnnnnnnnnnnnnnnnnnnnnnnnnnnnnnnnnnnnnnnnnnnnnnnnnnnnnnnnnnnnnnnnnnnnnnnnnnnnnnnnnnnnnnnnnnnnnnnnnnnnnnnnnnnnnnnnnnnnnnnnnnnnnnnnnnnnnnnnnnnnnnnnnnnnnnnnnnnnnnnnnnnnnnnnnnnnnnnnnnnnnnnnnnnnnnnnnnnnnnnnnnnnnnnnnnnnnnnnnnnnnnnnnnnnnnnnnnnnnnnnnnnnnnnnnnnnnnnnnnnnnnnnnnnnnnnnnnnnnnnnnnnnnnnnnnnnnnnnnnnnnnnnnnnnnnnnnnnnnnnnnnnnnnnnnnnnnnnnnnnnnnnnnnnnnnnnnnnnnnnnnnnnnnnnnnnnnnnnnnnnnnnnnnnnnnnnnnnnnnnnnnnnnnnnnnnnnnnnnnnnnnnnnnnnnnnnnnnnnnnnnnnnnnnnnnnnnnnnnnnnnnnnnnnnnnnnnnnnnnnnnnnnnnnnnnnnnnnnnnnnnnnnnnnnnnnnnnnnnnnnnnnnnnnnnnnnnnnnnnnnnnnnnnnnnnnnnnnnnnnnnnnnnnnnnnnnnnnnnnnnnnnnnnnnnnnnnnnnnnnnnnnnnnnnnnnnnnnnnnnnnnnnnnnnnnnnnnnnnnnnnnnnnnnnnnnnnnnnnnnnnnnnnnnnnnnnnnnnnnnnnnnnnnnnnnnnnnnnnnnnnnnnnnnnnnnnnnnnnnnnnnnnnnnnnnnnnnnnnnnnnnnnnnnnnnnnnnnnnnnnnnnnnnnnnnnnnnnnnnnnnnnnnnnnnnnnnnnnnnnnnnnnnnnnnnnnnnnnnnnnnnnnnnnnnnnnnnnnnnnnnnnnnnnnnnnnnnnnnnnnnnnnnnnnnnnnnnnnnnnnnnnnnnnnnnnnnnnnnnnnnnnnnnnnnnnnnnnnnnnnnnnnnnnnnnnnnnnnnnnnnnnnnnnnnnnnnnnnnnnnnnnnnnnnnnnnnnnnnnnnnnnnnnnnnnnnnnnnnnnnnnnnnnnnnnnnnnnnnnnnnnnnnnnnnnnnnnnnnnnnnnnnnnnnnnnnnnnnnnnnnnnnnnnnnnnnnnnnnnnnnnnnnnnnnnnnnnnnnnnnnnnnnnnnnnnnnnnnnnnnnnnnnnnnnnnnnnnnnnnnnnnnnnnnnnnnnnnnnnnnnnnnnnnnnnnnnnnnnnnnnnnnnnnnnnnnnnnnnnnnnnnnnnnnnnnnnnnnnnnnnnnnnnnnnnnnnnnnnnnnnnnnnnnnnnnnnnnnnnnnnnnnnnnnnnnnnnnnnnnnnnnnnnnnnnnnnnnnnnnnnnnnnnnnnnnnnnnnnnnnnnnnnnnnnnnnnnnnnnnnnnnnnnnnnnnnnnnnnnnnnnnnnnnnnnnnnnnnnnnnnnnnnnnnnnnnnnnnnnnnnnnnnnnnnnnnnnnnnnnnnnnnnnnnnnnnnnnnnnnnnnnnnnnnnnnnnnnnnnnnnnnnnnnnnnnnnnnnnnnnnnnnnnnnnnnnnnnnnnnnnnnnnnnnnnnnnnnnnnnnnnnnnnnnnnnnnnnnnnnnnnnnnnnnnnnnnnnnnnnnnnnnnnnnnnnnnnnnnnnnnnnnnnnnnnnnnnnnnnnnnnnnnnnnnnnnnnnnnnnnnnnnnnnnnnnnnnnnnnnnnnnnnnnnnnnnnnnnnnnnnnnnnnnnnnnnnnnnnnnnnnnnnnnnnnnnnnnnnnnnnnnnnnnnnnnnnnnnnnnnnnnnnnnnnnnnnnnnnnnnnnnnnnnnnnnnnnnnnnnnnnnnnnnnnnnnnnnnnnnnnnnnnnnnnnnnnnnnnnnnnnnnnnnnnnnnnnnnnnnnnnnnnnnnnnnnnnnnnnnnnnnnnnnnnnnnnnnnnnnnnnnnnnnnnnnnnnnnnnnnnnnnnnnnnnnnnnnnnnnnnnnnnnnnnnnnnnnnnnnnnnnnnnnnnnnnnnnnnnnnnnnnnnnnnnnnnnnnnnnnnnnnnnnnnnnnnnnnnnnnnnnnnnnnnnnnnnnnnnnnnnnnnnnnnnnnnnnnnnnnnnnnnnnnnnnnnnnnnnnnnnnnnnnnnnnnnnnnnnnnnnnnnnnnnnnnnnnnnnnnnnnnnnnnnnnnnnnnnnnnnnnnnnnnnnnnnnnnnnnnnnnnnnnnnnnnnnnnnnnnnnnnnnnnnnnnnnnnnnnnnnnnnnnnnnnnnnnnnnnnnnnnnnnnnnnnnnnnnnnnnnnnnnnnnnnnnnnnnnnnnnnnnnnnnnnnnnnnnnnnnnnnnnnnnnnnnnnnnnnnnnnnnnnnnnnnnnnnnnnnnnnnnnnnnnnnnnnnnnnnnnnnnnnnnnnnnnnnnnnnnnnnnnnnnnnnnnnnnnnnnnnnnnnnnnnnnnnnnnnnnnnnnnnnnnnnnnnnnnnnnnnnnnnnnnnnnnnnnnnnnnnnnnnnnnnnnnnnnnnnnnnnnnnnnnnnnnnnnnnnnnnnnnnnnnnnnnnnnnnnnnnnnnnnnnnnnnnnnnnnnnnnnnnnnnnnnnnnnnnnnnnnnnnnnnnnnnnnnnnnnnnnnnnnnnnnnnnnnnnnnnnnnnnnnnnnnnnnnnnnnnnnnnnnnnnnnnnnnnnnnnnnnnnnnnnnnnnnnnnnnnnnnnnnnnnnnnnnnnnnnnnnnnnnnnnnnnnnnnnnnnnnnnnnnnnnnnnnnnnnnnnnnnnnnnnnnnnnnnnnnnnnnnnnnnnnnnnnnnnnnnnnnnnnnnnnnnnnnnnnnnnnnnnnnnnnnnnnnnnnnnnnnnnnnnnnnnnnnnnnnnnnnnnnnnnnnnnnnnnnnnnnnnnnnnnnnnnnnnnnnnnnnnnnnnnnnnnnnnnnnnnnnnnnnnnnnnnnnnnnnnnnnnnnnnnnnnnnnnnnnnnnnnnnnnnnnnnnnnnnnnnnnnnnnnnnnnnnnnnnnnnnnnnnnnnnnnnnnnnnnnnnnnnnnnnnnnnnnnnnnnnnnnnnnnnnnnnnnnnnnnnnnnnnnnnnnnnnnnnnnnnnnnnnnnnnnnnnnnnnnnnnnnnnnnnnnnnnnnnnnnnnnnnnnnnnnnnnnnnnnnnnnnnnnnnnnnnnnnnnnnnnnnnnnnnnnnnnnnnnnnnnnnnnnnnnnnnnnnnnnnnnnnnnnnnnnnnnnnnnnnnnnnnnnnnnnnnnnnnnnnnnnnnnnnnnnnnnnnnnnnnnnnnnnnnnnnnnnnnnnnnnnnnnnnnnnnnnnnnnnnnnnnnnnnnnnnnnnnnnnnnnnnnnnnnnnnnnnnnnnnnnnnnnnnnnnnnnnnnnnnnnnnnnnnnnnnnnnnnnnnnnnnnnnnnnnnnnnnnnnnnnnnnnnnnnnnnnnnnnnnnnnnnnnnnnnnnnnnnnnnnnnnnnnnnnnnnnnnnnnnnnnnnnnnnnnnnnnnnnnnnnnnnnnnnnnnnnnnnnnnnnnnnnnnnnnnnnnnnnnnnnnnnnnnnnnnnnnnnnnnnnnnnnnnnnnnnnnnnnnnnnnnnnnnnnnnnnnnnnnnnnnnnnnnnnnnnnnnnnnnnnnnnnnnnnnnnnnnnnnnnnnnnnnnnnnnnnnnnnnnnnnnnnnnnnnnnnnnnnnnnnnnnnnnnnnnnnnnnnnnnnnnnnnnnnnnnnnnnnnnnnnnnnnnnnnnnnnnnnnnnnnnnnnnnnnnnnnnnnnnnnnnnnnnnnnnnnnnnnnnnnnnnnnnnnnnnnnnnnnnnnnnnnnnnnnnnnnnnnnnnnnnnnnnnnnnnnnnnnnnnnnnnnnnnnnnnnnnnnnnnnnnnnnnnnnnnnnnnnnnnnnnnnnnnnnnnnnnnnnnnnnnnnnnnnnnnnnnnnnnnnnnnnnnnnnnnnnnnnnnnnnnnnnnnnnnnnnnnnnnnnnnnnnnnnnnnnnnnnnnnnnnnnnnnnnnnnnnnnnnnnnnnnnnnnnnnnnnnnnnnnnnnnnnnnnnnnnnnnnnnnnnnnnnnnnnnnnnnnnnnnnnnnnnnnnnnnnnnnnnnnnnnnnnnnnnnnnnnnnnnnnnnnnnnnnnnnnnnnnnnnnnnnnnnnnnnnnnnnnnnnnnnnnnnnnnnnnnnnnnnnnnnnnnnnnnnnnnnnnnnnnnnnnnnnnnnnnnnnnnnnnnnnnnnnnnnnnnnnnnnnnnnnnnnnnnnnnnnnnnnnnnnnnnnnnnnnnnnnnnnnnnnnnnnnnnnnnnnnnnnnnnnnnnnnnnnnnnnnnnnnnnnnnnnnnnnnnnnnnnnnnnnnnnnnnnnnnnnnnnnnnnnnnnnnnnnnnnnnnnnnnnnnnnnnnnnnnnnnnnnnnnnnnnnnnnnnnnnnnnnnnnnnnnnnnnnnnnnnnnnnnnnnnnnnnnnnnnnnnnnnnnnnnnnnnnnnnnnnnnnnnnnnnnnnnnnnnnnnnnnnnnnnnnnnnnnnnnnnnnnnnnnnnnnnnnnnnnnnnnnnnnnnnnnnnnnnnnnnnnnnnnnnnnnnnnnnnnnnnnnnnnnnnnnnnnnnnnnnnnnnnnnnnnnnnnnnnnnnnnnnnnnnnnnnnnnnnnnnnnnnnnnnnnnnnnnnnnnnnnnnnnnnnnnnnnnnnnnnnnnnnnnnnnnnnnnnnnnnnnnnnnnnnnnnnnnnnnnnnnnnnnnnnnnnnnnnnnnnnnnnnnnnnnnnnnnnnnnnnnnnnnnnnnnnnnnnnnnnnnnnnnnnnnnnnnnnnnnnnnnnnnnnnnnnnnnnnnnnnnnnnnnnnnnnnnnnnnnnnnnnnnnnnnnnnnnnnnnnnnnnnnnnnnnnnnnnnnnnnnnnnnnnnnnnnnnnnnnnnnnnnnnnnnnnnnnnnnnnnnnnnnnnnnnnnnnnnnnnnnnnnnnnnnnnnnnnnnnnnnnnnnnnnnnnnnnnnnnnnnnnnnnnnnnnnnnnnnnnnnnnnnnnnnnnnnnnnnnnnnnnnnnnnnnnnnnnnnnnnnnnnnnnnnnnnnnnnnnnnnnnnnnnnnnnnnnnnnnnnnnnnnnnnnnnnnnnnnnnnnnnnnnnnnnnnnnnnnnnnnnnnnnnnnnnnnnnnnnnnnnnnnnnnnnnnnnnnnnnnnnnnnnnnnnnnnnnnnnnnnnnnnnnnnnnnnnnnnnnnnnnnnnnnnnnnnnnnnnnnnnnnnnnnnnnnnnnnnnnnnnnnnnnnnnnnnnnnnnnnnnnnnnnnnnnnnnnnnnnnnnnnnnnnnnnnnnnnnnnnnnnnnnnnnnnnnnnnnnnnnnnnnnnnnnnnnnnnnnnnnnnnnnnnnnnnnnnnnnnnnnnnnnnnnnnnnnnnnnnnnnnnnnnnnnnnnnnnnnnnnnnnnnnnnnnnnnnnnnnnnnnnnnnnnnnnnnnnnnnnnnnnnnnnnnnnnnnnnnnnnnnnnnnnnnnnnnnnnnnnnnnnnnnnnnnnnnnnnnnnnnnnnnnnnnnnnnnnnnnnnnnnnnnnnnnnnnnnnnnnnnnnnnnnnnnnnnnnnnnnnnnnnnnnnnnnnnnnnnnnnnnnnnnnnnnnnnnnnnnnnnnnnnnnnnnnnnnnnnnnnnnnnnnnnnnnnnnnnnnnnnnnnnnnnnnnnnnnnnnnnnnnnnnnnnnnnnnnnnnnnnnnnnnnnnnnnnnnnnnnnnnnnnnnnnnnnnnnnnnnnnnnnnnnnnnnnnnnnnnnnnnnnnnnnnnnnnnnnnnnnnnnnnnnnnnnnnnnnnnnnnnnnnnnnnnnnnnnnnnnnnnnnnnnnnnnnnnnnnnnnnnnnnnnnnnnnnnnnnnnnnnnnnnnnnnnnnnnnnnnnnnnnnnnnnnnnnnnnnnnnnnnnnnnnnnnnnnnnnnnnnnnnnnnnnnnnnnnnnnnnnnnnnnnnnnnnnnnnnnnnnnnnnnnnnnnnnnnnnnnnnnnnnnnnnnnnnnnnnnnnnnnnnnnnnnnnnnnnnnnnnnnnnnnnnnnnnnnnnnnnnnnnnnnnnnnnnnnnnnnnnnnnnnnnnnnnnnnnnnnnnnnnnnnnnnnnnnnnnnnnnnnnnnnnnnnnnnnnnnnnnnnnnnnnnnnnnnnnnnnnnnnnnnnnnnnnnnnnnnnnnnnnnnnnnnnnnnnnnnnnnnnnnnnnnnnnnnnnnnnnnnnnnnnnnnnnnnnnnnnnnnnnnnnnnnnnnnnnnnnnnnnnnnnnnnnnnnnnnnnnnnnnnnnnnnnnnnnnnnnnnnnnnnnnnnnnnnnnnnnnnnnnnnnnnnnnnnnnnnnnnnnnnnnnnnnnnnnnnnnnnnnnnnnnnnnnnnnnnnnnnnnnnnnnnnnnnnnnnnnnnnnnnnnnnnnnnnnnnnnnnnnnnnnnnnnnnnnnnnnnnnnnnnnnnnnnnnnnnnnnnnnnnnnnnnnnnnnnnnnnnnnnnnnnnnnnnnnnnnnnnnnnnnnnnnnnnnnnnnnnnnnnnnnnnnnnnnnnnnnnnnnnnnnnnnnnnnnnnnnnnnnnnnnnnnnnnnnnnnnnnnnnnnnnnnnnnnnnnnnnnnnnnnnnnnnnnnnnnnnnnnnnnnnnnnnnnnnnnnnnnnnnnnnnnnnnnnnnnnnnnnnnnnnnnnnnnnnnnnnnnnnnnnnnnnnnnnnnnnnnnnnnnnnnnnnnnnnnnnnnnnnnnnnnnnnnnnnnnnnnnnnnnnnnnnnnnnnnnnnnnnnnnnnnnnnnnnnnnnnnnnnnnnnnnnnnnnnnnnnnnnnnnnnnnnnnnnnnnnnnnnnnnnnnnnnnnnnnnnnnnnnnnnnnnnnnnnnnnnnnnnnnnnnnnnnnnnnnnnnnnnnnnnnnnnnnnnnaaagatcgtagcccacggcgtaagccgtgggtggagggagtaaccttgaaggtgagccccggaggggcgaaagaatcccccgtggccacggggattccgggccttttctgtcgccccgctggggctgcgctcgcaacctcggggctccacccacggcttacgccgtgggctaccctcttacggccctccgggcctgggaggaggtgcaaagatcattcccacagcaccaaagtgcttattctaacgcctatgcccccggtccctcgcccccttgggggagaagctgtgaagaaattccggaacgagcgaaaccatctcgcgcagagacgcggaggcgcagaggcgaaaaagagaataaggcagttacttattctgtatctctgcgcctccgcgtctctgcgcgagatggtcgattttttcacagcttcggagagggtggctcggcgaggcgttttcatcagccggggcgagaagggggccccacgttctgcttgtcgtgggggtgaggggtcacttccgccgcagcaagtagcgcggtcatgctttccaatgtccgcggcttttcgtcttgcggacgcccgcgagggcgcgtagattatcgccctgtggcgttggcgccggccgtttctctacgcgcgcttcctgttcgttacggtgaaactcctgccggggagaacgcgcttggacgaagaaggtctggccaattccctcttccgcctgcgggtgaaggccatcacgagatgccgggttgccctacccggtgttccacagggtgaatggggaacgaggggacggtagcgcagggcccgctctccggccctgcggctcttcaacttcgtggtggtgtggccggtgcagcggtgggtggtcggggggacgccatgcggggtgacgaaagaccgttttcccattgtgcacccacactgctggaaaagccgcagggccggagagcgggccctgcgctaccttcgaacgtgtcgattgggtgatcgtgggcggcgaatccggcaccggcgcccgcaccatggacccggcgtgggtttgggtaatccgcgaccagtgcctggacgcacgcgttcccttcttccgccccctagtacttcctacggagcaaaagtaacctgctggtagggttcgcccttgtgacgtcggctgacctcgatcgtcactttgcggtcaagccgtttcagaaagtccagcagcttgtcagttgtgaagcggctgaagtgcccgttcatcaggtgcgatacatcgggctgggcaatgcccaatacatccgcgatttcgcgctgtttcaactgcttgtcctcaaggattttgtagacatggaatccgatctgcgctcgggccagaagctggtcggcatctttgcggcccaaatccttgaacacgttcccggaacccgcttcgaactcaatgggttttcgcctttccgtactcatttgccaactcctgtgcttcggtgtatcgcttcttgatgaggtcaacgtcccgcttcggcgtttcgatgcctttcttggacttcttctgaaaggcatgcaaaacataaatccgactcccgatgtgtgtcgccagcacgacacggaaagcatcagaggaatatcgcagggcaatctcaacaacgccgctgccgacacccttgaagggtttggcgtccttcggcataccgccaaactgcatgagctggatctcgtccccgaggagtttttgtgcaccatccggaaaatcccgcacgtttctcagggagtctcccagccagacaagaggccgtaggaccggtggttttagcctgtccaaacctcacctcaacaatatataggaaatttactataatgtcaaagccccgtggggtgacgccgctgctttccccgtctgccactctcctgcgtcatcaaaaccgggtggaaagcgggggccaccctctgctggaactctgcttcacgccgtcaaatacaagcgggtagtcattgcgtattaattagtatgttgactttatcatattacgaaccgccgaggaagccaaactgcggctacctctgtgctacccgctcctcaatcaaattgaatgcccccacgatttccgccactaggcgaccttctggctttcccatgggatgctttgccacaacgatttggacccgatggctcggttcgaaatcggccgtgccaacccattccacgaatttcttctcctccacatctttccattgggccgtctgaaaccgggttaggaaatgttttgcccggccccagccggtcaggaacagagcgcgtttgggtttccaccacaggaattcctcccgaagaatctgtacgcagaattcaaattggacatcgcatagacgaacgctggggttccagcccttagcgggagcaattttgtacaagttcgtccacattaaatgcgagggccaatcgctttttagcacatctgcaatccccatattatccattacagatcgcacaacccgccagaatgcagtccttcccatattaccgcgccctcctgcccagcagtctgtgacccacagcaatgggcaggggcggtcggtttcaagaagactctccaccaaggtcttctccagaactgcttgatgattcttctcgtcgcacatttcctcggcggtccaaccttcgttcagccattgatttggagacctgccaataacagctaattcgcccgtagctaaccggccctgcatacccaagaagcccgtaaggggctcgttcaatttctccgaatcgtcgccgacgtatttcagaaggtcgggaaaaatccgtttctcatttgcgcgctgctcagaatctggcatgcttgtctacgtctccattccgctttggcttcgtttcaccaccaaacccgagccttcgcaccgcatgtatgggtcctccccccaatcattgcaccaagcgcaacggcaaggggacggaggggacaaacaccaacttcccaccctgggtgacgccccgcgcagatgccggccgcgagttgttatgcgccaatttcgcgcacttcgccctttttcacgaggggtagcgtttccagcaaggcgggtcatcccagcaagaggtcgcattcgccgtgcgagccaatccagaaccacactacggttgacccttccatgactcccagcgcgcggtagcccagcccgattcgcaccgagtaaatgttggcttcctcatccactttcttgaagcgcagactggggtggcgtggatcgcggcggaacaaccggtaagcacgttgcgcctgccggcgtacgtcgtttggaagtgaagtgaaggcttggcggaaggcgcgcgtggtgcgcgacgggatcacagaagctcgtccagcgggcgcgcggcgccgcagcgatgctcgtccagcgcctcggcggccagcttgcgcaacttagcgggattcttgcgcagcgtcctgccccacgcttcttcatcctcgagcgtggcaagaatctgggaggcgatggcgttctgctcgtcttcagtgagcttgccgaccttccgcagcgcatcctcaagtaattgcgtcataggttcaccttaccaaacgttattcgcaggcgcaagcccgccaaacgtcgctgacttccaacccatctgccagaccgtcagcacgtcgtgcccggcaaagtcatgagccaggcgctcgtcaacacattcatccagcaggatcttcacttgacctcggcgaggactttgcctttcgcgatctccagcaacaccaccacctgccggcgcgtgacggtgggaaagtggaaatcatcaatcgtgtccccggcctccaggtactcgaagagggtttggacgggcacgcgggtaccggcgaagaccggggcgcctcccatgatgtctggcgaaatggatatcagatgatcgcccatgggaaggagtctaagggcaaaagcggtctgcttgcaagcggaacagtatcgagctcgacgatacgggccacgtcaagggtttggacctcgacttcaaggggaaggatgctttggcaaggcgaatccaccagcttgcccgcacgcgcataaaacccgctccgccggtggaagtcgtcttcgaggaaattcgaggaatgacggtgggcagaatctccgtggcgcgcggcgaaaagccgctgtacacgctggacaatgtggtttacctgcggcgagggtcttccgacgttcaggcccagcccgaagaaataatctccctggtcacccaattcgccttttagaatactggccccggcgatttcgatttttgattccgtaaaatctttacgggtactttatgtttgtcgcctatgcgcggatgtggcgcacgccggtcccgggcgaatcgtcggccacccggaaactatcccgaaatggacctctggaaacttgaaggccacttcaacccaaacagcttaagttagcgcttatgggggggagagggtggctcggcgaggcgttttcatcagccgaggcgagaagggggccccacgttctgcttgtcgtgggggtgaggggatcccatgttctgcaggtcgcgggggtgaggggtcttttcccgacggcggcggtcaggcccctttgcggggcccgtccgtcaggtgacggataaagcctccggctttgccggaggataatcactctgagcctgctaatagcctgccctctcacagcaccgcggtttcgtggatcaggcggccttcggcaaagcgcgccaggttaagagcgcgggcgtcaatcaggtcggattggccgtgcagaatcaaatccgccagaaccttgccggtggcgggtgaatgcatcacgccgtggccgctgaagccgttggcgagatacaagccggggacctcggggacaggtcccaggatggggtaatggtcgggagtcatttcgtagaggccggcccaggcgcgcttggggttcacttccagcgcctcaaagcagggaacgcgctcaaccgcacgcagaagaatcttctcgacgaaccccggatcgaattgggttttgaatcccggcgtttcctcgggatcattccaggcgagcaggattcccagaccctcggggcggaagtgaaaacccgtagccatatcgatggtcatgggggcctcgcgcgcgatgagcggaaaaggttcggtggggaccaacatgcggcgcaggggttcgacgggcaattgcaatccggccaaggctgcaacttgtgccgcccaaggaccggcggcattcaccaccgtgcgcgtggtcaccgggccacgcgtggttcggacgcccgcgatgccctgcgcgtcctgcaaaatcgccgtgacttccgcgcccttccacagacgcacgcccttttcggtggcgcgctgcatgaagccggtcatgacgctgtgcgggtccacaaatccatcggtggaactgaaactcccgccccggatgtcgtccgcgcgcaaatgcggcatgtggcgaaggacttcggcgggcgagagcaattccgccgtcttcactccacacgccacttgcaattggtgattggtttgcaaataagccatgtgcttttcgcttgtcgccacgaacaggtagccctgcggacgatagccgccggggcagcccgtggcctcctcgaagcgggcaaagaaattgagcgcatagagcgacaggcgaatgttgatctcggtggagaactgcgcgcgcacgcctcccatgcttttgcctgtggagccgcgccccaggtgaggctcgcgctcgagcaccatgacgttggcgccgccggcctcggcaaggtgataggcgatgctcgcgcccacaatccctccgcccacaatcaccacatcggctgtttccgccacgcgccgcctccatgggtgagaatcgaatcgcttgtgctggcggatatcttaacttgcctgaggtccaaaacaaatgggtgcatgacatagaactgaaagccggcccctcggtggtagggaagctgtgaagaaatcccggaacgagcaaaagcatctcgcgcagagacggggaggcgcagaggcgaaaaagagaataaagcagttatctattctgtatctctgcgcctctgcgtctctgcgcgagattgtcgatcttttcacagcttcgtagggcgggcgggacgctctacatcccctttttcactttcatgttgccaccccgcacctccctgttgcatccgcgtgcacatcgggtcagaataggaccgctgaaggagaacgatatactgccattttattgaggtggaaatatgagaacattcggaagccttttgggtttggtgatcgtgttggcgattgtctggttcgtgatgaagtcccagatgccgaaggaccccacgggcacgggcttgcagtctccccgggaggtgattgacgtggtgggcgtcaagggcgacctgctggccatcgcccaggccgagaggatgcacctggcaagccaagggtcctatgcctcggttgacgagctccagcaggacggtgcgattaacttttccggcacgaaccggcgcggctacaatttcaccgcggaagtggacgatggccaacacttcaagattacggcccggcccacggacgccgccaaagccgcttggccgaccctggatatcgacgaaacgatgcaggtgacacaacaatgaaaagcgtccttagtccgtggtcctttgtctgtggtcagccgtcagtcaccggtaaagcggcatgggaggaagacgagctgatcggcgacgaatgattattgaaggctgacgacggagagctgacaacggacgacggacaaaggacaaatggccaaggactaatgactatggagcccccatgcgaatagaagcgcgagcgcccgcacgagttgatttggcgggcggaaccgtggacatctggccgctttacctttttcatcctggtgcgcaaacggttaacattgccatacgatgttatgcctcatgcgtgatcgacacccgcgccgacccgcgcattgtactcgtctcgcaggaccagggactgaaggaaagctgggacaacctcaccgcgctttctctcggcaaatcgcagttgcccttgctgcgggaactggtgatgtttttcgagcctcggcgcggattgaacatcaagaccagttcgcaggtgcccgccggcgccggcttgggaggctcctcggcgctgaatatcgccctgtgcggggccctggcgagagttaccggcaagcgctgcacacgcgggacgatcctggagattgccaagaacgtagaggccattgtcatccgcgtgcccacgggctggcaggactacttcccggcgctttacggcggcgccaatgccatccatttggagcgcgacggcgtgaagcccgagcgcctgcctctgcccttcagcgacgtggaaaagcgctttgtactttgctacacgggccaaccgcgcagttccgccatcaacaactgggaggtcatgaaatcccatatcgataacaacgagcgcgtcctcaagaattttgatcaaatcaccaccatcgccggccagatgcgggaagcgctgctggcccgcgattggaacgatgtggcggagctgctggcgctggagtgggaaaaccgcaaacgcaatttcaaaggcatctccactcccaaaatcgaccgcatgatcgaacaaacccgcaagcaaggaaccgtggctgccaaagtttgcggggcggggggcggcggatgcgtggtctttatggtccgcccgggcgccaaggcggcggtggagaacacgcttatccagatgggcgggcagattatcaacttcgccatttccagcaccgggctggaagttcgcgccgaccaaattgagcggactcgggaaacgccatgaactcgaccggaatattcatatacgatggccgcctgcgccccatctggcggttctttctttccgtcgctcttctgtacgctgctcttgtgctctcgggagcgatgctggaagcgatctttctcatcggcaaagttcatccgagtttctttgcgacgttcttctggcaatccttcgcgggcctgttggcggtcattcccgcatccaagctgatgacggaggtatttgagcggcgtcccctgggttccatcgggttggcgtttcacccgcggtggtggagggaactgggccgcggcctggcagtgggcgccgccatgctattcggcgcggtcgtgctggagtgggtttgcggtttcgctcatttcacctttgcgccacaccccatgctgcgggcaggatccctcacctttatgttgtttgccgtggcggcgcccttggaggaagccctttttcgcgggtacccctttcagcgcttgatggagtccattactcccgtgggggccatcgccgtaacttccgctttgttcggtcttgtccatcttggcaacccgcaccggacgtggatctccaccctcaacaccgggctggtgggcatccccttcgccattgcctatttgcggacgcgctccctgtggatgcccatcgggatgcatttcatttggaatttcctcatgggctttttcctgggccttcccgtcagcggcattaacgttccctccagccttcttagcgcgcaggtgcagggttccatttggctgactggcggcgagtatggcccggaaggcggcttgctggtgacgggagtaatcttgctcggaaccatgtacgtgtcgtacgcgaaaagcatctatacgagtgcggaaatgaaggccctggtttttgctccggtgacgtcaagctggccccagccgccgctcacaatcctctcagctcctcccgagggagaggcgaaaagagattgattcccatgtccgcctgcggttttgagacccatgcccgctccaagaaatccacccgaagcaggctcgggcggagcttgtgggtggcccttgctttcctcatcattccgttgggactcgccagggaaggcatggattccaaaacccgcattgagatcctccgcggcctcctgcgagagctggcggtgaccaaggttcccctgcctctggggaaaaggggcgtgcgcatcgatgcgcagggaaagctggaccaggaagacgcgcaaaaggaaatgcacaacaacggtatggccatgaaagcgggcacgcccgcggctatcaccaagatccaattcaagtcgaaccagattgttttcgagctcaacgggggcggaaggtctgggaagaagtggtaccagcacatcgagatcggcgtcgggggggcaaccacccccattggttcgcaagaaacgccggccaccgccttcgggtcctccatcacagtggattttggcaaggcccttcccgaccttaccgtccctcagttgaaaacaattctgtcgggcgttctcgatttcgagcgtcactcgcccacggtgttgtactcgccgaatctcccccccgaggtcaaggaggccatcaagaaccacaacgtcatcgtgggaatggaccgcgacgcagtgctttcggctaaaggcaccccggaccggcgcgtgcgcgaggttcgcaacggcgcagagcaggaaaattggatatacggaacccctccccacgtgcttttcgtcaccttcgacggcgatcaagtggtggccgtgaagcagtattgagcgttccaaatgccgccttgggttcttagtttttgcaccccaggcgaggaggtggctcgctcattttcatcaagcgacggtcactctgtgcgccattattaaaactgacatatagtcaattatagaatttataagttgacattcagtcgtgtaggatatagatttgacgcattaatgcggatttttgccccagtggagggttctccatgcttctacccgtcagtgttaccaggcaatcgcatactgcaaataagcgcaccgtgctttgctgcggatgtgttggcgttttatttcttgccattataggacttggtgttcttcagccggtacaagccgcggagaatcttcttcctactcgtggggttcagttcgcgcccacgaggcttcagcccaaacttgctggacgcaagctggcggccgcactggctggcccggtgagcgccggcccgcaggcaagcacgctttccgcgccggaggggggacaagacacactggttaccctgcggggcaacactcgtccggaagcgaatgcagctaacgatcgcgggcgagtctccgatggcctgacgctcaaccacatgatgctgcagttgcagcggactccggagcgggagcaagcactgcaacaattcatccgtgatatccacgatcccgcgtcgccgctttttcaccattggatcacggcggaggaattcgggcagaggtacggtgtggctccggctgacgtcgccagactgacggcttggctcgagtcgcaggggttcaaggtcaacctggtctatcccaatcaaatggttgttgatttcactggctcggcaggccagattcgccaagccttccacacggagattcataacttgttggtgaagggccatccgcacatcgccaatatgagcgacccgcagattccggccgacctggcctccacggtggcgggcgtcgtttccctgaatgacttccggcctcacccgacgtttgtgccgcggcctaattatactttcacttttgatggcactgtctaccacgagattgtgccggcggacttgtggatgatctacaacttcaacccggtctttgcggcgggctattcgggccagggccaaacgattgtagtgatagaggataccgatgtttactccacggatgactggtatactttccgctccgttctgggcattgcctcagcgtaccctcttggcaccatgacgcaggtccacccccccagtggttccttgaataactgtgctgatcccggcgtcaacggtgccgatgaagaggcgaccttggatgtggaatgggcgagcgcgggggctcccagcgcggctatcgagctggcatcctgctcggacacagaaaccaacttcggcggttttattgccctccagaacattcttaacgccagcggcacgccgccggcgatcatcagcatcagctacggtgaatccgaatcagcgctgggcgctgccaataatcagtctgttagctcgctgtatcagcaggcggtaacggagggcgtcaccgtcttcgtgagctcgggcgactcaggcgcggccagttccgacgaccaagatccttatgccgaatacggaatcaatgtcagtgggtacacctccacaccctacgacgtatcggtgggcggcaccgactttgccgatacttatcaaggcgccaacgacatctattggaactctaccaacaatgccaccaactacgggtcggccctttcgtatattcctgagattccctggaacagctcttgcgccagcgtgctgttcgctgatttcctgggagtcgagcccacctttggcgccggcggactttgcaataatacctccgatcttaacgcctacggcctcctcaacaccgcagcgggtagcggcgggcccagcgcttgcgccaccggcgcgcccgatatccccggcgtggtgggtggcacctgtgcgggatatgccaagccctcgtggcagtcggggttgatgggcaatcccagcgacggcgtgcgcgacattcccgatgtttccctcttcgctgccaacggaatctgggggcacttctacgtggaatgcttttctgatcccaacaacaatggcaagagttgcagcggcgctcccagcgggtggaacgggggtggcgggacatcgtttgccgcaccgatcatggcggggattcaggcgctcgtcaatcaggcttccgggagccggtggggcaaccccaatcctgcctattacgagctggcggcggaggagtacggctccgttggcagcacgtcctgtaaatccgctcgcggcaacgcggtgggcagcaattgtatcttctacgacgtaacccagattccgcttgtccacggaggaacgggcacggggggcgatagcgacgtgccttgctcagggataaattgttatgcgccctcgggcacctatggagcgctttccaccgccccccagaccctgagttcggtgtcggcaaccaacctcgggagcggctacaccagcgctcctacctgcaccctgagcgggggcgggggatcaggggcagcctgcagcgccagcgttaccggcgtggttgcgacgattgatctcaccaacggcgggttcggttatacgacagagcccacctgcaccctgtcgggcggaggaggaacgggtgcgacctgtgcggcgatgatatgtgctaattacgaggtttgcgaattggctgtcaccaattttgggagcggctacacctccaaccccgcctgcacgctcggcggcggcggcgggacaggcgcaacctgcaccgccaccgaagtcacgggaatcgcggccagtcttaccgcccccggcagcggctacaccagcctgccccactgcgttctcagcggaggtgggggaacgggcggaacgtgcgctgccatgacggacaacaccagcacctactatctacgcgcgttcgacgctgcgaccgggtgggacttcaccaccgggatcgggacggtcaatgtctcgaacctggtagccagcttcactacttccgcctcggcgtccttgtccccgctcagcctctcatttccacccctgccgatcgatgaaagcagcaccccgctgagcgtgacggtgagcaatgccgggaccgccaacctcgtcatcttaagcgacgctattagcggtacgaacgccagcgactttgccattagcgccgacacctgcacgggagccacgctcactgccagcggcacctgcacggtcagcgtgacctttactccgtcggcggaggggagctttagcgcctcgctgaatatcacggacattgcccctcacagcccgcagaaggtgcttttgaccggaaccggattgggggccggcgtgggtttgtcgccctcttccctcaccttcccagagcaaattcctggcaccagcagccccgcgcaacccgtgacgctgtccaacggcggcaacgtccctttgagcgtcagcattgccatcacggggaccaacagtggtgactttgcccagaccaacaactgcggatcatccgtgccggccggaagcctctgcgccatcaatgttatcttcacacctggggcgccgggaagcagaagcgccaccctcacgattacggacaatgccctgaacagcccgcaaacggtcgccttgaccggcattggcgcaagtgccgtgcccgtcatcaaccaacccctcgtgcccaccagcgtcacccccggcgggcagggattcactttcaccgtcaacggcacgggctttgtcaacggcgccacgattaattggaatggcacagcgctggcgacgacttttgtgagtagtcaacagcttacggccactgtgccggcggcaaacatcgccttgatcggtacggcttggattaccgtgggcaatcccggttcggtcgtgacttcgaacatgattccgttcttggttacggctcccaccccgacggcagctttcaccaaggcgagcggctcgcccctagcggcgggaacggatcctgtatcaattgcggtgggggacttcaacggggatgggaaattggatttggcggtggcgaataaaggcagcaacaacttgaagatcttactgggaaacggcgatagcaccttcacgcccacctccgcatctccggccgcgggcgccacgccttatggactcgtggtcggggacttcaacggggatggaaaattggacttggcggtggcgaatcctggcagcaacagcgtgaccatcttactgggaaatggcgacggcacattcacacccccctccgcatctccggccgctggaaccacgcctcacgaactggcggtgggagacttcaacggggatgggaagttggacctggcggtggcgaattccggcagcaacaccgtgacgatcttgttgggaaatggtgatggcacgttcacgcccagcgctgcgtctccggccactggatctttgccttttggaattgcggtgggggacttcaacggggatgggaaattggacttggcggtgacgaatcaaaccgacagcacggtgaccctcttactgggtaatggcgatggcaccttcacgcccgccgctacgtctcccgccacaggatcttcgccttctggaattgcggtgggggacttcaacggggacgggaagttggacttggcggtggtgaattccggcagcaacaccgtgacgatcttgttgggaaatggtgatggcacgttcacgcccagcgctgcgtctccggccactggatctttgccttttggaattgcggtgggggacttcaacggggatgggaaattggacttggcggtgacgaatcaaaccgacagcacggtgaccctcttactgggcaatggcgatggcacgtttacgcccgccgcctcatccccggccacgggagcccagcccatgggagttgcggcggggaacttcaatggagatggcaggctcggtctggccaccgccaacgggggctcgaacaacgtctcagtattaatccagtttcccatggccagcgtcaccccgcccagcctgtcgctgggcaatcaacccgtagggaccaccagcggggccagcccagtgacggtgagcaacaccggcacggcgcctttgaccttcacgggcattgcggtgacgggggactttgcggcagcgggcggcaccacctgcagcaccagtgcgccgcttgccggcgatagtaattgcgtgatcaatgtgacgttcacgccctcggctacgggcggccgctcgggcaacctcacgctcaccgacaacgccggcagcagtcctcaagtggtggatttgagcggcaccggcactgcccccactgccgacctgagcacttcaagtgtcagctttggcagtcaagcgctggagactacgagcccagccggcgcggtgacggtaacggacaacggcacggctcccctgactttcacgaacattgtggtgacaggagactttgccgtggcggccagcggcaccacctgcagcaccacggcaccggttgccgccggcggcgggagttgcgtgcttgatgtgacgttcacgcccacggccgacggcgcgcgctccggcagccttacgctcatcgacaacgccaacagcagtccgcagaccgtcagcttgagcggaaccggtactgggcccgaggttagcttgtcctccccgctacctttctcggctccatctataggcgtcacgaccagttcccagactgtcacactcactaacacgggcaacagcagcctgactttcagcgcgattgcggtcaccggcccctttgccatcgtcagctccgggaccacctgctcgacctccgcccccgtcgccgccaccgcgacctgcacggtggcgatcacgtttacgccgacggcccgaggcatgtcgtcgggcagcctgcagttcagcgacaatgcgtacaacagccctcagaccgtggcactgatcggcacggtcccggacttcgccctggggccaccatccggttcttccacctcggctaccgttgcgcccggccagcctgcgacttacactttaagtatgagtggtatagggggattcaccggggcggtgaccttcgcctgcacaggagctcccgccggagcaacctgcacggtttggccggtcacggcaacagcggcgaactctgcgaccaatatcaccgtcacggtttccaccaccgcgccttcgctgagtgcgccgcgctccgggccccttccccaggttccgcccctgccgccgggccttagggttctgttgatgcttgccttggttctagggataatggcatgggccattcatcgccggaaccaacccggctcgagcccatggcggtccgccatgctcccgctcgctttgggattgttgctggctctggcgctggcaggatgtggcagtggaggtggcggaggtgggaccagcaacgttacgccgaccccgtctaaccccgtaacccccgttggaacctccacgctgacggtgacgggaactgccggcgcaggatcttctgccttgagccatagtgttgcacttatgctgacagtgagttaatctgaaaacataaggagaacttcttatgaagaggcttgctagcaacgctcggtgccttcttataattgccttcctggtgatcatgggactttttctggtggcctgcggcgcgggtggcagcaccaaattgccccccacttctccggctccgaccataaccagcgccgacagtgccgtgtttagcgtggggacggggggctcattcaccgtgaccaccacgggaactcccatcccgaccatcacggagaccggggcacccgcgacatttacctggcatgacaattccaacgggacaggcacgctgagtggcacgcccaccaccagcggtacgttctccgtgacgttcacggcttccaatggcgtcggcacatccgcggtccagaccttcacgctgatcgtggcccaagcaagcaacctgattctgcctattaccaacggtctcactctcgcgacggcaagttctcactgggttttagtcgacaattgtcaagtagctggcggtattgtgcctatgaaccaatttgccttcgaacttacttacagcgacgcaggattcaaggctaatttcatcgatcccaacggggctagccacacctccaccgggacctggacggctaatgctgactcgagcggtcttttaagtaccctcttagtcacgacggcgcaacccatcaccaatccgggcatgtaccccactagctggaccgttagtagcatggacagcgttacgggttcaactctttcgtctcagtccgcagccatagtgaactggtataccgctaacagcgctgcttttctaaccagccctggtatcgctggttccaccgagggttgtagctttacgcttgcaggcggcgggatctagccggcggcagtatcgaccgcgcttaacttcgagctctaggcactcggctttccgccctacaattcgggtgtgcgccgcgctttctccgttatgaggtgaatatgagacgaccccttctcgcgctatgggtggtgtgggtgttggcgggggttccccaaaaagtcgccgggcaggatttcgtgaccacggccatgtccgggctccctgcggagaccctgcgggtggagtattccagccctgccaagttgcgcgccatccctgattaccagaaccttaagagtagattcctggggccgcgcttgcagcagttggagtcggcgctcggccagatcggaatgagcgaggacgatatcgatgacttgctgacaggatggaaaccgggcgcgaaggaaatggatctttacggttatgcctccggacgctttgacaaggcgggggtggcgggccgggcggcggcgcagaacctcacgcccactccccttgccggagagcaggcctactgcctgcgagccggcttggcggctacgtgcgttgtcattctggaggattccctcggagcgttcgggccgctctcgtccgtgacggcgatgctggacgcgcacgccggacaggcgcccagcttgaataccgacccacatttcaccagcctgatcggcagcgttaacaagggcgcgcccatttggggaatcgccttggggggagccgtcggcgattggtttggcgcatggttgtcaaatcaaaacaacctgaagttggattggggacaggttttccagaaagtggattccttgacctattccattgaattgtcggacaaggtcaacatggatctgaaactcaactgcgccacagcgtcggacgcggccaccctgcggcaggtcttggatggcatcaaggtggcgcaacaggttgcctggcaattgcagaatcccggtcaagcgaacccctacaccgccatgaatgtcgacgcccatgaccagcagattagccttaaaatcaccatggattactcggcattggcgcttgcgggcggcggcaactctccgcagaattaagcgcccagccgcccatctgacccaactccccacaaaagacgaattgaaagtttccggtgatgccgttacaatataggattgctcttgaggcaaataaggagtcttatgaaggacaagattcacccgaactaccatgaggtcaatgtggtctgcgcgtgtggcaacgctttcaagacgcgctcgactttcaagagcgacctcctgcacctggacatctgctccaagtgccatcctttctttacgggcaagcagaagcttgtagacgccgccgggcgcgtggaacgcttccagcggaagtatgccggctttaagaaagctacgcctgcggcggtcggcacgaaggcttagtgggctgttgtggcgctgagcttgagctcaatatgtgccgacctgaaggtcagcgctacaggccaatgcgtcttccaggcgcaatactcgcagcagggcactaaacaaattggcttaacgggagccggatggcaacacctccacccctcgatccctacatcgacaagcccaaagtttatctgctgggacgccagcacgtcgccgacaacgaactggcgcgcttcctggcggatgaggggatggtgttctccaccgacgcccccgcggccgccgaggccctggcggaaatcgccgggcgtgtttgctacatgtcgtttggcaagggaagaaagagcaatcgcgagtacctggagaacatcctggtttccaaacacggcagcgtgctggagcacgccgtgtggtgcctgctcttcacgggcgtcagccgcgccctcacccatgaactggtgcgccaccgcgccggcttcggatattcgcaactttcccaacgctacgtggatgagagcgacgcgcgctacgtggtgccgccgctctatcaggagaatcccgagttgcgggcgaaatggcagcagaccatcgaatcgctgcgccaggcgtatgatgaactcgccgaagccacggcgcaatacgtgcagcagaagcatccggaaatggccccccgcgaccggcgcaagtgggcgcgccaggcagcccgctccattcttcccaatgccaccgaaaccaagattttcgtgacgggaaattcccgcgcctggcggcatttcctcgagctgcgcggcagcatccacgccgacacggaaatccgcttgctggcggttgaggttttccgcgtcttcaagaaggaatcgcccaatattttccaggatatcgagcttgtggatgagcccgatggcatgccctccgtccgcgtcactcactccaaagtctagcgaggcccgcccgtgagcttgcctacggaagaaccgcaatcctcgattccggcgttcgccagcctgctcggcggggcgatcctgacgtttctctttctgattgtggccatttcagaattcggctgggcactgggattgcccattcatgggttggtgttgcccgccgccctggtggggtcatgtggggtgaccgggtggggagcacgaatctacttccgccgccctttccgcgtgaccctggcgttggccgccctgctggtcttgctggtggctgcctccgcgggcatcagcggggcgttctacgatgtttcttttgacggccaggcataccaccaggaaggcgcttaccagcttgcccacgggtggaatccgctcttcacgcgccacatcagcccggtggctgtcttccaaaacgccatcttgaatcactaccccaaagggtcctggataatagcagcgtcgatgtatcttataacgggacgtatcgaaaccggcaagttcgccaacctgctccttatttgcgccgctttttgcatggcgctggcggccttcgccggctcgcgaaaaaagctgagtgcctggccggtggccgtggccttgctggtggcggcgaacccggtggcgctctgtcaactgtgcactttctatgtggatgggcaagtggcgtcgcttttcgtctgcctggcagctctttgttttctgatcgcttcccgtggcaatccctgggtgaactggttgctgtttgcggccgccgtcttgatcatacaggtcaagttcacgggtccggtgtatgccacgattctctttgccggattctttgctctcctggcctggcagaagcggccctggcggaagcctttatatgtggctttgctggccctggggctggggacggccgttttcgggatgaatccctacgtgttcaataccctggagaatggccacccgttctatccctttttcggaagaggagatcatgcgaatttcagcgtggcaaatgatactcctccgcggttcttccaagccaaccgggttgcgaacctcgcgtcgtcgattttctcgcgatcgagcgtctggccgccggagtccacgcccaaagctccgtggcaggttgcccgcggcgaatggatggaatttcaggagcccgatgtgcgcgccggagggttcggccctctcttccccgcagcgctggttttgtctttggtgttcctggcgattcgtttatggcggggtggcgccgtgccctgggtcgcaacggcaatcattctgataattattgcttcggtattacccgttcagccttgctggtgggcccgctatgccccgcaggtgtggttggtgcccctggtggcgctggcggctctcggcgggcccgttgagagaccgaacttgcatcgtctttcctggctggtgttgctcatcctcggtgtgaatgtggccgggatcgccgtggttaatttccgcgccaacctgagcgccactcgcgagaccgccgcaagtctggctgatctccgctcccacgttccctttcagatagccttcggcgatctccgctccaaccgctttcgccttcaggaagcggggatccccttcattgaaaatgagggacctctgaagtgtgatgcagaggtcaaagcaaactatgacctctgcatcgagcactagggcgtcaccatcatttcttcgccagtggcgctgaaatgagtgagagcaaatcaggcgcggcctgatcgcgttccaaatgtggataccgttcgccgccgtgataatccactcggaaagttttgtaatacacgcccgtcttgagcagcagctccagcggcgtggtggacgtggcggtctgctgcaccgcttcccgcagggttgtgggattgaattcgcgcccgtttacggcgatcaaattcatgcccggcgcaacgcctgcctgggcggagggtccgttcatggacacatccttgatggcgccgtttcccttcactctcaaaccgatggagtaactgaggtcgatggcgtctgcccactcctcggaagccttccacaaatcagatcgcgtgccgttgtaaacaagcttccagcccccgtcattgatgccgcccagaggcgcgtggcgagcggtggagcgcagacgcgtctgaaaaaatccggcccaatcgtaaggctgcacggcgttgagagcggcgatcaagtcgtcgaaattatagggcttcagcgcgggtgcgccacccgggccaccgtaaaacgcccggcaaaagtcgttgagggattttgccccctggctgaggcggcgaatggtgacgtcggcttccagccaaatcagcgaaccctcgggatagtagtccaccgaccgccgatagtctgtatattcgtccggcgcggcataaagaagttgcgcggcgacggcggtgtcctccaggggacgccaggtccggcccgactcgcggtcgagttgggcggcggtcatggcaagggaatcccgatagtcctccgggctccacaatccactgcgcgcggccagcacctcgccgagatagttggtcagcccctcgtatacccacagcagatcgcccttcatgggcgcatcgaacccacccgtggccagaccctccggacggcggtatttgccgttccaggaatgggtcatttcgtgcgggagcagcgagccatccactttcagcaagtcggggtcaatcaaggtgcgctcgtgatcgcgatcgtcgctcgattcgtgatgttcaatgccaatgcggatgatgtggtcgctgagggtcagtagaaaatgatagctgcgatagtgccgggagccgaacagcgcgccggtttccgccaccagatttttccaatgcgcaacggtgtccgggctcacctcgagggcgcgctcgctatcgccggcgaggtgaatgaaatgcgccaccccgccgtcattccccaggtcaaaagtgcggtagtgaatgccggtggaaaccggcgaatcgaccagcgtggtgagggagacgggttgaaactcaacctcattgccggattcccgtgccacgggcagcgccgttccatagcgccagccggcgggaactctgagcgttgcctgatactggatgcggtccggattggagccttgcggatacagcaccgtctggttccaattgagcaccgccaattcgctggtcacggaactgccgctggaagagaacagatcttcgtccacggccgagatgtaatcaaaggcaatgtcgagtgaactcgcgcccggcggcacgtccaggtggaaggcgaacatgttgacgttgtcgcgctgccagggaacgggctggccggcggccgtgaacttcaggcccaccaggttggtgatggggccaaccggcatatgctcgcccggaatccatttcggataaagcagggtgagcggaccggatttgaccggcattttcatttgcacgtgaaaaaggcggcgcggcgcgtcggtggcgtcaaccttcaacgcgaccgtagaatcctgagcaaagccgccggcaagaagcagcggcaagaggcaaagcgtgtagattcgcatgtgacctattgtacaccgttgtcgtaacgctgaccttcaggtcagcacgtgccgacctcaaggtcagcgccaggcctacttccttcccacgaaaagaaaatggtccgactggccgatgccctccggcgtctgtgcggttgcttccacaaggtccagccacagttcctgctctgccgcgggaaggtcgccgaagatgttctgccacgccgtggtaaaggactcaacgcccaggaacgccaccttctcgaattggccctggaagagcgcccggaattccgcggcggtggtcaagtgcgcgtagccgatgggcggcgcgtgctcagggtccagattcccgtcgcgcaggtattgctggtggaaggtcacgcgctcggaggcggctccaaacttcatacgcagcagatcgcgcaggtacgacaggcgattgatgcccgcggcgaaaagcgtgccacccggtttaagaattcgggctgactcctgcacgctgccctggcgttcagcgagggattgcaggtgatagagcggtcccatcaggagcgccaggtcgacgctcgcggagggcagcccttccagccgcgcgccggagaggtgatggcggccggcaatgcggtcatgcaagccggctttctgcagcttatctgcgactgcgtccagcaagcgcgcggagatgtccacaaggtgcaggcggcaccccaggcgcgccagaaattccgtgtaatggccgccccccacgccgatctccgcgacaacgtcccctggcttcgccacgcgcgcgagccagcggagcgttattcccagctccacggggcagtcttgcggcaaccgcgcgagttccgcctcgaaggccacgtcgtaatgcctcgccacgttcgattcttgctcattgaattgggccatagtagcgaaagtatacgccgggtccgccacgagttgtagcggcaaaccgccgagcagcggggcggctaaggggaatcagaaggcggaaagcaagcgtagtgcggacctgttctgtagctccgcggagttttgttgtcgatgggggacggaccgcagacccccgaaacaggcctgcgccgcccgttacaactttccctcttccagaaagccagagtatccggtccgggccttgcatttcccctgtgctgggtgtataccttcgtcacgtttatcctttgttagtatccagcggacggccggatcgccagcagcgcgacgggcctgccacccgccttttgcccaggcaaggaggaagccgtggactataacctgctcgatgaaaagtggattcccgttttgtggaaagatgggcgttgcgaccgcgtgggcataattgaggcgctgactcaagcgcaccgaatacgtcaaatcgccgccagcaatcccatggaccgcgtggcgattctgcgttttctcctcgcattgctttattggtgccaggggagcccgccggatggccaggacacggcttccttctttcccgcagattggttcaagaagctaggcgacaacagggactgtttcaaccttctgggcgacgggaagcggttctatcaacacattgccagtggaacagaggcaaaactctccgccgactatcttgtgcaagaggtgcccactggtaccaactcctggcacttccggcattcgacagacatgaaagacggattgtgcgcggattgctgcgccatgggtttgttgcgcctgccggtgtttgccacatcgggagggcgcggcaaaccgccgggtatcaaccaaaaaccgcccgtgtatgtcataccagttggcgcctcactcgctgagaccctgcgactttcctggcgaaagttatcgggcgcggacctggggacgcccgtatgggagaggccggatgcaaccctaccaaaacagggtactgttccacttctaatggggctaacgtggctgccgcgccgcgtgtggttggacaatccgcaagaacctcaggccatctgcgtatcctgcgggcgtaaagagcttctgatacgccgctgcgtgtttgctggcgttgggagcacaaagaccgacggagatggcaagggccgagtgtgggccgatccgcacactatcagtgacggcgaagatatcgttaagcccagcagtgcgcttgctcgcgcggacgcggcggctggccaatggacaaatattgctgcgggtattcttaatgccaagaaaggacatcccaaacgaagtctgtgggtcgtcgccttttcgacagttcaaaacgacaaatatatagaagcgatggaatgtgagattccctttccggacacgctggaaggggggaaggtccaagagagcctcgaaaacattgaaaggtggcagaaagaatgttggaagctcactcgcaaggcaacaccgagagaggcttctcgaaagcacgtcgagattcctcccattttcgatgctattcgtccgcacgtggaagcacgggtttcggggaaggcgggagagttgatctctgcttggggaggcgcatgggaagaggcagcccgcgaatatagtccgatgatggcggctgtcgccaaatcgctgtcacccggcgttacgaccgctgcgcttttgcggcggagacagcttggatacgtgaagcctgacatgcgggaaaagactgaagcggcggaaaagacccgccggaggaaaggaggatcaagtgacagcgacggagcaatacatccaagtcctggcacgcctgaaatctggtgaactcgggctcttacgccaacatgccgggcggaggcttgatcaatcggtagaggggtttgacctgtttgccggactgtggtggcctttgcgcgcgcaaaaccagcgcgcccctcgccgcggggtggcatggctggtcgccaagctttacgccttccagcccgtcgaacattcacgcggcccagccatcgcttatcagcttgggcgttgtcggaaagatcgggaccccgcaaaggatccggttacgcaacggttcgacaaattattgaccttacccattgagaaccttgagccttccttgcaatgggccattagccttctgtctcggaagagcctcaagttcgactgggcagagttaaccgatgatctctcgctatgggaacgcgaatcaaagcggatcaaatgggccgaggagtttctaaaaacttcgaaggaggatcgttatgctgattgaaattcatgccattcaaaatcacagcccagccaacctgaaccgggacgacttgggcgcgcccaaaacctgctatttcggcggggtcctgcgctcccgcatttccagtcagtgtctgaagcgcagcatccgcatgagcgaagggttcaaagagttgcttgggggtatccgcacccgcaaattggccgaaaagatttcggaaaaagtaaccgggaaacccgccgcgaaaaagcgggcagcgaagattctggaaaagtgcggcatcaagccgcgcagcgaagatgatgccaaaagtgacatgcttgtttatacgacgcaggaagcaattgtgaagatggccaaacttctccaggatggtgagggaaagaaggatgaggagttggcggaagaatttggcaagctgatcagtgaatccacctgcgtgcccgacatggcgctcagcggaaggatgctggaaaccggagtgctgaaagacacaacggtcgaggcggcgcttcaggttgcccacgcgatttccacccacgaggctcgtccggaggtggattacttcgtggcggccgatgacgtgcccggtgatgatgcgggtgcgggcttggtgggtgaagctatgtttggcgccgcctgcttctacaagtatttttccatcgatttcgagaccctgaagaagaacctcaagggcaaccaggtactcgccgcgcacacggtgggtgcattcattcgcggcgcggccctgtcaaatcccaccggcaagcagaacagcttcgccgcccacaatcctcccgatggaatcctggtggaaatcaggaacaatccgctcagctacgccaacgcctttgccaaaccagtgaccgacgaccaacgagacatcatctcccagagcatcgcgcaactcggccagtacgttcacgatatcgacaatggatacggcgggccgaagagccggttctggttctcgcccaatctccgctaccctttgacggcctccttcaaggaaaaggaaaacggaaaggaaaaagtccaggaggtcgcgcttacggataacaacataaggtcgctcaacgcgttaatccgggcggtcgtcaaggaaactggctatgactgggaggaggttcagaaggtggtggtgaattcggaggtggcatgatgagcgcaaacaccctgtttctccgtcttgaaggtccccttcaagcatggggcgatcagcaatcgaagtttgtcattcggcggacggctgaggccccgacgaagtctggtgtgatcgggatgctctgcgcggcattgggagtttcgcggcctgaggccgccgagagccgcctccgcgctctcggggcgttacgcatgggcgtgcgcattgatgttcctggagtccggtggtgggattatcacacagtaggcgccgggatgccgatgcggacggcggaaggcggaactaagcccggcgccatgctcacccggcgcgagtatctgtgtgatgcttcctttcttgtcgctcttcagggtgagctaggtctgattgctgaactggaaggggcaatcaaagcgcccaggtggacgctctacctcggcagaaagtcctgccctccttcgcgccctctactggatccgaagcattcgccccgtgaattcgacgacctcctttccgccctcaagtcggttccctggcgcaaacggttggagggagacgatctgccccaaagattggaatgcttgctcgactggcagccgacagaagaacagccggaggcccccgatgatgcgctcgtctggtacgacgtgccgctgaccttcgatccgccgtcgcaccagccccgatttgtcattcgcaagcacctgcgagtatggcccgacggtgaggtaaccacaggtccgccagcacagaacgagacgccagcgcctccccgtccgagagcggattacaccaacaccgagtacagaaatcgacgcaaggagcggctggacggcgattatcacctgtgcgtcttctgcaaggcgcccgccacgactgtccaacacatcacctatcgccacgcggggggtagtgaacacatcgaggagttgcgctccctctgccgttactgccatgacgccgtgaccatgatcgaatacggtctgggcatggggcttgaccggattaatcccgaggagccgcgctggcgcgatttgatccgcgaaaagcgagaggagattattaaattccgttctctcgaaacccggcgcagacatctcgttgccgaggaggtggaatagccatgttcctttcctgtctcctgattgacaccggcaccaatcctgaccgcccccgtcccgggcgcacgtggttgcgcaatctttatcatgttcaccaacgcctttgcatggcttttccgtctgcatccagaaaatccgatgacgcggatttcctcaaacctttcgacccaggggatttcggcaagggtcaggtgcacatagcgcgtgcggatgactccggttttctcttccgcatcgacccgggccccgccgggcgagccgtgattctggtgcaatcggcggtgaaacccgactgggattatgcctttcaaaatgccgggtttctgctggccgctcccgccgaagtaaaagtgtacgaaccgggttttgcggcgggccagaggcttcgcttccggttggcggcaaatcccacgcggaaactatcgcagcattctcgtgagcgggacggaaaaccggtggcggagaagtgggttggaaagcgggtgcccgtgcccgccgatcaactcctgccttggctggcggaatggcgggttcgcccggatgaaccgccggggttctgcatcgacaaggattccaccaccgttcacgcaggctacatttatgtgaataaggggcgggaggagggcgggcagcggctgcgctcggttcgctacgacggcattctggaggtaacggacgccgataaattccgcaatacgcttctgcgcggcatcgggccaggcaaagcctttggctttgggctgctttcggtggcgccctataccgggccagccgcagcaatctcgtaggggcggttcgcgaaccgcccctacgcccgtcgatcggggatcgacgcagcgtaacgccgccatcctggcggcaccggtgccggctggaagccggcgttacgagcagcacgcctgtggaggcaacgtgagaatccaagatctccacatactacccaagttcggcgacggatggagttatctgtacgtcgagcactgcggcgtcgatcaggaggaccgtgccattgcggtgcatgacaaaagcggcagggtgccggtcccctgcgccaatctcgctctcctgatgttgggtcctggcgtctcgatcactcacgccgccgtctccgtgctggcggaccatggctgtctggtggcgtggtgcggggaagagggagtgcgcttctacgccctgggcatgggcgaaacgcgcagcgccgccaatttcctgcatcaggcgcgggtgtgggcgcacaccggttaccgcatggaggtggtccgtcgcatgtaccagttgcggttttccgagaagttcgattccacgctcagcctccagcaaatccgcggcatggagggagtacgcgtgcgcgatagctatgcgcgcatcgccaaggagaccggcgtcacctggtccggccgaagttatcaacgagacgagtggagcaaggccgatccggtgaaccgggccttgtccaccgccaactcctgcctgtatgggatctgccatgccgccattgtctcggcgggcttttcacccgcgctgggattcatccataccggcaaaatgttgtctttcgtttatgacattgccgacctctataagacggaggtcaccgtccccattgcctttcgcgccgtcgcccaacccaaagggctgctggagcggcacgtgcgcctcacttgtcgcgaccaattcgtctccacgcgccttctggagaggattatccccgatatccagacggtcttgatgatgcccaagccgagggcgggcgccgctgccccctttgaccaggatgccgccgcccccggcttcctctgggaccctgcgcagggtgacgttcgtggagggcgcgtgcagcccttggaaattgacgattcggagcctgacgatggtggtcctgattcttgagcgcgtccccccgggattgcgcggcgagctaacaagatggttcctggaaccgcaggcgggagtctttgtcggccgcgtctccgccgccgtccgtgaacgcctttgggaaaaagcgtgttcccaagctcgcgatggagggtgccttattatccattcctcggacaatgagcaggggtataatgtccggacttggggtcggacggcacgctccatcgaagacttcgagggcctttttctggttcgagtgccgtagaatcaacaactttttcagtattgtccccacgcgcgtgggggtgaaccggccacttggcaatgtccatgtcgatatgggacattgtccccacgcgcgtgggggtgaaccgcggtggtcaggtatgacgatggctcatcttggattgtccccacgcgcgtgggggtgaaccgtactcgggttacaggaacacgcggcggcatccattgtccccacgcgcgtgggggtgaaccggccggcgcggcggaaacgttcgccttcgtctcattgtccccacgcgcgtgggggtgaaccgctgagt

SEQ ID NO: 981 - DNA, 117898 bp, Artificial Sequence
  Synthetic Oligonucleotide
  misc_feature (1)..(87558): n is a, c, g, or t
nnnnnnnnnnnnnnnnnnnnnnnnnnnnnnnnnnnnnnnnnnnnnnnnnnnnnnnnnnnnnnnnnnnnnnnnnnnnnnnnnnnnnnnnnnnnnnnnnnnnnnnnnnnnnnnnnnnnnnnnnnnnnnnnnnnnnnnnnnnnnnnnnnnnnnnnnnnnnnnnnnnnnnnnnnnnnnnnnnnnnnnnnnnnnnnnnnnnnnnnnnnnnnnnnnnnnnnnnnnnnnnnnnnnnnnnnnnnnnnnnnnnnnnnnnnnnnnnnnnnnnnnnnnnnnnnnnnnnnnnnnnnnnnnnnnnnnnnnnnnnnnnnnnnnnnnnnnnnnnnnnnnnnnnnnnnnnnnnnnnnnnnnnnnnnnnnnnnnnnnnnnnnnnnnnnnnnnnnnnnnnnnnnnnnnnnnnnnnnnnnnnnnnnnnnnnnnnnnnnnnnnnnnnnnnnnnnnnnnnnnnnnnnnnnnnnnnnnnnnnnnnnnnnnnnnnnnnnnnnnnnnnnnnnnnnnnnnnnnnnnnnnnnnnnnnnnnnnnnnnnnnnnnnnnnnnnnnnnnnnnnnnnnnnnnnnnnnnnnnnnnnnnnnnnnnnnnnnnnnnnnnnnnnnnnnnnnnnnnnnnnnnnnnnnnnnnnnnnnnnnnnnnnnnnnnnnnnnnnnnnnnnnnnnnnnnnnnnnnnnnnnnnnnnnnnnnnnnnnnnnnnnnnnnnnnnnnnnnnnnnnnnnnnnnnnnnnnnnnnnnnnnnnnnnnnnnnnnnnnnnnnnnnnnnnnnnnnnnnnnnnnnnnnnnnnnnnnnnnnnnnnnnnnnnnnnnnnnnnnnnnnnnnnnnnnnnnnnnnnnnnnnnnnnnnnnnnnnnnnnnnnnnnnnnnnnnnnnnnnnnnnnnnnnnnnnnnnnnnnnnnnnnnnnnnnnnnnnnnnnnnnnnnnnnnnnnnnnnnnnnnnnnnnnnnnnnnnnnnnnnnnnnnnnnnnnnnnnnnnnnnnnnnnnnnnnnnnnnnnnnnnnnnnnnnnnnnnnnnnnnnnnnnnnnnnnnnnnnnnnnnnnnnnnnnnnnnnnnnnnnnnnnnnnnnnnnnnnnnnnnnnnnnnnnnnnnnnnnnnnnnnnnnnnnnnnnnnnnnnnnnnnnnnnnnnnnnnnnnnnnnnnnnnnnnnnnnnnnnnnnnnnnnnnnnnnnnnnnnnnnnnnnnnnnnnnnnnnnnnnnnnnnnnnnnnnnnnnnnnnnnnnnnnnnnnnnnnnnnnnnnnnnnnnnnnnnnnnnnnnnnnnnnnnnnnnnnnnnnnnnnnnnnnnnnnnnnnnnnnnnnnnnnnnnnnnnnnnnnnnnnnnnnnnnnnnnnnnnnnnnnnnnnnnnnnnnnnnnnnnnnnnnnnnnnnnnnnnnnnnnnnnnnnnnnnnnnnnnnnnnnnnnnnnnnnnnnnnnnnnnnnnnnnnnnnnnnnnnnnnnnnnnnnnnnnnnnnnnnnnnnnnnnnnnnnnnnnnnnnnnnnnnnnnnnnnnnnnnnnnnnnnnnnnnnnnnnnnnnnnnnnnnnnnnnnnnnnnnnnnnnnnnnnnnnnnnnnnnnnnnnnnnnnnnnnnnnnnnnnnnnnnnnnnnnnnnnnnnnnnnnnnnnnnnnnnnnnnnnnnnnnnnnnnnnnnnnnnnnnnnnnnnnnnnnnnnnnnnnnnnnnnnnnnnnnnnnnnnnnnnnnnnnnnnnnnnnnnnnnnnnnnnnnnnnnnnnnnnnnnnnnnnnnnnnnnnnnnnnnnnnnnnnnnnnnnnnnnnnnnnnnnnnnnnnnnnnnnnnnnnnnnnnnnnnnnnnnnnnnnnnnnnnnnnnnnnnnnnnnnnnnnnnnnnnnnnnnnnnnnnnnnnnnnnnnnnnnnnnnnnnnnnnnnnnnnnnnnnnnnnnnnnnnnnnnnnnnnnnnnnnnnnnnnnnnnnnnnnnnnnnnnnnnnnnnnnnnnnnnnnnnnnnnnnnnnnnnnnnnnnnnnnnnnnnnnnnnnnnnnnnnnnnnnnnnnnnnnnnnnnnnnnnnnnnnnnnnnnnnnnnnnnnnnnnnnnnnnnnnnnnnnnnnnnnnnnnnnnnnnnnnnnnnnnnnnnnnnnnnnnnnnnnnnnnnnnnnnnnnnnnnnnnnnnnnnnnnnnnnnnnnnnnnnnnnnnnnnnnnnnnnnnnnnnnnnnnnnnnnnnnnnnnnnnnnnnnnnnnnnnnnnnnnnnnnnnnnnnnnnnnnnnnnnnnnnnnnnnnnnnnnnnnnnnnnnnnnnnnnnnnnnnnnnnnnnnnnnnnnnnnnnnnnnnnnnnnnnnnnnnnnnnnnnnnnnnnnnnnnnnnnnnnnnnnnnnnnnnnnnnnnnnnnnnnnnnnnnnnnnnnnnnnnnnnnnnnnnnnnnnnnnnnnnnnnnnnnnnnnnnnnnnnnnnnnnnnnnnnnnnnnnnnnnnnnnnnnnnnnnnnnnnnnnnnnnnnnnnnnnnnnnnnnnnnnnnnnnnnnnnnnnnnnnnnnnnnnnnnnnnnnnnnnnnnnnnnnnnnnnnnnnnnnnnnnnnnnnnnnnnnnnnnnnnnnnnnnnnnnnnnnnnnnnnnnnnnnnnnnnnnnnnnnnnnnnnnnnnnnnnnnnnnnnnnnnnnnnnnnnnnnnnnnnnnnnnnnnnnnnnnnnnnnnnnnnnnnnnnnnnnnnnnnnnnnnnnnnnnnnnnnnnnnnnnnnnnnnnnnnnnnnnnnnnnnnnnnnnnnnnnnnnnnnnnnnnnnnnnnnnnnnnnnnnnnnnnnnnnnnnnnnnnnnnnnnnnnnnnnnnnnnnnnnnnnnnnnnnnnnnnnnnnnnnnnnnnnnnnnnnnnnnnnnnnnnnnnnnnnnnnnnnnnnnnnnnnnnnnnnnnnnnnnnnnnnnnnnnnnnnnnnnnnnnnnnnnnnnnnnnnnnnnnnnnnnnnnnnnnnnnnnnnnnnnnnnnnnnnnnnnnnnnnnnnnnnnnnnnnnnnnnnnnnnnnnnnnnnnnnnnnnnnnnnnnnnnnnnnnnnnnnnnnnnnnnnnnnnnnnnnnnnnnnnnnnnnnnnnnnnnnnnnnnnnnnnnnnnnnnnnnnnnnnnnnnnnnnnnnnnnnnnnnnnnnnnnnnnnnnnnnnnnnnnnnnnnnnnnnnnnnnnnnnnnnnnnnnnnnnnnnnnnnnnnnnnnnnnnnnnnnnnnnnnnnnnnnnnnnnnnnnnnnnnnnnnnnnnnnnnnnnnnnnnnnnnnnnnnnnnnnnnnnnnnnnnnnnnnnnnnnnnnnnnnnnnnnnnnnnnnnnnnnnnnnnnnnnnnnnnnnnnnnnnnnnnnnnnnnnnnnnnnnnnnnnnnnnnnnnnnnnnnnnnnnnnnnnnnnnnnnnnnnnnnnnnnnnnnnnnnnnnnnnnnnnnnnnnnnnnnnnnnnnnnnnnnnnnnnnnnnnnnnnnnnnnnnnnnnnnnnnnnnnnnnnnnnnnnnnnnnnnnnnnnnnnnnnnnnnnnnnnnnnnnnnnnnnnnnnnnnnnnnnnnnnnnnnnnnnnnnnnnnnnnnnnnnnnnnnnnnnnnnnnnnnnnnnnnnnnnnnnnnnnnnnnnnnnnnnnnnnnnnnnnnnnnnnnnnnnnnnnnnnnnnnnnnnnnnnnnnnnnnnnnnnnnnnnnnnnnnnnnnnnnnnnnnnnnnnnnnnnnnnnnnnnnnnnnnnnnnnnnnnnnnnnnnnnnnnnnnnnnnnnnnnnnnnnnnnnnnnnnnnnnnnnnnnnnnnnnnnnnnnnnnnnnnnnnnnnnnnnnnnnnnnnnnnnnnnnnnnnnnnnnnnnnnnnnnnnnnnnnnnnnnnnnnnnnnnnnnnnnnnnnnnnnnnnnnnnnnnnnnnnnnnnnnnnnnnnnnnnnnnnnnnnnnnnnnnnnnnnnnnnnnnnnnnnnnnnnnnnnnnnnnnnnnnnnnnnnnnnnnnnnnnnnnnnnnnnnnnnnnnnnnnnnnnnnnnnnnnnnnnnnnnnnnnnnnnnnnnnnnnnnnnnnnnnnnnnnnnnnnnnnnnnnnnnnnnnnnnnnnnnnnnnnnnnnnnnnnnnnnnnnnnnnnnnnnnnnnnnnnnnnnnnnnnnnnnnnnnnnnnnnnnnnnnnnnnnnnnnnnnnnnnnnnnnnnnnnnnnnnnnnnnnnnnnnnnnnnnnnnnnnnnnnnnnnnnnnnnnnnnnnnnnnnnnnnnnnnnnnnnnnnnnnnnnnnnnnnnnnnnnnnnnnnnnnnnnnnnnnnnnnnnnnnnnnnnnnnnnnnnnnnnnnnnnnnnnnnnnnnnnnnnnnnnnnnnnnnnnnnnnnnnnnnnnnnnnnnnnnnnnnnnnnnnnnnnnnnnnnnnnnnnnnnnnnnnnnnnnnnnnnnnnnnnnnnnnnnnnnnnnnnnnnnnnnnnnnnnnnnnnnnnnnnnnnnnnnnnnnnnnnnnnnnnnnnnnnnnnnnnnnnnnnnnnnnnnnnnnnnnnnnnnnnnnnnnnnnnnnnnnnnnnnnnnnnnnnnnnnnnnnnnnnnnnnnnnnnnnnnnnnnnnnnnnnnnnnnnnnnnnnnnnnnnnnnnnnnnnnnnnnnnnnnnnnnnnnnnnnnnnnnnnnnnnnnnnnnnnnnnnnnnnnnnnnnnnnnnnnnnnnnnnnnnnnnnnnnnnnnnnnnnnnnnnnnnnnnnnnnnnnnnnnnnnnnnnnnnnnnnnnnnnnnnnnnnnnnnnnnnnnnnnnnnnnnnnnnnnnnnnnnnnnnnnnnnnnnnnnnnnnnnnnnnnnnnnnnnnnnnnnnnnnnnnnnnnnnnnnnnnnnnnnnnnnnnnnnnnnnnnnnnnnnnnnnnnnnnnnnnnnnnnnnnnnnnnnnnnnnnnnnnnnnnnnnnnnnnnnnnnnnnnnnnnnnnnnnnnnnnnnnnnnnnnnnnnnnnnnnnnnnnnnnnnnnnnnnnnnnnnnnnnnnnnnnnnnnnnnnnnnnnnnnnnnnnnnnnnnnnnnnnnnnnnnnnnnnnnnnnnnnnnnnnnnnnnnnnnnnnnnnnnnnnnnnnnnnnnnnnnnnnnnnnnnnnnnnnnnnnnnnnnnnnnnnnnnnnnnnnnnnnnnnnnnnnnnnnnnnnnnnnnnnnnnnnnnnnnnnnnnnnnnnnnnnnnnnnnnnnnnnnnnnnnnnnnnnnnnnnnnnnnnnnnnnnnnnnnnnnnnnnnnnnnnnnnnnnnnnnnnnnnnnnnnnnnnnnnnnnnnnnnnnnnnnnnnnnnnnnnnnnnnnnnnnnnnnnnnnnnnnnnnnnnnnnnnnnnnnnnnnnnnnnnnnnnnnnnnnnnnnnnnnnnnnnnnnnnnnnnnnnnnnnnnnnnnnnnnnnnnnnnnnnnnnnnnnnnnnnnnnnnnnnnnnnnnnnnnnnnnnnnnnnnnnnnnnnnnnnnnnnnnnnnnnnnnnnnnnnnnnnnnnnnnnnnnnnnnnnnnnnnnnnnnnnnnnnnnnnnnnnnnnnnnnnnnnnnnnnnnnnnnnnnnnnnnnnnnnnnnnnnnnnnnnnnnnnnnnnnnnnnnnnnnnnnnnnnnnnnnnnnnnnnnnnnnnnnnnnnnnnnnnnnnnnnnnnnnnnnnnnnnnnnnnnnnnnnnnnnnnnnnnnnnnnnnnnnnnnnnnnnnnnnnnnnnnnnnnnnnnnnnnnnnnnnnnnnnnnnnnnnnnnnnnnnnnnnnnnnnnnnnnnnnnnnnnnnnnnnnnnnnnnnnnnnnnnnnnnnnnnnnnnnnnnnnnnnnnnnnnnnnnnnnnnnnnnnnnnnnnnnnnnnnnnnnnnnnnnnnnnnnnnnnnnnnnnnnnnnnnnnnnnnnnnnnnnnnnnnnnnnnnnnnnnnnnnnnnnnnnnnnnnnnnnnnnnnnnnnnnnnnnnnnnnnnnnnnnnnnnnnnnnnnnnnnnnnnnnnnnnnnnnnnnnnnnnnnnnnnnnnnnnnnnnnnnnnnnnnnnnnnnnnnnnnnnnnnnnnnnnnnnnnnnnnnnnnnnnnnnnnnnnnnnnnnnnnnnnnnnnnnnnnnnnnnnnnnnnnnnnnnnnnnnnnnnnnnnnnnnnnnnnnnnnnnnnnnnnnnnnnnnnnnnnnnnnnnnnnnnnnnnnnnnnnnnnnnnnnnnnnnnnnnnnnnnnnnnnnnnnnnnnnnnnnnnnnnnnnnnnnnnnnnnnnnnnnnnnnnnnnnnnnnnnnnnnnnnnnnnnnnnnnnnnnnnnnnnnnnnnnnnnnnnnnnnnnnnnnnnnnnnnnnnnnnnnnnnnnnnnnnnnnnnnnnnnnnnnnnnnnnnnnnnnnnnnnnnnnnnnnnnnnnnnnnnnnnnnnnnnnnnnnnnnnnnnnnnnnnnnnnnnnnnnnnnnnnnnnnnnnnnnnnnnnnnnnnnnnnnnnnnnnnnnnnnnnnnnnnnnnnnnnnnnnnnnnnnnnnnnnnnnnnnnnnnnnnnnnnnnnnnnnnnnnnnnnnnnnnnnnnnnnnnnnnnnnnnnnnnnnnnnnnnnnnnnnnnnnnnnnnnnnnnnnnnnnnnnnnnnnnnnnnnnnnnnnnnnnnnnnnnnnnnnnnnnnnnnnnnnnnnnnnnnnnnnnnnnnnnnnnnnnnnnnnnnnnnnnnnnnnnnnnnnnnnnnnnnnnnnnnnnnnnnnnnnnnnnnnnnnnnnnnnnnnnnnnnnnnnnnnnnnnnnnnnnnnnnnnnnnnnnnnnnnnnnnnnnnnnnnnnnnnnnnnnnnnnnnnnnnnnnnnnnnnnnnnnnnnnnnnnnnnnnnnnnnnnnnnnnnnnnnnnnnnnnnnnnnnnnnnnnnnnnnnnnnnnnnnnnnnnnnnnnnnnnnnnnnnnnnnnnnnnnnnnnnnnnnnnnnnnnnnnnnnnnnnnnnnnnnnnnnnnnnnnnnnnnnnnnnnnnnnnnnnnnnnnnnnnnnnnnnnnnnnnnnnnnnnnnnnnnnnnnnnnnnnnnnnnnnnnnnnnnnnnnnnnnnnnnnnnnnnnnnnnnnnnnnnnnnnnnnnnnnnnnnnnnnnnnnnnnnnnnnnnnnnnnnnnnnnnnnnnnnnnnnnnnnnnnnnnnnnnnnnnnnnnnnnnnnnnnnnnnnnnnnnnnnnnnnnnnnnnnnnnnnnnnnnnnnnnnnnnnnnnnnnnnnnnnnnnnnnnnnnnnnnnnnnnnnnnnnnnnnnnnnnnnnnnnnnnnnnnnnnnnnnnnnnnnnnnnnnnnnnnnnnnnnnnnnnnnnnnnnnnnnnnnnnnnnnnnnnnnnnnnnnnnnnnnnnnnnnnnnnnnnnnnnnnnnnnnnnnnnnnnnnnnnnnnnnnnnnnnnnnnnnnnnnnnnnnnnnnnnnnnnnnnnnnnnnnnnnnnnnnnnnnnnnnnnnnnnnnnnnnnnnnnnnnnnnnnnnnnnnnnnnnnnnnnnnnnnnnnnnnnnnnnnnnnnnnnnnnnnnnnnnnnnnnnnnnnnnnnnnnnnnnnnnnnnnnnnnnnnnnnnnnnnnnnnnnnnnnnnnnnnnnnnnnnnnnnnnnnnnnnnnnnnnnnnnnnnnnnnnnnnnnnnnnnnnnnnnnnnnnnnnnnnnnnnnnnnnnnnnnnnnnnnnnnnnnnnnnnnnnnnnnnnnnnnnnnnnnnnnnnnnnnnnnnnnnnnnnnnnnnnnnnnnnnnnnnnnnnnnnnnnnnnnnnnnnnnnnnnnnnnnnnnnnnnnnnnnnnnnnnnnnnnnnnnnnnnnnnnnnnnnnnnnnnnnnnnnnnnnnnnnnnnnnnnnnnnnnnnnnnnnnnnnnnnnnnnnnnnnnnnnnnnnnnnnnnnnnnnnnnnnnnnnnnnnnnnnnnnnnnnnnnnnnnnnnnnnnnnnnnnnnnnnnnnnnnnnnnnnnnnnnnnnnnnnnnnnnnnnnnnnnnnnnnnnnnnnnnnnnnnnnnnnnnnnnnnnnnnnnnnnnnnnnnnnnnnnnnnnnnnnnnnnnnnnnnnnnnnnnnnnnnnnnnnnnnnnnnnnnnnnnnnnnnnnnnnnnnnnnnnnnnnnnnnnnnnnnnnnnnnnnnnnnnnnnnnnnnnnnnnnnnnnnnnnnnnnnnnnnnnnnnnnnnnnnnnnnnnnnnnnnnnnnnnnnnnnnnnnnnnnnnnnnnnnnnnnnnnnnnnnnnnnnnnnnnnnnnnnnnnnnnnnnnnnnnnnnnnnnnnnnnnnnnnnnnnnnnnnnnnnnnnnnnnnnnnnnnnnnnnnnnnnnnnnnnnnnnnnnnnnnnnnnnnnnnnnnnnnnnnnnnnnnnnnnnnnnnnnnnnnnnnnnnnnnnnnnnnnnnnnnnnnnnnnnnnnnnnnnnnnnnnnnnnnnnnnnnnnnnnnnnnnnnnnnnnnnnnnnnnnnnnnnnnnnnnnnnnnnnnnnnnnnnnnnnnnnnnnnnnnnnnnnnnnnnnnnnnnnnnnnnnnnnnnnnnnnnnnnnnnnnnnnnnnnnnnnnnnnnnnnnnnnnnnnnnnnnnnnnnnnnnnnnnnnnnnnnnnnnnnnnnnnnnnnnnnnnnnnnnnnnnnnnnnnnnnnnnnnnnnnnnnnnnnnnnnnnnnnnnnnnnnnnnnnnnnnnnnnnnnnnnnnnnnnnnnnnnnnnnnnnnnnnnnnnnnnnnnnnnnnnnnnnnnnnnnnnnnnnnnnnnnnnnnnnnnnnnnnnnnnnnnnnnnnnnnnnnnnnnnnnnnnnnnnnnnnnnnnnnnnnnnnnnnnnnnnnnnnnnnnnnnnnnnnnnnnnnnnnnnnnnnnnnnnnnnnnnnnnnnnnnnnnnnnnnnnnnnnnnnnnnnnnnnnnnnnnnnnnnnnnnnnnnnnnnnnnnnnnnnnnnnnnnnnnnnnnnnnnnnnnnnnnnnnnnnnnnnnnnnnnnnnnnnnnnnnnnnnnnnnnnnnnnnnnnnnnnnnnnnnnnnnnnnnnnnnnnnnnnnnnnnnnnnnnnnnnnnnnnnnnnnnnnnnnnnnnnnnnnnnnnnnnnnnnnnnnnnnnnnnnnnnnnnnnnnnnnnnnnnnnnnnnnnnnnnnnnnnnnnnnnnnnnnnnnnnnnnnnnnnnnnnnnnnnnnnnnnnnnnnnnnnnnnnnnnnnnnnnnnnnnnnnnnnnnnnnnnnnnnnnnnnnnnnnnnnnnnnnnnnnnnnnnnnnnnnnnnnnnnnnnnnnnnnnnnnnnnnnnnnnnnnnnnnnnnnnnnnnnnnnnnnnnnnnnnnnnnnnnnnnnnnnnnnnnnnnnnnnnnnnnnnnnnnnnnnnnnnnnnnnnnnnnnnnnnnnnnnnnnnnnnnnnnnnnnnnnnnnnnnnnnnnnnnnnnnnnnnnnnnnnnnnnnnnnnnnnnnnnnnnnnnnnnnnnnnnnnnnnnnnnnnnnnnnnnnnnnnnnnnnnnnnnnnnnnnnnnnnnnnnnnnnnnnnnnnnnnnnnnnnnnnnnnnnnnnnnnnnnnnnnnnnnnnnnnnnnnnnnnnnnnnnnnnnnnnnnnnnnnnnnnnnnnnnnnnnnnnnnnnnnnnnnnnnnnnnnnnnnnnnnnnnnnnnnnnnnnnnnnnnnnnnnnnnnnnnnnnnnnnnnnnnnnnnnnnnnnnnnnnnnnnnnnnnnnnnnnnnnnnnnnnnnnnnnnnnnnnnnnnnnnnnnnnnnnnnnnnnnnnnnnnnnnnnnnnnnnnnnnnnnnnnnnnnnnnnnnnnnnnnnnnnnnnnnnnnnnnnnnnnnnnnnnnnnnnnnnnnnnnnnnnnnnnnnnnnnnnnnnnnnnnnnnnnnnnnnnnnnnnnnnnnnnnnnnnnnnnnnnnnnnnnnnnnnnnnnnnnnnnnnnnnnnnnnnnnnnnnnnnnnnnnnnnnnnnnnnnnnnnnnnnnnnnnnnnnnnnnnnnnnnnnnnnnnnnnnnnnnnnnnnnnnnnnnnnnnnnnnnnnnnnnnnnnnnnnnnnnnnnnnnnnnnnnnnnnnnnnnnnnnnnnnnnnnnnnnnnnnnnnnnnnnnnnnnnnnnnnnnnnnnnnnnnnnnnnnnnnnnnnnnnnnnnnnnnnnnnnnnnnnnnnnnnnnnnnnnnnnnnnnnnnnnnnnnnnnnnnnnnnnnnnnnnnnnnnnnnnnnnnnnnnnnnnnnnnnnnnnnnnnnnnnnnnnnnnnnnnnnnnnnnnnnnnnnnnnnnnnnnnnnnnnnnnnnnnnnnnnnnnnnnnnnnnnnnnnnnnnnnnnnnnnnnnnnnnnnnnnnnnnnnnnnnnnnnnnnnnnnnnnnnnnnnnnnnnnnnnnnnnnnnnnnnnnnnnnnnnnnnnnnnnnnnnnnnnnnnnnnnnnnnnnnnnnnnnnnnnnnnnnnnnnnnnnnnnnnnnnnnnnnnnnnnnnnnnnnnnnnnnnnnnnnnnnnnnnnnnnnnnnnnnnnnnnnnnnnnnnnnnnnnnnnnnnnnnnnnnnnnnnnnnnnnnnnnnnnnnnnnnnnnnnnnnnnnnnnnnnnnnnnnnnnnnnnnnnnnnnnnnnnnnnnnnnnnnnnnnnnnnnnnnnnnnnnnnnnnnnnnnnnnnnnnnnnnnnnnnnnnnnnnnnnnnnnnnnnnnnnnnnnnnnnnnnnnnnnnnnnnnnnnnnnnnnnnnnnnnnnnnnnnnnnnnnnnnnnnnnnnnnnnnnnnnnnnnnnnnnnnnnnnnnnnnnnnnnnnnnnnnnnnnnnnnnnnnnnnnnnnnnnnnnnnnnnnnnnnnnnnnnnnnnnnnnnnnnnnnnnnnnnnnnnnnnnnnnnnnnnnnnnnnnnnnnnnnnnnnnnnnnnnnnnnnnnnnnnnnnnnnnnnnnnnnnnnnnnnnnnnnnnnnnnnnnnnnnnnnnnnnnnnnnnnnnnnnnnnnnnnnnnnnnnnnnnnnnnnnnnnnnnnnnnnnnnnnnnnnnnnnnnnnnnnnnnnnnnnnnnnnnnnnnnnnnnnnnnnnnnnnnnnnnnnnnnnnnnnnnnnnnnnnnnnnnnnnnnnnnnnnnnnnnnnnnnnnnnnnnnnnnnnnnnnnnnnnnnnnnnnnnnnnnnnnnnnnnnnnnnnnnnnnnnnnnnnnnnnnnnnnnnnnnnnnnnnnnnnnnnnnnnnnnnnnnnnnnnnnnnnnnnnnnnnnnnnnnnnnnnnnnnnnnnnnnnnnnnnnnnnnnnnnnnnnnnnnnnnnnnnnnnnnnnnnnnnnnnnnnnnnnnnnnnnnnnnnnnnnnnnnnnnnnnnnnnnnnnnnnnnnnnnnnnnnnnnnnnnnnnnnnnnnnnnnnnnnnnnnnnnnnnnnnnnnnnnnnnnnnnnnnnnnnnnnnnnnnnnnnnnnnnnnnnnnnnnnnnnnnnnnnnnnnnnnnnnnnnnnnnnnnnnnnnnnnnnnnnnnnnnnnnnnnnnnnnnnnnnnnnnnnnnnnnnnnnnnnnnnnnnnnnnnnnnnnnnnnnnnnnnnnnnnnnnnnnnnnnnnnnnnnnnnnnnnnnnnnnnnnnnnnnnnnnnnnnnnnnnnnnnnnnnnnnnnnnnnnnnnnnnnnnnnnnnnnnnnnnnnnnnnnnnnnnnnnnnnnnnnnnnnnnnnnnnnnnnnnnnnnnnnnnnnnnnnnnnnnnnnnnnnnnnnnnnnnnnnnnnnnnnnnnnnnnnnnnnnnnnnnnnnnnnnnnnnnnnnnnnnnnnnnnnnnnnnnnnnnnnnnnnnnnnnnnnnnnnnnnnnnnnnnnnnnnnnnnnnnnnnnnnnnnnnnnnnnnnnnnnnnnnnnnnnnnnnnnnnnnnnnnnnnnnnnnnnnnnnnnnnnnnnnnnnnnnnnnnnnnnnnnnnnnnnnnnnnnnnnnnnnnnnnnnnnnnnnnnnnnnnnnnnnnnnnnnnnnnnnnnnnnnnnnnnnnnnnnnnnnnnnnnnnnnnnnnnnnnnnnnnnnnnnnnnnnnnnnnnnnnnnnnnnnnnnnnnnnnnnnnnnnnnnnnnnnnnnnnnnnnnnnnnnnnnnnnnnnnnnnnnnnnnnnnnnnnnnnnnnnnnnnnnnnnnnnnnnnnnnnnnnnnnnnnnnnnnnnnnnnnnnnnnnnnnnnnnnnnnnnnnnnnnnnnnnnnnnnnnnnnnnnnnnnnnnnnnnnnnnnnnnnnnnnnnnnnnnnnnnnnnnnnnnnnnnnnnnnnnnnnnnnnnnnnnnnnnnnnnnnnnnnnnnnnnnnnnnnnnnnnnnnnnnnnnnnnnnnnnnnnnnnnnnnnnnnnnnnnnnnnnnnnnnnnnnnnnnnnnnnnnnnnnnnnnnnnnnnnnnnnnnnnnnnnnnnnnnnnnnnnnnnnnnnnnnnnnnnnnnnnnnnnnnnnnnnnnnnnnnnnnnnnnnnnnnnnnnnnnnnnnnnnnnnnnnnnnnnnnnnnnnnnnnnnnnnnnnnnnnnnnnnnnnnnnnnnnnnnnnnnnnnnnnnnnnnnnnnnnnnnnnnnnnnnnnnnnnnnnnnnnnnnnnnnnnnnnnnnnnnnnnnnnnnnnnnnnnnnnnnnnnnnnnnnnnnnnnnnnnnnnnnnnnnnnnnnnnnnnnnnnnnnnnnnnnnnnnnnnnnnnnnnnnnnnnnnnnnnnnnnnnnnnnnnnnnnnnnnnnnnnnnnnnnnnnnnnnnnnnnnnnnnnnnnnnnnnnnnnnnnnnnnnnnnnnnnnnnnnnnnnnnnnnnnnnnnnnnnnnnnnnnnnnnnnnnnnnnnnnnnnnnnnnnnnnnnnnnnnnnnnnnnnnnnnnnnnnnnnnnnnnnnnnnnnnnnnnnnnnnnnnnnnnnnnnnnnnnnnnnnnnnnnnnnnnnnnnnnnnnnnnnnnnnnnnnnnnnnnnnnnnnnnnnnnnnnnnnnnnnnnnnnnnnnnnnnnnnnnnnnnnnnnnnnnnnnnnnnnnnnnnnnnnnnnnnnnnnnnnnnnnnnnnnnnnnnnnnnnnnnnnnnnnnnnnnnnnnnnnnnnnnnnnnnnnnnnnnnnnnnnnnnnnnnnnnnnnnnnnnnnnnnnnnnnnnnnnnnnnnnnnnnnnnnnnnnnnnnnnnnnnnnnnnnnnnnnnnnnnnnnnnnnnnnnnnnnnnnnnnnnnnnnnnnnnnnnnnnnnnnnnnnnnnnnnnnnnnnnnnnnnnnnnnnnnnnnnnnnnnnnnnnnnnnnnnnnnnnnnnnnnnnnnnnnnnnnnnnnnnnnnnnnnnnnnnnnnnnnnnnnnnnnnnnnnnnnnnnnnnnnnnnnnnnnnnnnnnnnnnnnnnnnnnnnnnnnnnnnnnnnnnnnnnnnnnnnnnnnnnnnnnnnnnnnnnnnnnnnnnnnnnnnnnnnnnnnnnnnnnnnnnnnnnnnnnnnnnnnnnnnnnnnnnnnnnnnnnnnnnnnnnnnnnnnnnnnnnnnnnnnnnnnnnnnnnnnnnnnnnnnnnnnnnnnnnnnnnnnnnnnnnnnnnnnnnnnnnnnnnnnnnnnnnnnnnnnnnnnnnnnnnnnnnnnnnnnnnnnnnnnnnnnnnnnnnnnnnnnnnnnnnnnnnnnnnnnnnnnnnnnnnnnnnnnnnnnnnnnnnnnnnnnnnnnnnnnnnnnnnnnnnnnnnnnnnnnnnnnnnnnnnnnnnnnnnnnnnnnnnnnnnnnnnnnnnnnnnnnnnnnnnnnnnnnnnnnnnnnnnnnnnnnnnnnnnnnnnnnnnnnnnnnnnnnnnnnnnnnnnnnnnnnnnnnnnnnnnnnnnnnnnnnnnnnnnnnnnnnnnnnnnnnnnnnnnnnnnnnnnnnnnnnnnnnnnnnnnnnnnnnnnnnnnnnnnnnnnnnnnnnnnnnnnnnnnnnnnnnnnnnnnnnnnnnnnnnnnnnnnnnnnnnnnnnnnnnnnnnnnnnnnnnnnnnnnnnnnnnnnnnnnnnnnnnnnnnnnnnnnnnnnnnnnnnnnnnnnnnnnnnnnnnnnnnnnnnnnnnnnnnnnnnnnnnnnnnnnnnnnnnnnnnnnnnnnnnnnnnnnnnnnnnnnnnnnnnnnnnnnnnnnnnnnnnnnnnnnnnnnnnnnnnnnnnnnnnnnnnnnnnnnnnnnnnnnnnnnnnnnnnnnnnnnnnnnnnnnnnnnnnnnnnnnnnnnnnnnnnnnnnnnnnnnnnnnnnnnnnnnnnnnnnnnnnnnnnnnnnnnnnnnnnnnnnnnnnnnnnnnnnnnnnnnnnnnnnnnnnnnnnnnnnnnnnnnnnnnnnnnnnnnnnnnnnnnnnnnnnnnnnnnnnnnnnnnnnnnnnnnnnnnnnnnnnnnnnnnnnnnnnnnnnnnnnnnnnnnnnnnnnnnnnnnnnnnnnnnnnnnnnnnnnnnnnnnnnnnnnnnnnnnnnnnnnnnnnnnnnnnnnnnnnnnnnnnnnnnnnnnnnnnnnnnnnnnnnnnnnnnnnnnnnnnnnnnnnnnnnnnnnnnnnnnnnnnnnnnnnnnnnnnnnnnnnnnnnnnnnnnnnnnnnnnnnnnnnnnnnnnnnnnnnnnnnnnnnnnnnnnnnnnnnnnnnnnnnnnnnnnnnnnnnnnnnnnnnnnnnnnnnnnnnnnnnnnnnnnnnnnnnnnnnnnnnnnnnnnnnnnnnnnnnnnnnnnnnnnnnnnnnnnnnnnnnnnnnnnnnnnnnnnnnnnnnnnnnnnnnnnnnnnnnnnnnnnnnnnnnnnnnnnnnnnnnnnnnnnnnnnnnnnnnnnnnnnnnnnnnnnnnnnnnnnnnnnnnnnnnnnnnnnnnnnnnnnnnnnnnnnnnnnnnnnnnnnnnnnnnnnnnnnnnnnnnnnnnnnnnnnnnnnnnnnnnnnnnnnnnnnnnnnnnnnnnnnnnnnnnnnnnnnnnnnnnnnnnnnnnnnnnnnnnnnnnnnnnnnnnnnnnnnnnnnnnnnnnnnnnnnnnnnnnnnnnnnnnnnnnnnnnnnnnnnnnnnnnnnnnnnnnnnnnnnnnnnnnnnnnnnnnnnnnnnnnnnnnnnnnnnnnnnnnnnnnnnnnnnnnnnnnnnnnnnnnnnnnnnnnnnnnnnnnnnnnnnnnnnnnnnnnnnnnnnnnnnnnnnnnnnnnnnnnnnnnnnnnnnnnnnnnnnnnnnnnnnnnnnnnnnnnnnnnnnnnnnnnnnnnnnnnnnnnnnnnnnnnnnnnnnnnnnnnnnnnnnnnnnnnnnnnnnnnnnnnnnnnnnnnnnnnnnnnnnnnnnnnnnnnnnnnnnnnnnnnnnnnnnnnnnnnnnnnnnnnnnnnnnnnnnnnnnnnnnnnnnnnnnnnnnnnnnnnnnnnnnnnnnnnnnnnnnnnnnnnnnnnnnnnnnnnnnnnnnnnnnnnnnnnnnnnnnnnnnnnnnnnnnnnnnnnnnnnnnnnnnnnnnnnnnnnnnnnnnnnnnnnnnnnnnnnnnnnnnnnnnnnnnnnnnnnnnnnnnnnnnnnnnnnnnnnnnnnnnnnnnnnnnnnnnnnnnnnnnnnnnnnnnnnnnnnnnnnnnnnnnnnnnnnnnnnnnnnnnnnnnnnnnnnnnnnnnnnnnnnnnnnnnnnnnnnnnnnnnnnnnnnnnnnnnnnnnnnnnnnnnnnnnnnnnnnnnnnnnnnnnnnnnnnnnnnnnnnnnnnnnnnnnnnnnnnnnnnnnnnnnnnnnnnnnnnnnnnnnnnnnnnnnnnnnnnnnnnnnnnnnnnnnnnnnnnnnnnnnnnnnnnnnnnnnnnnnnnnnnnnnnnnnnnnnnnnnnnnnnnnnnnnnnnnnnnnnnnnnnnnnnnnnnnnnnnnnnnnnnnnnnnnnnnnnnnnnnnnnnnnnnnnnnnnnnnnnnnnnnnnnnnnnnnnnnnnnnnnnnnnnnnnnnnnnnnnnnnnnnnnnnnnnnnnnnnnnnnnnnnnnnnnnnnnnnnnnnnnnnnnnnnnnnnnnnnnnnnnnnnnnnnnnnnnnnnnnnnnnnnnnnnnnnnnnnnnnnnnnnnnnnnnnnnnnnnnnnnnnnnnnnnnnnnnnnnnnnnnnnnnnnnnnnnnnnnnnnnnnnnnnnnnnnnnnnnnnnnnnnnnnnnnnnnnnnnnnnnnnnnnnnnnnnnnnnnnnnnnnnnnnnnnnnnnnnnnnnnnnnnnnnnnnnnnnnnnnnnnnnnnnnnnnnnnnnnnnnnnnnnnnnnnnnnnnnnnnnnnnnnnnnnnnnnnnnnnnnnnnnnnnnnnnnnnnnnnnnnnnnnnnnnnnnnnnnnnnnnnnnnnnnnnnnnnnnnnnnnnnnnnnnnnnnnnnnnnnnnnnnnnnnnnnnnnnnnnnnnnnnnnnnnnnnnnnnnnnnnnnnnnnnnnnnnnnnnnnnnnnnnnnnnnnnnnnnnnnnnnnnnnnnnnnnnnnnnnnnnnnnnnnnnnnnnnnnnnnnnnnnnnnnnnnnnnnnnnnnnnnnnnnnnnnnnnnnnnnnnnnnnnnnnnnnnnnnnnnnnnnnnnnnnnnnnnnnnnnnnnnnnnnnnnnnnnnnnnnnnnnnnnnnnnnnnnnnnnnnnnnnnnnnnnnnnnnnnnnnnnnnnnnnnnnnnnnnnnnnnnnnnnnnnnnnnnnnnnnnnnnnnnnnnnnnnnnnnnnnnnnnnnnnnnnnnnnnnnnnnnnnnnnnnnnnnnnnnnnnnnnnnnnnnnnnnnnnnnnnnnnnnnnnnnnnnnnnnnnnnnnnnnnnnnnnnnnnnnnnnnnnnnnnnnnnnnnnnnnnnnnnnnnnnnnnnnnnnnnnnnnnnnnnnnnnnnnnnnnnnnnnnnnnnnnnnnnnnnnnnnnnnnnnnnnnnnnnnnnnnnnnnnnnnnnnnnnnnnnnnnnnnnnnnnnnnnnnnnnnnnnnnnnnnnnnnnnnnnnnnnnnnnnnnnnnnnnnnnnnnnnnnnnnnnnnnnnnnnnnnnnnnnnnnnnnnnnnnnnnnnnnnnnnnnnnnnnnnnnnnnnnnnnnnnnnnnnnnnnnnnnnnnnnnnnnnnnnnnnnnnnnnnnnnnnnnnnnnnnnnnnnnnnnnnnnnnnnnnnnnnnnnnnnnnnnnnnnnnnnnnnnnnnnnnnnnnnnnnnnnnnnnnnnnnnnnnnnnnnnnnnnnnnnnnnnnnnnnnnnnnnnnnnnnnnnnnnnnnnnnnnnnnnnnnnnnnnnnnnnnnnnnnnnnnnnnnnnnnnnnnnnnnnnnnnnnnnnnnnnnnnnnnnnnnnnnnnnnnnnnnnnnnnnnnnnnnnnnnnnnnnnnnnnnnnnnnnnnnnnnnnnnnnnnnnnnnnnnnnnnnnnnnnnnnnnnnnnnnnnnnnnnnnnnnnnnnnnnnnnnnnnnnnnnnnnnnnnnnnnnnnnnnnnnnnnnnnnnnnnnnnnnnnnnnnnnnnnnnnnnnnnnnnnnnnnnnnnnnnnnnnnnnnnnnnnnnnnnnnnnnnnnnnnnnnnnnnnnnnnnnnnnnnnnnnnnnnnnnnnnnnnnnnnnnnnnnnnnnnnnnnnnnnnnnnnnnnnnnnnnnnnnnnnnnnnnnnnnnnnnnnnnnnnnnnnnnnnnnnnnnnnnnnnnnnnnnnnnnnnnnnnnnnnnnnnnnnnnnnnnnnnnnnnnnnnnnnnnnnnnnnnnnnnnnnnnnnnnnnnnnnnnnnnnnnnnnnnnnnnnnnnnnnnnnnnnnnnnnnnnnnnnnnnnnnnnnnnnnnnnnnnnnnnnnnnnnnnnnnnnnnnnnnnnnnnnnnnnnnnnnnnnnnnnnnnnnnnnnnnnnnnnnnnnnnnnnnnnnnnnnnnnnnnnnnnnnnnnnnnnnnnnnnnnnnnnnnnnnnnnnnnnnnnnnnnnnnnnnnnnnnnnnnnnnnnnnnnnnnnnnnnnnnnnnnnnnnnnnnnnnnnnnnnnnnnnnnnnnnnnnnnnnnnnnnnnnnnnnnnnnnnnnnnnnnnnnnnnnnnnnnnnnnnnnnnnnnnnnnnnnnnnnnnnnnnnnnnnnnnnnnnnnnnnnnnnnnnnnnnnnnnnnnnnnnnnnnnnnnnnnnnnnnnnnnnnnnnnnnnnnnnnnnnnnnnnnnnnnnnnnnnnnnnnnnnnnnnnnnnnnnnnnnnnnnnnnnnnnnnnnnnnnnnnnnnnnnnnnnnnnnnnnnnnnnnnnnnnnnnnnnnnnnnnnnnnnnnnnnnnnnnnnnnnnnnnnnnnnnnnnnnnnnnnnnnnnnnnnnnnnnnnnnnnnnnnnnnnnnnnnnnnnnnnnnnnnnnnnnnnnnnnnnnnnnnnnnnnnnnnnnnnnnnnnnnnnnnnnnnnnnnnnnnnnnnnnnnnnnnnnnnnnnnnnnnnnnnnnnnnnnnnnnnnnnnnnnnnnnnnnnnnnnnnnnnnnnnnnnnnnnnnnnnnnnnnnnnnnnnnnnnnnnnnnnnnnnnnnnnnnnnnnnnnnnnnnnnnnnnnnnnnnnnnnnnnnnnnnnnnnnnnnnnnnnnnnnnnnnnnnnnnnnnnnnnnnnnnnnnnnnnnnnnnnnnnnnnnnnnnnnnnnnnnnnnnnnnnnnnnnnnnnnnnnnnnnnnnnnnnnnnnnnnnnnnnnnnnnnnnnnnnnnnnnnnnnnnnnnnnnnnnnnnnnnnnnnnnnnnnnnnnnnnnnnnnnnnnnnnnnnnnnnnnnnnnnnnnnnnnnnnnnnnnnnnnnnnnnnnnnnnnnnnnnnnnnnnnnnnnnnnnnnnnnnnnnnnnnnnnnnnnnnnnnnnnnnnnnnnnnnnnnnnnnnnnnnnnnnnnnnnnnnnnnnnnnnnnnnnnnnnnnnnnnnnnnnnnnnnnnnnnnnnnnnnnnnnnnnnnnnnnnnnnnnnnnnnnnnnnnnnnnnnnnnnnnnnnnnnnnnnnnnnnnnnnnnnnnnnnnnnnnnnnnnnnnnnnnnnnnnnnnnnnnnnnnnnnnnnnnnnnnnnnnnnnnnnnnnnnnnnnnnnnnnnnnnnnnnnnnnnnnnnnnnnnnnnnnnnnnnnnnnnnnnnnnnnnnnnnnnnnnnnnnnnnnnnnnnnnnnnnnnnnnnnnnnnnnnnnnnnnnnnnnnnnnnnnnnnnnnnnnnnnnnnnnnnnnnnnnnnnnnnnnnnnnnnnnnnnnnnnnnnnnnnnnnnnnnnnnnnnnnnnnnnnnnnnnnnnnnnnnnnnnnnnnnnnnnnnnnnnnnnnnnnnnnnnnnnnnnnnnnnnnnnnnnnnnnnnnnnnnnnnnnnnnnnnnnnnnnnnnnnnnnnnnnnnnnnnnnnnnnnnnnnnnnnnnnnnnnnnnnnnnnnnnnnnnnnnnnnnnnnnnnnnnnnnnnnnnnnnnnnnnnnnnnnnnnnnnnnnnnnnnnnnnnnnnnnnnnnnnnnnnnnnnnnnnnnnnnnnnnnnnnnnnnnnnnnnnnnnnnnnnnnnnnnnnnnnnnnnnnnnnnnnnnnnnnnnnnnnnnnnnnnnnnnnnnnnnnnnnnnnnnnnnnnnnnnnnnnnnnnnnnnnnnnnnnnnnnnnnnnnnnnnnnnnnnnnnnnnnnnnnnnnnnnnnnnnnnnnnnnnnnnnnnnnnnnnnnnnnnnnnnnnnnnnnnnnnnnnnnnnnnnnnnnnnnnnnnnnnnnnnnnnnnnnnnnnnnnnnnnnnnnnnnnnnnnnnnnnnnnnnnnnnnnnnnnnnnnnnnnnnnnnnnnnnnnnnnnnnnnnnnnnnnnnnnnnnnnnnnnnnnnnnnnnnnnnnnnnnnnnnnnnnnnnnnnnnnnnnnnnnnnnnnnnnnnnnnnnnnnnnnnnnnnnnnnnnnnnnnnnnnnnnnnnnnnnnnnnnnnnnnnnnnnnnnnnnnnnnnnnnnnnnnnnnnnnnnnnnnnnnnnnnnnnnnnnnnnnnnnnnnnnnnnnnnnnnnnnnnnnnnnnnnnnnnnnnnnnnnnnnnnnnnnnnnnnnnnnnnnnnnnnnnnnnnnnnnnnnnnnnnnnnnnnnnnnnnnnnnnnnnnnnnnnnnnnnnnnnnnnnnnnnnnnnnnnnnnnnnnnnnnnnnnnnnnnnnnnnnnnnnnnnnnnnnnnnnnnnnnnnnnnnnnnnnnnnnnnnnnnnnnnnnnnnnnnnnnnnnnnnnnnnnnnnnnnnnnnnnnnnnnnnnnnnnnnnnnnnnnnnnnnnnnnnnnnnnnnnnnnnnnnnnnnnnnnnnnnnnnnnnnnnnnnnnnnnnnnnnnnnnnnnnnnnnnnnnnnnnnnnnnnnnnnnnnnnnnnnnnnnnnnnnnnnnnnnnnnnnnnnnnnnnnnnnnnnnnnnnnnnnnnnnnnnnnnnnnnnnnnnnnnnnnnnnnnnnnnnnnnnnnnnnnnnnnnnnnnnnnnnnnnnnnnnnnnnnnnnnnnnnnnnnnnnnnnnnnnnnnnnnnnnnnnnnnnnnnnnnnnnnnnnnnnnnnnnnnnnnnnnnnnnnnnnnnnnnnnnnnnnnnnnnnnnnnnnnnnnnnnnnnnnnnnnnnnnnnnnnnnnnnnnnnnnnnnnnnnnnnnnnnnnnnnnnnnnnnnnnnnnnnnnnnnnnnnnnnnnnnnnnnnnnnnnnnnnnnnnnnnnnnnnnnnnnnnnnnnnnnnnnnnnnnnnnnnnnnnnnnnnnnnnnnnnnnnnnnnnnnnnnnnnnnnnnnnnnnnnnnnnnnnnnnnnnnnnnnnnnnnnnnnnnnnnnnnnnnnnnnnnnnnnnnnnnnnnnnnnnnnnnnnnnnnnnnnnnnnnnnnnnnnnnnnnnnnnnnnnnnnnnnnnnnnnnnnnnnnnnnnnnnnnnnnnnnnnnnnnnnnnnnnnnnnnnnnnnnnnnnnnnnnnnnnnnnnnnnnnnnnnnnnnnnnnnnnnnnnnnnnnnnnnnnnnnnnnnnnnnnnnnnnnnnnnnnnnnnnnnnnnnnnnnnnnnnnnnnnnnnnnnnnnnnnnnnnnnnnnnnnnnnnnnnnnnnnnnnnnnnnnnnnnnnnnnnnnnnnnnnnnnnnnnnnnnnnnnnnnnnnnnnnnnnnnnnnnnnnnnnnnnnnnnnnnnnnnnnnnnnnnnnnnnnnnnnnnnnnnnnnnnnnnnnnnnnnnnnnnnnnnnnnnnnnnnnnnnnnnnnnnnnnnnnnnnnnnnnnnnnnnnnnnnnnnnnnnnnnnnnnnnnnnnnnnnnnnnnnnnnnnnnnnnnnnnnnnnnnnnnnnnnnnnnnnnnnnnnnnnnnnnnnnnnnnnnnnnnnnnnnnnnnnnnnnnnnnnnnnnnnnnnnnnnnnnnnnnnnnnnnnnnnnnnnnnnnnnnnnnnnnnnnnnnnnnnnnnnnnnnnnnnnnnnnnnnnnnnnnnnnnnnnnnnnnnnnnnnnnnnnnnnnnnnnnnnnnnnnnnnnnnnnnnnnnnnnnnnnnnnnnnnnnnnnnnnnnnnnnnnnnnnnnnnnnnnnnnnnnnnnnnnnnnnnnnnnnnnnnnnnnnnnnnnnnnnnnnnnnnnnnnnnnnnnnnnnnnnnnnnnnnnnnnnnnnnnnnnnnnnnnnnnnnnnnnnnnnnnnnnnnnnnnnnnnnnnnnnnnnnnnnnnnnnnnnnnnnnnnnnnnnnnnnnnnnnnnnnnnnnnnnnnnnnnnnnnnnnnnnnnnnnnnnnnnnnnnnnnnnnnnnnnnnnnnnnnnnnnnnnnnnnnnnnnnnnnnnnnnnnnnnnnnnnnnnnnnnnnnnnnnnnnnnnnnnnnnnnnnnnnnnnnnnnnnnnnnnnnnnnnnnnnnnnnnnnnnnnnnnnnnnnnnnnnnnnnnnnnnnnnnnnnnnnnnnnnnnnnnnnnnnnnnnnnnnnnnnnnnnnnnnnnnnnnnnnnnnnnnnnnnnnnnnnnnnnnnnnnnnnnnnnnnnnnnnnnnnnnnnnnnnnnnnnnnnnnnnnnnnnnnnnnnnnnnnnnnnnnnnnnnnnnnnnnnnnnnnnnnnnnnnnnnnnnnnnnnnnnnnnnnnnnnnnnnnnnnnnnnnnnnnnnnnnnnnnnnnnnnnnnnnnnnnnnnnnnnnnnnnnnnnnnnnnnnnnnnnnnnnnnnnnnnnnnnnnnnnnnnnnnnnnnnnnnnnnnnnnnnnnnnnnnnnnnnnnnnnnnnnnnnnnnnnnnnnnnnnnnnnnnnnnnnnnnnnnnnnnnnnnnnnnnnnnnnnnnnnnnnnnnnnnnnnnnnnnnnnnnnnnnnnnnnnnnnnnnnnnnnnnnnnnnnnnnnnnnnnnnnnnnnnnnnnnnnnnnnnnnnnnnnnnnnnnnnnnnnnnnnnnnnnnnnnnnnnnnnnnnnnnnnnnnnnnnnnnnnnnnnnnnnnnnnnnnnnnnnnnnnnnnnnnnnnnnnnnnnnnnnnnnnnnnnnnnnnnnnnnnnnnnnnnnnnnnnnnnnnnnnnnnnnnnnnnnnnnnnnnnnnnnnnnnnnnnnnnnnnnnnnnnnnnnnnnnnnnnnnnnnnnnnnnnnnnnnnnnnnnnnnnnnnnnnnnnnnnnnnnnnnnnnnnnnnnnnnnnnnnnnnnnnnnnnnnnnnnnnnnnnnnnnnnnnnnnnnnnnnnnnnnnnnnnnnnnnnnnnnnnnnnnnnnnnnnnnnnnnnnnnnnnnnnnnnnnnnnnnnnnnnnnnnnnnnnnnnnnnnnnnnnnnnnnnnnnnnnnnnnnnnnnnnnnnnnnnnnnnnnnnnnnnnnnnnnnnnnnnnnnnnnnnnnnnnnnnnnnnnnnnnnnnnnnnnnnnnnnnnnnnnnnnnnnnnnnnnnnnnnnnnnnnnnnnnnnnnnnnnnnnnnnnnnnnnnnnnnnnnnnnnnnnnnnnnnnnnnnnnnnnnnnnnnnnnnnnnnnnnnnnnnnnnnnnnnnnnnnnnnnnnnnnnnnnnnnnnnnnnnnnnnnnnnnnnnnnnnnnnnnnnnnnnnnnnnnnnnnnnnnnnnnnnnnnnnnnnnnnnnnnnnnnnnnnnnnnnnnnnnnnnnnnnnnnnnnnnnnnnnnnnnnnnnnnnnnnnnnnnnnnnnnnnnnnnnnnnnnnnnnnnnnnnnnnnnnnnnnnnnnnnnnnnnnnnnnnnnnnnnnnnnnnnnnnnnnnnnnnnnnnnnnnnnnnnnnnnnnnnnnnnnnnnnnnnnnnnnnnnnnnnnnnnnnnnnnnnnnnnnnnnnnnnnnnnnnnnnnnnnnnnnnnnnnnnnnnnnnnnnnnnnnnnnnnnnnnnnnnnnnnnnnnnnnnnnnnnnnnnnnnnnnnnnnnnnnnnnnnnnnnnnnnnnnnnnnnnnnnnnnnnnnnnnnnnnnnnnnnnnnnnnnnnnnnnnnnnnnnnnnnnnnnnnnnnnnnnnnnnnnnnnnnnnnnnnnnnnnnnnnnnnnnnnnnnnnnnnnnnnnnnnnnnnnnnnnnnnnnnnnnnnnnnnnnnnnnnnnnnnnnnnnnnnnnnnnnnnnnnnnnnnnnnnnnnnnnnnnnnnnnnnnnnnnnnnnnnnnnnnnnnnnnnnnnnnnnnnnnnnnnnnnnnnnnnnnnnnnnnnnnnnnnnnnnnnnnnnnnnnnnnnnnnnnnnnnnnnnnnnnnnnnnnnnnnnnnnnnnnnnnnnnnnnnnnnnnnnnnnnnnnnnnnnnnnnnnnnnnnnnnnnnnnnnnnnnnnnnnnnnnnnnnnnnnnnnnnnnnnnnnnnnnnnnnnnnnnnnnnnnnnnnnnnnnnnnnnnnnnnnnnnnnnnnnnnnnnnnnnnnnnnnnnnnnnnnnnnnnnnnnnnnnnnnnnnnnnnnnnnnnnnnnnnnnnnnnnnnnnnnnnnnnnnnnnnnnnnnnnnnnnnnnnnnnnnnnnnnnnnnnnnnnnnnnnnnnnnnnnnnnnnnnnnnnnnnnnnnnnnnnnnnnnnnnnnnnnnnnnnnnnnnnnnnnnnnnnnnnnnnnnnnnnnnnnnnnnnnnnnnnnnnnnnnnnnnnnnnnnnnnnnnnnnnnnnnnnnnnnnnnnnnnnnnnnnnnnnnnnnnnnnnnnnnnnnnnnnnnnnnnnnnnnnnnnnnnnnnnnnnnnnnnnnnnnnnnnnnnnnnnnnnnnnnnnnnnnnnnnnnnnnnnnnnnnnnnnnnnnnnnnnnnnnnnnnnnnnnnnnnnnnnnnnnnnnnnnnnnnnnnnnnnnnnnnnnnnnnnnnnnnnnnnnnnnnnnnnnnnnnnnnnnnnnnnnnnnnnnnnnnnnnnnnnnnnnnnnnnnnnnnnnnnnnnnnnnnnnnnnnnnnnnnnnnnnnnnnnnnnnnnnnnnnnnnnnnnnnnnnnnnnnnnnnnnnnnnnnnnnnnnnnnnnnnnnnnnnnnnnnnnnnnnnnnnnnnnnnnnnnnnnnnnnnnnnnnnnnnnnnnnnnnnnnnnnnnnnnnnnnnnnnnnnnnnnnnnnnnnnnnnnnnnnnnnnnnnnnnnnnnnnnnnnnnnnnnnnnnnnnnnnnnnnnnnnnnnnnnnnnnnnnnnnnnnnnnnnnnnnnnnnnnnnnnnnnnnnnnnnnnnnnnnnnnnnnnnnnnnnnnnnnnnnnnnnnnnnnnnnnnnnnnnnnnnnnnnnnnnnnnnnnnnnnnnnnnnnnnnnnnnnnnnnnnnnnnnnnnnnnnnnnnnnnnnnnnnnnnnnnnnnnnnnnnnnnnnnnnnnnnnnnnnnnnnnnnnnnnnnnnnnnnnnnnnnnnnnnnnnnnnnnnnnnnnnnnnnnnnnnnnnnnnnnnnnnnnnnnnnnnnnnnnnnnnnnnnnnnnnnnnnnnnnnnnnnnnnnnnnnnnnnnnnnnnnnnnnnnnnnnnnnnnnnnnnnnnnnnnnnnnnnnnnnnnnnnnnnnnnnnnnnnnnnnnnnnnnnnnnnnnnnnnnnnnnnnnnnnnnnnnnnnnnnnnnnnnnnnnnnnnnnnnnnnnnnnnnnnnnnnnnnnnnnnnnnnnnnnnnnnnnnnnnnnnnnnnnnnnnnnnnnnnnnnnnnnnnnnnnnnnnnnnnnnnnnnnnnnnnnnnnnnnnnnnnnnnnnnnnnnnnnnnnnnnnnnnnnnnnnnnnnnnnnnnnnnnnnnnnnnnnnnnnnnnnnnnnnnnnnnnnnnnnnnnnnnnnnnnnnnnnnnnnnnnnnnnnnnnnnnnnnnnnnnnnnnnnnnnnnnnnnnnnnnnnnnnnnnnnnnnnnnnnnnnnnnnnnnnnnnnnnnnnnnnnnnnnnnnnnnnnnnnnnnnnnnnnnnnnnnnnnnnnnnnnnnnnnnnnnnnnnnnnnnnnnnnnnnnnnnnnnnnnnnnnnnnnnnnnnnnnnnnnnnnnnnnnnnnnnnnnnnnnnnnnnnnnnnnnnnnnnnnnnnnnnnnnnnnnnnnnnnnnnnnnnnnnnnnnnnnnnnnnnnnnnnnnnnnnnnnnnnnnnnnnnnnnnnnnnnnnnnnnnnnnnnnnnnnnnnnnnnnnnnnnnnnnnnnnnnnnnnnnnnnnnnnnnnnnnnnnnnnnnnnnnnnnnnnnnnnnnnnnnnnnnnnnnnnnnnnnnnnnnnnnnnnnnnnnnnnnnnnnnnnnnnnnnnnnnnnnnnnnnnnnnnnnnnnnnnnnnnnnnnnnnnnnnnnnnnnnnnnnnnnnnnnnnnnnnnnnnnnnnnnnnnnnnnnnnnnnnnnnnnnnnnnnnnnnnnnnnnnnnnnnnnnnnnnnnnnnnnnnnnnnnnnnnnnnnnnnnnnnnnnnnnnnnnnnnnnnnnnnnnnnnnnnnnnnnnnnnnnnnnnnnnnnnnnnnnnnnnnnnnnnnnnnnnnnnnnnnnnnnnnnnnnnnnnnnnnnnnnnnnnnnnnnnnnnnnnnnnnnnnnnnnnnnnnnnnnnnnnnnnnnnnnnnnnnnnnnnnnnnnnnnnnnnnnnnnnnnnnnnnnnnnnnnnnnnnnnnnnnnnnnnnnnnnnnnnnnnnnnnnnnnnnnnnnnnnnnnnnnnnnnnnnnnnnnnnnnnnnnnnnnnnnnnnnnnnnnnnnnnnnnnnnnnnnnnnnnnnnnnnnnnnnnnnnnnnnnnnnnnnnnnnnnnnnnnnnnnnnnnnnnnnnnnnnnnnnnnnnnnnnnnnnnnnnnnnnnnnnnnnnnnnnnnnnnnnnnnnnnnnnnnnnnnnnnnnnnnnnnnnnnnnnnnnnnnnnnnnnnnnnnnnnnnnnnnnnnnnnnnnnnnnnnnnnnnnnnnnnnnnnnnnnnnnnnnnnnnnnnnnnnnnnnnnnnnnnnnnnnnnnnnnnnnnnnnnnnnnnnnnnnnnnnnnnnnnnnnnnnnnnnnnnnnnnnnnnnnnnnnnnnnnnnnnnnnnnnnnnnnnnnnnnnnnnnnnnnnnnnnnnnnnnnnnnnnnnnnnnnnnnnnnnnnnnnnnnnnnnnnnnnnnnnnnnnnnnnnnnnnnnnnnnnnnnnnnnnnnnnnnnnnnnnnnnnnnnnnnnnnnnnnnnnnnnnnnnnnnnnnnnnnnnnnnnnnnnnnnnnnnnnnnnnnnnnnnnnnnnnnnnnnnnnnnnnnnnnnnnnnnnnnnnnnnnnnnnnnnnnnnnnnnnnnnnnnnnnnnnnnnnnnnnnnnnnnnnnnnnnnnnnnnnnnnnnnnnnnnnnnnnnnnnnnnnnnnnnnnnnnnnnnnnnnnnnnnnnnnnnnnnnnnnnnnnnnnnnnnnnnnnnnnnnnnnnnnnnnnnnnnnnnnnnnnnnnnnnnnnnnnnnnnnnnnnnnnnnnnnnnnnnnnnnnnnnnnnnnnnnnnnnnnnnnnnnnnnnnnnnnnnnnnnnnnnnnnnnnnnnnnnnnnnnnnnnnnnnnnnnnnnnnnnnnnnnnnnnnnnnnnnnnnnnnnnnnnnnnnnnnnnnnnnnnnnnnnnnnnnnnnnnnnnnnnnnnnnnnnnnnnnnnnnnnnnnnnnnnnnnnnnnnnnnnnnnnnnnnnnnnnnnnnnnnnnnnnnnnnnnnnnnnnnnnnnnnnnnnnnnnnnnnnnnnnnnnnnnnnnnnnnnnnnnnnnnnnnnnnnnnnnnnnnnnnnnnnnnnnnnnnnnnnnnnnnnnnnnnnnnnnnnnnnnnnnnnnnnnnnnnnnnnnnnnnnnnnnnnnnnnnnnnnnnnnnnnnnnnnnnnnnnnnnnnnnnnnnnnnnnnnnnnnnnnnnnnnnnnnnnnnnnnnnnnnnnnnnnnnnnnnnnnnnnnnnnnnnnnnnnnnnnnnnnnnnnnnnnnnnnnnnnnnnnnnnnnnnnnnnnnnnnnnnnnnnnnnnnnnnnnnnnnnnnnnnnnnnnnnnnnnnnnnnnnnnnnnnnnnnnnnnnnnnnnnnnnnnnnnnnnnnnnnnnnnnnnnnnnnnnnnnnnnnnnnnnnnnnnnnnnnnnnnnnnnnnnnnnnnnnnnnnnnnnnnnnnnnnnnnnnnnnnnnnnnnnnnnnnnnnnnnnnnnnnnnnnnnnnnnnnnnnnnnnnnnnnnnnnnnnnnnnnnnnnnnnnnnnnnnnnnnnnnnnnnnnnnnnnnnnnnnnnnnnnnnnnnnnnnnnnnnnnnnnnnnnnnnnnnnnnnnnnnnnnnnnnnnnnnnnnnnnnnnnnnnnnnnnnnnnnnnnnnnnnnnnnnnnnnnnnnnnnnnnnnnnnnnnnnnnnnnnnnnnnnnnnnnnnnnnnnnnnnnnnnnnnnnnnnnnnnnnnnnnnnnnnnnnnnnnnnnnnnnnnnnnnnnnnnnnnnnnnnnnnnnnnnnnnnnnnnnnnnnnnnnnnnnnnnnnnnnnnnnnnnnnnnnnnnnnnnnnnnnnnnnnnnnnnnnnnnnnnnnnnnnnnnnnnnnnnnnnnnnnnnnnnnnnnnnnnnnnnnnnnnnnnnnnnnnnnnnnnnnnnnnnnnnnnnnnnnnnnnnnnnnnnnnnnnnnnnnnnnnnnnnnnnnnnnnnnnnnnnnnnnnnnnnnnnnnnnnnnnnnnnnnnnnnnnnnnnnnnnnnnnnnnnnnnnnnnnnnnnnnnnnnnnnnnnnnnnnnnnnnnnnnnnnnnnnnnnnnnnnnnnnnnnnnnnnnnnnnnnnnnnnnnnnnnnnnnnnnnnnnnnnnnnnnnnnnnnnnnnnnnnnnnnnnnnnnnnnnnnnnnnnnnnnnnnnnnnnnnnnnnnnnnnnnnnnnnnnnnnnnnnnnnnnnnnnnnnnnnnnnnnnnnnnnnnnnnnnnnnnnnnnnnnnnnnnnnnnnnnnnnnnnnnnnnnnnnnnnnnnnnnnnnnnnnnnnnnnnnnnnnnnnnnnnnnnnnnnnnnnnnnnnnnnnnnnnnnnnnnnnnnnnnnnnnnnnnnnnnnnnnnnnnnnnnnnnnnnnnnnnnnnnnnnnnnnnnnnnnnnnnnnnnnnnnnnnnnnnnnnnnnnnnnnnnnnnnnnnnnnnnnnnnnnnnnnnnnnnnnnnnnnnnnnnnnnnnnnnnnnnnnnnnnnnnnnnnnnnnnnnnnnnnnnnnnnnnnnnnnnnnnnnnnnnnnnnnnnnnnnnnnnnnnnnnnnnnnnnnnnnnnnnnnnnnnnnnnnnnnnnnnnnnnnnnnnnnnnnnnnnnnnnnnnnnnnnnnnnnnnnnnnnnnnnnnnnnnnnnnnnnnnnnnnnnnnnnnnnnnnnnnnnnnnnnnnnnnnnnnnnnnnnnnnnnnnnnnnnnnnnnnnnnnnnnnnnnnnnnnnnnnnnnnnnnnnnnnnnnnnnnnnnnnnnnnnnnnnnnnnnnnnnnnnnnnnnnnnnnnnnnnnnnnnnnnnnnnnnnnnnnnnnnnnnnnnnnnnnnnnnnnnnnnnnnnnnnnnnnnnnnnnnnnnnnnnnnnnnnnnnnnnnnnnnnnnnnnnnnnnnnnnnnnnnnnnnnnnnnnnnnnnnnnnnnnnnnnnnnnnnnnnnnnnnnnnnnnnnnnnnnnnnnnnnnnnnnnnnnnnnnnnnnnnnnnnnnnnnnnnnnnnnnnnnnnnnnnnnnnnnnnnnnnnnnnnnnnnnnnnnnnnnnnnnnnnnnnnnnnnnnnnnnnnnnnnnnnnnnnnnnnnnnnnnnnnnnnnnnnnnnnnnnnnnnnnnnnnnnnnnnnnnnnnnnnnnnnnnnnnnnnnnnnnnnnnnnnnnnnnnnnnnnnnnnnnnnnnnnnnnnnnnnnnnnnnnnnnnnnnnnnnnnnnnnnnnnnnnnnnnnnnnnnnnnnnnnnnnnnnnnnnnnnnnnnnnnnnnnnnnnnnnnnnnnnnnnnnnnnnnnnnnnnnnnnnnnnnnnnnnnnnnnnnnnnnnnnnnnnnnnnnnnnnnnnnnnnnnnnnnnnnnnnnnnnnnnnnnnnnnnnnnnnnnnnnnnnnnnnnnnnnnnnnnnnnnnnnnnnnnnnnnnnnnnnnnnnnnnnnnnnnnnnnnnnnnnnnnnnnnnnnnnnnnnnnnnnnnnnnnnnnnnnnnnnnnnnnnnnnnnnnnnnnnnnnnnnnnnnnnnnnnnnnnnnnnnnnnnnnnnnnnnnnnnnnnnnnnnnnnnnnnnnnnnnnnnnnnnnnnnnnnnnnnnnnnnnnnnnnnnnnnnnnnnnnnnnnnnnnnnnnnnnnnnnnnnnnnnnnnnnnnnnnnnnnnnnnnnnnnnnnnnnnnnnnnnnnnnnnnnnnnnnnnnnnnnnnnnnnnnnnnnnnnnnnnnnnnnnnnnnnnnnnnnnnnnnnnnnnnnnnnnnnnnnnnnnnnnnnnnnnnnnnnnnnnnnnnnnnnnnnnnnnnnnnnnnnnnnnnnnnnnnnnnnnnnnnnnnnnnnnnnnnnnnnnnnnnnnnnnnnnnnnnnnnnnnnnnnnnnnnnnnnnnnnnnnnnnnnnnnnnnnnnnnnnnnnnnnnnnnnnnnnnnnnnnnnnnnnnnnnnnnnnnnnnnnnnnnnnnnnnnnnnnnnnnnnnnnnnnnnnnnnnnnnnnnnnnnnnnnnnnnnnnnnnnnnnnnnnnnnnnnnnnnnnnnnnnnnnnnnnnnnnnnnnnnnnnnnnnnnnnnnnnnnnnnnnnnnnnnnnnnnnnnnnnnnnnnnnnnnnnnnnnnnnnnnnnnnnnnnnnnnnnnnnnnnnnnnnnnnnnnnnnnnnnnnnnnnnnnnnnnnnnnnnnnnnnnnnnnnnnnnnnnnnnnnnnnnnnnnnnnnnnnnnnnnnnnnnnnnnnnnnnnnnnnnnnnnnnnnnnnnnnnnnnnnnnnnnnnnnnnnnnnnnnnnnnnnnnnnnnnnnnnnnnnnnnnnnnnnnnnnnnnnnnnnnnnnnnnnnnnnnnnnnnnnnnnnnnnnnnnnnnnnnnnnnnnnnnnnnnnnnnnnnnnnnnnnnnnnnnnnnnnnnnnnnnnnnnnnnnnnnnnnnnnnnnnnnnnnnnnnnnnnnnnnnnnnnnnnnnnnnnnnnnnnnnnnnnnnnnnnnnnnnnnnnnnnnnnnnnnnnnnnnnnnnnnnnnnnnnnnnnnnnnnnnnnnnnnnnnnnnnnnnnnnnnnnnnnnnnnnnnnnnnnnnnnnnnnnnnnnnnnnnnnnnnnnnnnnnnnnnnnnnnnnnnnnnnnnnnnnnnnnnnnnnnnnnnnnnnnnnnnnnnnnnnnnnnnnnnnnnnnnnnnnnnnnnnnnnnnnnnnnnnnnnnnnnnnnnnnnnnnnnnnnnnnnnnnnnnnnnnnnnnnnnnnnnnnnnnnnnnnnnnnnnnnnnnnnnnnnnnnnnnnnnnnnnnnnnnnnnnnnnnnnnnnnnnnnnnnnnnnnnnnnnnnnnnnnnnnnnnnnnnnnnnnnnnnnnnnnnnnnnnnnnnnnnnnnnnnnnnnnnnnnnnnnnnnnnnnnnnnnnnnnnnnnnnnnnnnnnnnnnnnnnnnnnnnnnnnnnnnnnnnnnnnnnnnnnnnnnnnnnnnnnnnnnnnnnnnnnnnnnnnnnnnnnnnnnnnnnnnnnnnnnnnnnnnnnnnnnnnnnnnnnnnnnnnnnnnnnnnnnnnnnnnnnnnnnnnnnnnnnnnnnnnnnnnnnnnnnnnnnnnnnnnnnnnnnnnnnnnnnnnnnnnnnnnnnnnnnnnnnnnnnnnnnnnnnnnnnnnnnnnnnnnnnnnnnnnnnnnnnnnnnnnnnnnnnnnnnnnnnnnnnnnnnnnnnnnnnnnnnnnnnnnnnnnnnnnnnnnnnnnnnnnnnnnnnnnnnnnnnnnnnnnnnnnnnnnnnnnnnnnnnnnnnnnnnnnnnnnnnnnnnnnnnnnnnnnnnnnnnnnnnnnnnnnnnnnnnnnnnnnnnnnnnnnnnnnnnnnnnnnnnnnnnnnnnnnnnnnnnnnnnnnnnnnnnnnnnnnnnnnnnnnnnnnnnnnnnnnnnnnnnnnnnnnnnnnnnnnnnnnnnnnnnnnnnnnnnnnnnnnnnnnnnnnnnnnnnnnnnnnnnnnnnnnnnnnnnnnnnnnnnnnnnnnnnnnnnnnnnnnnnnnnnnnnnnnnnnnnnnnnnnnnnnnnnnnnnnnnnnnnnnnnnnnnnnnnnnnnnnnnnnnnnnnnnnnnnnnnnnnnnnnnnnnnnnnnnnnnnnnnnnnnnnnnnnnnnnnnnnnnnnnnnnnnnnnnnnnnnnnnnnnnnnnnnnnnnnnnnnnnnnnnnnnnnnnnnnnnnnnnnnnnnnnnnnnnnnnnnnnnnnnnnnnnnnnnnnnnnnnnnnnnnnnnnnnnnnnnnnnnnnnnnnnnnnnnnnnnnnnnnnnnnnnnnnnnnnnnnnnnnnnnnnnnnnnnnnnnnnnnnnnnnnnnnnnnnnnnnnnnnnnnnnnnnnnnnnnnnnnnnnnnnnnnnnnnnnnnnnnnnnnnnnnnnnnnnnnnnnnnnnnnnnnnnnnnnnnnnnnnnnnnnnnnnnnnnnnnnnnnnnnnnnnnnnnnnnnnnnnnnnnnnnnnnnnnnnnnnnnnnnnnnnnnnnnnnnnnnnnnnnnnnnnnnnnnnnnnnnnnnnnnnnnnnnnnnnnnnnnnnnnnnnnnnnnnnnnnnnnnnnnnnnnnnnnnnnnnnnnnnnnnnnnnnnnnnnnnnnnnnnnnnnnnnnnnnnnnnnnnnnnnnnnnnnnnnnnnnnnnnnnnnnnnnnnnnnnnnnnnnnnnnnnnnnnnnnnnnnnnnnnnnnnnnnnnnnnnnnnnnnnnnnnnnnnnnnnnnnnnnnnnnnnnnnnnnnnnnnnnnnnnnnnnnnnnnnnnnnnnnnnnnnnnnnnnnnnnnnnnnnnnnnnnnnnnnnnnnnnnnnnnnnnnnnnnnnnnnnnnnnnnnnnnnnnnnnnnnnnnnnnnnnnnnnnnnnnnnnnnnnnnnnnnnnnnnnnnnnnnnnnnnnnnnnnnnnnnnnnnnnnnnnnnnnnnnnnnnnnnnnnnnnnnnnnnnnnnnnnnnnnnnnnnnnnnnnnnnnnnnnnnnnnnnnnnnnnnnnnnnnnnnnnnnnnnnnnnnnnnnnnnnnnnnnnnnnnnnnnnnnnnnnnnnnnnnnnnnnnnnnnnnnnnnnnnnnnnnnnnnnnnnnnnnnnnnnnnnnnnnnnnnnnnnnnnnnnnnnnnnnnnnnnnnnnnnnnnnnnnnnnnnnnnnnnnnnnnnnnnnnnnnnnnnnnnnnnnnnnnnnnnnnnnnnnnnnnnnnnnnnnnnnnnnnnnnnnnnnnnnnnnnnnnnnnnnnnnnnnnnnnnnnnnnnnnnnnnnnnnnnnnnnnnnnnnnnnnnnnnnnnnnnnnnnnnnnnnnnnnnnnnnnnnnnnnnnnnnnnnnnnnnnnnnnnnnnnnnnnnnnnnnnnnnnnnnnnnnnnnnnnnnnnnnnnnnnnnnnnnnnnnnnnnnnnnnnnnnnnnnnnnnnnnnnnnnnnnnnnnnnnnnnnnnnnnnnnnnnnnnnnnnnnnnnnnnnnnnnnnnnnnnnnnnnnnnnnnnnnnnnnnnnnnnnnnnnnnnnnnnnnnnnnnnnnnnnnnnnnnnnnnnnnnnnnnnnnnnnnnnnnnnnnnnnnnnnnnnnnnnnnnnnnnnnnnnnnnnnnnnnnnnnnnnnnnnnnnnnnnnnnnnnnnnnnnnnnnnnnnnnnnnnnnnnnnnnnnnnnnnnnnnnnnnnnnnnnnnnnnnnnnnnnnnnnnnnnnnnnnnnnnnnnnnnnnnnnnnnnnnnnnnnnnnnnnnnnnnnnnnnnnnnnnnnnnnnnnnnnnnnnnnnnnnnnnnnnnnnnnnnnnnnnnnnnnnnnnnnnnnnnnnnnnnnnnnnnnnnnnnnnnnnnnnnnnnnnnnnnnnnnnnnnnnnnnnnnnnnnnnnnnnnnnnnnnnnnnnnnnnnnnnnnnnnnnnnnnnnnnnnnnnnnnnnnnnnnnnnnnnnnnnnnnnnnnnnnnnnnnnnnnnnnnnnnnnnnnnnnnnnnnnnnnnnnnnnnnnnnnnnnnnnnnnnnnnnnnnnnnnnnnnnnnnnnnnnnnnnnnnnnnnnnnnnnnnnnnnnnnnnnnnnnnnnnnnnnnnnnnnnnnnnnnnnnnnnnnnnnnnnnnnnnnnnnnnnnnnnnnnnnnnnnnnnnnnnnnnnnnnnnnnnnnnnnnnnnnnnnnnnnnnnnnnnnnnnnnnnnnnnnnnnnnnnnnnnnnnnnnnnnnnnnnnnnnnnnnnnnnnnnnnnnnnnnnnnnnnnnnnnnnnnnnnnnnnnnnnnnnnnnnnnnnnnnnnnnnnnnnnnnnnnnnnnnnnnnnnnnnnnnnnnnnnnnnnnnnnnnnnnnnnnnnnnnnnnnnnnnnnnnnnnnnnnnnnnnnnnnnnnnnnnnnnnnnnnnnnnnnnnnnnnnnnnnnnnnnnnnnnnnnnnnnnnnnnnnnnnnnnnnnnnnnnnnnnnnnnnnnnnnnnnnnnnnnnnnnnnnnnnnnnnnnnnnnnnnnnnnnnnnnnnnnnnnnnnnnnnnnnnnnnnnnnnnnnnnnnnnnnnnnnnnnnnnnnnnnnnnnnnnnnnnnnnnnnnnnnnnnnnnnnnnnnnnnnnnnnnnnnnnnnnnnnnnnnnnnnnnnnnnnnnnnnnnnnnnnnnnnnnnnnnnnnnnnnnnnnnnnnnnnnnnnnnnnnnnnnnnnnnnnnnnnnnnnnnnnnnnnnnnnnnnnnnnnnnnnnnnnnnnnnnnnnnnnnnnnnnnnnnnnnnnnnnnnnnnnnnnnnnnnnnnnnnnnnnnnnnnnnnnnnnnnnnnnnnnnnnnnnnnnnnnnnnnnnnnnnnnnnnnnnnnnnnnnnnnnnnnnnnnnnnnnnnnnnnnnnnnnnnnnnnnnnnnnnnnnnnnnnnnnnnnnnnnnnnnnnnnnnnnnnnnnnnnnnnnnnnnnnnnnnnnnnnnnnnnnnnnnnnnnnnnnnnnnnnnnnnnnnnnnnnnnnnnnnnnnnnnnnnnnnnnnnnnnnnnnnnnnnnnnnnnnnnnnnnnnnnnnnnnnnnnnnnnnnnnnnnnnnnnnnnnnnnnnnnnnnnnnnnnnnnnnnnnnnnnnnnnnnnnnnnnnnnnnnnnnnnnnnnnnnnnnnnnnnnnnnnnnnnnnnnnnnnnnnnnnnnnnnnnnnnnnnnnnnnnnnnnnnnnnnnnnnnnnnnnnnnnnnnnnnnnnnnnnnnnnnnnnnnnnnnnnnnnnnnnnnnnnnnnnnnnnnnnnnnnnnnnnnnnnnnnnnnnnnnnnnnnnnnnnnnnnnnnnnnnnnnnnnnnnnnnnnnnnnnnnnnnnnnnnnnnnnnnnnnnnnnnnnnnnnnnnnnnnnnnnnnnnnnnnnnnnnnnnnnnnnnnnnnnnnnnnnnnnnnnnnnnnnnnnnnnnnnnnnnnnnnnnnnnnnnnnnnnnnnnnnnnnnnnnnnnnnnnnnnnnnnnnnnnnnnnnnnnnnnnnnnnnnnnnnnnnnnnnnnnnnnnnnnnnnnnnnnnnnnnnnnnnnnnnnnnnnnnnnnnnnnnnnnnnnnnnnnnnnnnnnnnnnnnnnnnnnnnnnnnnnnnnnnnnnnnnnnnnnnnnnnnnnnnnnnnnnnnnnnnnnnnnnnnnnnnnnnnnnnnnnnnnnnnnnnnnnnnnnnnnnnnnnnnnnnnnnnnnnnnnnnnnnnnnnnnnnnnnnnnnnnnnnnnnnnnnnnnnnnnnnnnnnnnnnnnnnnnnnnnnnnnnnnnnnnnnnnnnnnnnnnnnnnnnnnnnnnnnnnnnnnnnnnnnnnnnnnnnnnnnnnnnnnnnnnnnnnnnnnnnnnnnnnnnnnnnnnnnnnnnnnnnnnnnnnnnnnnnnnnnnnnnnnnnnnnnnnnnnnnnnnnnnnnnnnnnnnnnnnnnnnnnnnnnnnnnnnnnnnnnnnnnnnnnnnnnnnnnnnnnnnnnnnnnnnnnnnnnnnnnnnnnnnnnnnnnnnnnnnnnnnnnnnnnnnnnnnnnnnnnnnnnnnnnnnnnnnnnnnnnnnnnnnnnnnnnnnnnnnnnnnnnnnnnnnnnnnnnnnnnnnnnnnnnnnnnnnnnnnnnnnnnnnnnnnnnnnnnnnnnnnnnnnnnnnnnnnnnnnnnnnnnnnnnnnnnnnnnnnnnnnnnnnnnnnnnnnnnnnnnnnnnnnnnnnnnnnnnnnnnnnnnnnnnnnnnnnnnnnnnnnnnnnnnnnnnnnnnnnnnnnnnnnnnnnnnnnnnnnnnnnnnnnnnnnnnnnnnnnnnnnnnnnnnnnnnnnnnnnnnnnnnnnnnnnnnnnnnnnnnnnnnnnnnnnnnnnnnnnnnnnnnnnnnnnnnnnnnnnnnnnnnnnnnnnnnnnnnnnnnnnnnnnnnnnnnnnnnnnnnnnnnnnnnnnnnnnnnnnnnnnnnnnnnnnnnnnnnnnnnnnnnnnnnnnnnnnnnnnnnnnnnnnnnnnnnnnnnnnnnnnnnnnnnnnnnnnnnnnnnnnnnnnnnnnnnnnnnnnnnnnnnnnnnnnnnnnnnnnnnnnnnnnnnnnnnnnnnnnnnnnnnnnnnnnnnnnnnnnnnnnnnnnnnnnnnnnnnnnnnnnnnnnnnnnnnnnnnnnnnnnnnnnnnnnnnnnnnnnnnnnnnnnnnnnnnnnnnnnnnnnnnnnnnnnnnnnnnnnnnnnnnnnnnnnnnnnnnnnnnnnnnnnnnnnnnnnnnnnnnnnnnnnnnnnnnnnnnnnnnnnnnnnnnnnnnnnnnnnnnnnnnnnnnnnnnnnnnnnnnnnnnnnnnnnnnnnnnnnnnnnnnnnnnnnnnnnnnnnnnnnnnnnnnnnnnnnnnnnnnnnnnnnnnnnnnnnnnnnnnnnnnnnnnnnnnnnnnnnnnnnnnnnnnnnnnnnnnnnnnnnnnnnnnnnnnnnnnnnnnnnnnnnnnnnnnnnnnnnnnnnnnnnnnnnnnnnnnnnnnnnnnnnnnnnnnnnnnnnnnnnnnnnnnnnnnnnnnnnnnnnnnnnnnnnnnnnnnnnnnnnnnnnnnnnnnnnnnnnnnnnnnnnnnnnnnnnnnnnnnnnnnnnnnnnnnnnnnnnnnnnnnnnnnnnnnnnnnnnnnnnnnnnnnnnnnnnnnnnnnnnnnnnnnnnnnnnnnnnnnnnnnnnnnnnnnnnnnnnnnnnnnnnnnnnnnnnnnnnnnnnnnnnnnnnnnnnnnnnnnnnnnnnnnnnnnnnnnnnnnnnnnnnnnnnnnnnnnnnnnnnnnnnnnnnnnnnnnnnnnnnnnnnnnnnnnnnnnnnnnnnnnnnnnnnnnnnnnnnnnnnnnnnnnnnnnnnnnnnnnnnnnnnnnnnnnnnnnnnnnnnnnnnnnnnnnnnnnnnnnnnnnnnnnnnnnnnnnnnnnnnnnnnnnnnnnnnnnnnnnnnnnnnnnnnnnnnnnnnnnnnnnnnnnnnnnnnnnnnnnnnnnnnnnnnnnnnnnnnnnnnnnnnnnnnnnnnnnnnnnnnnnnnnnnnnnnnnnnnnnnnnnnnnnnnnnnnnnnnnnnnnnnnnnnnnnnnnnnnnnnnnnnnnnnnnnnnnnnnnnnnnnnnnnnnnnnnnnnnnnnnnnnnnnnnnnnnnnnnnnnnnnnnnnnnnnnnnnnnnnnnnnnnnnnnnnnnnnnnnnnnnnnnnnnnnnnnnnnnnnnnnnnnnnnnnnnnnnnnnnnnnnnnnnnnnnnnnnnnnnnnnnnnnnnnnnnnnnnnnnnnnnnnnnnnnnnnnnnnnnnnnnnnnnnnnnnnnnnnnnnnnnnnnnnnnnnnnnnnnnnnnnnnnnnnnnnnnnnnnnnnnnnnnnnnnnnnnnnnnnnnnnnnnnnnnnnnnnnnnnnnnnnnnnnnnnnnnnnnnnnnnnnnnnnnnnnnnnnnnnnnnnnnnnnnnnnnnnnnnnnnnnnnnnnnnnnnnnnnnnnnnnnnnnnnnnnnnnnnnnnnnnnnnnnnnnnnnnnnnnnnnnnnnnnnnnnnnnnnnnnnnnnnnnnnnnnnnnnnnnnnnnnnnnnnnnnnnnnnnnnnnnnnnnnnnnnnnnnnnnnnnnnnnnnnnnnnnnnnnnnnnnnnnnnnnnnnnnnnnnnnnnnnnnnnnnnnnnnnnnnnnnnnnnnnnnnnnnnnnnnnnnnnnnnnnnnnnnnnnnnnnnnnnnnnnnnnnnnnnnnnnnnnnnnnnnnnnnnnnnnnnnnnnnnnnnnnnnnnnnnnnnnnnnnnnnnnnnnnnnnnnnnnnnnnnnnnnnnnnnnnnnnnnnnnnnnnnnnnnnnnnnnnnnnnnnnnnnnnnnnnnnnnnnnnnnnnnnnnnnnnnnnnnnnnnnnnnnnnnnnnnnnnnnnnnnnnnnnnnnnnnnnnnnnnnnnnnnnnnnnnnnnnnnnnnnnnnnnnnnnnnnnnnnnnnnnnnnnnnnnnnnnnnnnnnnnnnnnnnnnnnnnnnnnnnnnnnnnnnnnnnnnnnnnnnnnnnnnnnnnnnnnnnnnnnnnnnnnnnnnnnnnnnnnnnnnnnnnnnnnnnnnnnnnnnnnnnnnnnnnnnnnnnnnnnnnnnnnnnnnnnnnnnnnnnnnnnnnnnnnnnnnnnnnnnnnnnnnnnnnnnnnnnnnnnnnnnnnnnnnnnnnnnnnnnnnnnnnnnnnnnnnnnnnnnnnnnnnnnnnnnnnnnnnnnnnnnnnnnnnnnnnnnnnnnnnnnnnnnnnnnnnnnnnnnnnnnnnnnnnnnnnnnnnnnnnnnnnnnnnnnnnnnnnnnnnnnnnnnnnnnnnnnnnnnnnnnnnnnnnnnnnnnnnnnnnnnnnnnnnnnnnnnnnnnnnnnnnnnnnnnnnnnnnnnnnnnnnnnnnnnnnnnnnnnnnnnnnnnnnnnnnnnnnnnnnnnnnnnnnnnnnnnnnnnnnnnnnnnnnnnnnnnnnnnnnnnnnnnnnnnnnnnnnnnnnnnnnnnnnnnnnnnnnnnnnnnnnnnnnnnnnnnnnnnnnnnnnnnnnnnnnnnnnnnnnnnnnnnnnnnnnnnnnnnnnnnnnnnnnnnnnnnnnnnnnnnnnnnnnnnnnnnnnnnnnnnnnnnnnnnnnnnnnnnnnnnnnnnnnnnnnnnnnnnnnnnnnnnnnnnnnnnnnnnnnnnnnnnnnnnnnnnnnnnnnnnnnnnnnnnnnnnnnnnnnnnnnnnnnnnnnnnnnnnnnnnnnnnnnnnnnnnnnnnnnnnnnnnnnnnnnnnnnnnnnnnnnnnnnnnnnnnnnnnnnnnnnnnnnnnnnnnnnnnnnnnnnnnnnnnnnnnnnnnnnnnnnnnnnnnnnnnnnnnnnnnnnnnnnnnnnnnnnnnnnnnnnnnnnnnnnnnnnnnnnnnnnnnnnnnnnnnnnnnnnnnnnnnnnnnnnnnnnnnnnnnnnnnnnnnnnnnnnnnnnnnnnnnnnnnnnnnnnnnnnnnnnnnnnnnnnnnnnnnnnnnnnnnnnnnnnnnnnnnnnnnnnnnnnnnnnnnnnnnnnnnnnnnnnnnnnnnnnnnnnnnnnnnnnnnnnnnnnnnnnnnnnnnnnnnnnnnnnnnnnnnnnnnnnnnnnnnnnnnnnnnnnnnnnnnnnnnnnnnnnnnnnnnnnnnnnnnnnnnnnnnnnnnnnnnnnnnnnnnnnnnnnnnnnnnnnnnnnnnnnnnnnnnnnnnnnnnnnnnnnnnnnnnnnnnnnnnnnnnnnnnnnnnnnnnnnnnnnnnnnnnnnnnnnnnnnnnnnnnnnnnnnnnnnnnnnnnnnnnnnnnnnnnnnnnnnnnnnnnnnnnnnnnnnnnnnnnnnnnnnnnnnnnnnnnnnnnnnnnnnnnnnnnnnnnnnnnnnnnnnnnnnnnnnnnnnnnnnnnnnnnnnnnnnnnnnnnnnnnnnnnnnnnnnnnnnnnnnnnnnnnnnnnnnnnnnnnnnnnnnnnnnnnnnnnnnnnnnnnnnnnnnnnnnnnnnnnnnnnnnnnnnnnnnnnnnnnnnnnnnnnnnnnnnnnnnnnnnnnnnnnnnnnnnnnnnnnnnnnnnnnnnnnnnnnnnnnnnnnnnnnnnnnnnnnnnnnnnnnnnnnnnnnnnnnnnnnnnnnnnnnnnnnnnnnnnnnnnnnnnnnnnnnnnnnnnnnnnnnnnnnnnnnnnnnnnnnnnnnnnnnnnnnnnnnnnnnnnnnnnnnnnnnnnnnnnnnnnnnnnnnnnnnnnnnnnnnnnnnnnnnnnnnnnnnnnnnnnnnnnnnnnnnnnnnnnnnnnnnnnnnnnnnnnnnnnnnnnnnnnnnnnnnnnnnnnnnnnnnnnnnnnnnnnnnnnnnnnnnnnnnnnnnnnnnnnnnnnnnnnnnnnnnnnnnnnnnnnnnnnnnnnnnnnnnnnnnnnnnnnnnnnnnnnnnnnnnnnnnnnnnnnnnnnnnnnnnnnnnnnnnnnnnnnnnnnnnnnnnnnnnnnnnnnnnnnnnnnnnnnnnnnnnnnnnnnnnnnnnnnnnnnnnnnnnnnnnnnnnnnnnnnnnnnnnnnnnnnnnnnnnnnnnnnnnnnnnnnnnnnnnnnnnnnnnnnnnnnnnnnnnnnnnnnnnnnnnnnnnnnnnnnnnnnnnnnnnnnnnnnnnnnnnnnnnnnnnnnnnnnnnnnnnnnnnnnnnnnnnnnnnnnnnnnnnnnnnnnnnnnnnnnnnnnnnnnnnnnnnnnnnnnnnnnnnnnnnnnnnnnnnnnnnnnnnnnnnnnnnnnnnnnnnnnnnnnnnnnnnnnnnnnnnnnnnnnnnnnnnnnnnnnnnnnnnnnnnnnnnnnnnnnnnnnnnnnnnnnnnnnnnnnnnnnnnnnnnnnnnnnnnnnnnnnnnnnnnnnnnnnnnnnnnnnnnnnnnnnnnnnnnnnnnnnnnnnnnnnnnnnnnnnnnnnnnnnnnnnnnnnnnnnnnnnnnnnnnnnnnnnnnnnnnnnnnnnnnnnnnnnnnnnnnnnnnnnnnnnnnnnnnnnnnnnnnnnnnnnnnnnnnnnnnnnnnnnnnnnnnnnnnnnnnnnnnnnnnnnnnnnnnnnnnnnnnnnnnnnnnnnnnnnnnnnnnnnnnnnnnnnnnnnnnnnnnnnnnnnnnnnnnnnnnnnnnnnnnnnnnnnnnnnnnnnnnnnnnnnnnnnnnnnnnnnnnnnnnnnnnnnnnnnnnnnnnnnnnnnnnnnnnnnnnnnnnnnnnnnnnnnnnnnnnnnnnnnnnnnnnnnnnnnnnnnnnnnnnnnnnnnnnnnnnnnnnnnnnnnnnnnnnnnnnnnnnnnnnnnnnnnnnnnnnnnnnnnnnnnnnnnnnnnnnnnnnnnnnnnnnnnnnnnnnnnnnnnnnnnnnnnnnnnnnnnnnnnnnnnnnnnnnnnnnnnnnnnnnnnnnnnnnnnnnnnnnnnnnnnnnnnnnnnnnnnnnnnnnnnnnnnnnnnnnnnnnnnnnnnnnnnnnnnnnnnnnnnnnnnnnnnnnnnnnnnnnnnnnnnnnnnnnnnnnnnnnnnnnnnnnnnnnnnnnnnnnnnnnnnnnnnnnnnnnnnnnnnnnnnnnnnnnnnnnnnnnnnnnnnnnnnnnnnnnnnnnnnnnnnnnnnnnnnnnnnnnnnnnnnnnnnnnnnnnnnnnnnnnnnnnnnnnnnnnnnnnnnnnnnnnnnnnnnnnnnnnnnnnnnnnnnnnnnnnnnnnnnnnnnnnnnnnnnnnnnnnnnnnnnnnnnnnnnnnnnnnnnnnnnnnnnnnnnnnnnnnnnnnnnnnnnnnnnnnnnnnnnnnnnnnnnnnnnnnnnnnnnnnnnnnnnnnnnnnnnnnnnnnnnnnnnnnnnnnnnnnnnnnnnnnnnnnnnnnnnnnnnnnnnnnnnnnnnnnnnnnnnnnnnnnnnnnnnnnnnnnnnnnnnnnnnnnnnnnnnnnnnnnnnnnnnnnnnnnnnnnnnnnnnnnnnnnnnnnnnnnnnnnnnnnnnnnnnnnnnnnnnnnnnnnnnnnnnnnnnnnnnnnnnnnnnnnnnnnnnnnnnnnnnnnnnnnnnnnnnnnnnnnnnnnnnnnnnnnnnnnnnnnnnnnnnnnnnnnnnnnnnnnnnnnnnnnnnnnnnnnnnnnnnnnnnnnnnnnnnnnnnnnnnnnnnnnnnnnnnnnnnnnnnnnnnnnnnnnnnnnnnnnnnnnnnnnnnnnnnnnnnnnnnnnnnnnnnnnnnnnnnnnnnnnnnnnnnnnnnnnnnnnnnnnnnnnnnnnnnnnnnnnnnnnnnnnnnnnnnnnnnnnnnnnnnnnnnnnnnnnnnnnnnnnnnnnnnnnnnnnnnnnnnnnnnnnnnnnnnnnnnnnnnnnnnnnnnnnnnnnnnnnnnnnnnnnnnnnnnnnnnnnnnnnnnnnnnnnnnnnnnnnnnnnnnnnnnnnnnnnnnnnnnnnnnnnnnnnnnnnnnnnnnnnnnnnnnnnnnnnnnnnnnnnnnnnnnnnnnnnnnnnnnnnnnnnnnnnnnnnnnnnnnnnnnnnnnnnnnnnnnnnnnnnnnnnnnnnnnnnnnnnnnnnnnnnnnnnnnnnnnnnnnnnnnnnnnnnnnnnnnnnnnnnnnnnnnnnnnnnnnnnnnnnnnnnnnnnnnnnnnnnnnnnnnnnnnnnnnnnnnnnnnnnnnnnnnnnnnnnnnnnnnnnnnnnnnnnnnnnnnnnnnnnnnnnnnnnnnnnnnnnnnnnnnnnnnnnnnnnnnnnnnnnnnnnnnnnnnnnnnnnnnnnnnnnnnnnnnnnnnnnnnnnnnnnnnnnnnnnnnnnnnnnnnnnnnnnnnnnnnnnnnnnnnnnnnnnnnnnnnnnnnnnnnnnnnnnnnnnnnnnnnnnnnnnnnnnnnnnnnnnnnnnnnnnnnnnnnnnnnnnnnnnnnnnnnnnnnnnnnnnnnnnnnnnnnnnnnnnnnnnnnnnnnnnnnnnnnnnnnnnnnnnnnnnnnnnnnnnnnnnnnnnnnnnnnnnnnnnnnnnnnnnnnnnnnnnnnnnnnnnnnnnnnnnnnnnnnnnnnnnnnnnnnnnnnnnnnnnnnnnnnnnnnnnnnnnnnnnnnnnnnnnnnnnnnnnnnnnnnnnnnnnnnnnnnnnnnnnnnnnnnnnnnnnnnnnnnnnnnnnnnnnnnnnnnnnnnnnnnnnnnnnnnnnnnnnnnnnnnnnnnnnnnnnnnnnnnnnnnnnnnnnnnnnnnnnnnnnnnnnnnnnnnnnnnnnnnnnnnnnnnnnnnnnnnnnnnnnnnnnnnnnnnnnnnnnnnnnnnnnnnnnnnnnnnnnnnnnnnnnnnnnnnnnnnnnnnnnnnnnnnnnnnnnnnnnnnnnnnnnnnnnnnnnnnnnnnnnnnnnnnnnnnnnnnnnnnnnnnnnnnnnnnnnnnnnnnnnnnnnnnnnnnnnnnnnnnnnnnnnnnnnnnnnnnnnnnnnnnnnnnnnnnnnnnnnnnnnnnnnnnnnnnnnnnnnnnnnnnnnnnnnnnnnnnnnnnnnnnnnnnnnnnnnnnnnnnnnnnnnnnnnnnnnnnnnnnnnnnnnnnnnnnnnnnnnnnnnnnnnnnnnnnnnnnnnnnnnnnnnnnnnnnnnnnnnnnnnnnnnnnnnnnnnnnnnnnnnnnnnnnnnnnnnnnnnnnnnnnnnnnnnnnnnnnnnnnnnnnnnnnnnnnnnnnnnnnnnnnnnnnnnnnnnnnnnnnnnnnnnnnnnnnnnnnnnnnnnnnnnnnnnnnnnnnnnnnnnnnnnnnnnnnnnnnnnnnnnnnnnnnnnnnnnnnnnnnnnnnnnnnnnnnnnnnnnnnnnnnnnnnnnnnnnnnnnnnnnnnnnnnnnnnnnnnnnnnnnnnnnnnnnnnnnnnnnnnnnnnnnnnnnnnnnnnnnnnnnnnnnnnnnnnnnnnnnnnnnnnnnnnnnnnnnnnnnnnnnnnnnnnnnnnnnnnnnnnnnnnnnnnnnnnnnnnnnnnnnnnnnnnnnnnnnnnnnnnnnnnnnnnnnnnnnnnnnnnnnnnnnnnnnnnnnnnnnnnnnnnnnnnnnnnnnnnnnnnnnnnnnnnnnnnnnnnnnnnnnnnnnnnnnnnnnnnnnnnnnnnnnnnnnnnnnnnnnnnnnnnnnnnnnnnnnnnnnnnnnnnnnnnnnnnnnnnnnnnnnnnnnnnnnnnnnnnnnnnnnnnnnnnnnnnnnnnnnnnnnnnnnnnnnnnnnnnnnnnnnnnnnnnnnnnnnnnnnnnnnnnnnnnnnnnnnnnnnnnnnnnnnnnnnnnnnnnnnnnnnnnnnnnnnnnnnnnnnnnnnnnnnnnnnnnnnnnnnnnnnnnnnnnnnnnnnnnnnnnnnnnnnnnnnnnnnnnnnnnnnnnnnnnnnnnnnnnnnnnnnnnnnnnnnnnnnnnnnnnnnnnnnnnnnnnnnnnnnnnnnnnnnnnnnnnnnnnnnnnnnnnnnnnnnnnnnnnnnnnnnnnnnnnnnnnnnnnnnnnnnnnnnnnnnnnnnnnnnnnnnnnnnnnnnnnnnnnnnnnnnnnnnnnnnnnnnnnnnnnnnnnnnnnnnnnnnnnnnnnnnnnnnnnnnnnnnnnnnnnnnnnnnnnnnnnnnnnnnnnnnnnnnnnnnnnnnnnnnnnnnnnnnnnnnnnnnnnnnnnnnnnnnnnnnnnnnnnnnnnnnnnnnnnnnnnnnnnnnnnnnnnnnnnnnnnnnnnnnnnnnnnnnnnnnnnnnnnnnnnnnnnnnnnnnnnnnnnnnnnnnnnnnnnnnnnnnnnnnnnnnnnnnnnnnnnnnnnnnnnnnnnnnnnnnnnnnnnnnnnnnnnnnnnnnnnnnnnnnnnnnnnnnnnnnnnnnnnnnnnnnnnnnnnnnnnnnnnnnnnnnnnnnnnnnnnnnnnnnnnnnnnnnnnnnnnnnnnnnnnnnnnnnnnnnnnnnnnnnnnnnnnnnnnnnnnnnnnnnnnnnnnnnnnnnnnnnnnnnnnnnnnnnnnnnnnnnnnnnnnnnnnnnnnnnnnnnnnnnnnnnnnnnnnnnnnnnnnnnnnnnnnnnnnnnnnnnnnnnnnnnnnnnnnnnnnnnnnnnnnnnnnnnnnnnnnnnnnnnnnnnnnnnnnnnnnnnnnnnnnnnnnnnnnnnnnnnnnnnnnnnnnnnnnnnnnnnnnnnnnnnnnnnnnnnnnnnnnnnnnnnnnnnnnnnnnnnnnnnnnnnnnnnnnnnnnnnnnnnnnnnnnnnnnnnnnnnnnnnnnnnnnnnnnnnnnnnnnnnnnnnnnnnnnnnnnnnnnnnnnnnnnnnnnnnnnnnnnnnnnnnnnnnnnnnnnnnnnnnnnnnnnnnnnnnnnnnnnnnnnnnnnnnnnnnnnnnnnnnnnnnnnnnnnnnnnnnnnnnnnnnnnnnnnnnnnnnnnnnnnnnnnnnnnnnnnnnnnnnnnnnnnnnnnnnnnnnnnnnnnnnnnnnnnnnnnnnnnnnnnnnnnnnnnnnnnnnnnnnnnnnnnnnnnnnnnnnnnnnnnnnnnnnnnnnnnnnnnnnnnnnnnnnnnnnnnnnnnnnnnnnnnnnnnnnnnnnnnnnnnnnnnnnnnnnnnnnnnnnnnnnnnnnnnnnnnnnnnnnnnnnnnnnnnnnnnnnnnnnnnnnnnnnnnnnnnnnnnnnnnnnnnnnnnnnnnnnnnnnnnnnnnnnnnnnnnnnnnnnnnnnnnnnnnnnnnnnnnnnnnnnnnnnnnnnnnnnnnnnnnnnnnnnnnnnnnnnnnnnnnnnnnnnnnnnnnnnnnnnnnnnnnnnnnnnnnnnnnnnnnnnnnnnnnnnnnnnnnnnnnnnnnnnnnnnnnnnnnnnnnnnnnnnnnnnnnnnnnnnnnnnnnnnnnnnnnnnnnnnnnnnnnnnnnnnnnnnnnnnnnnnnnnnnnnnnnnnnnnnnnnnnnnnnnnnnnnnnnnnnnnnnnnnnnnnnnnnnnnnnnnnnnnnnnnnnnnnnnnnnnnnnnnnnnnnnnnnnnnnnnnnnnnnnnnnnnnnnnnnnnnnnnnnnnnnnnnnnnnnnnnnnnnnnnnnnnnnnnnnnnnnnnnnnnnnnnnnnnnnnnnnnnnnnnnnnnnnnnnnnnnnnnnnnnnnnnnnnnnnnnnnnnnnnnnnnnnnnnnnnnnnnnnnnnnnnnnnnnnnnnnnnnnnnnnnnnnnnnnnnnnnnnnnnnnnnnnnnnnnnnnnnnnnnnnnnnnnnnnnnnnnnnnnnnnnnnnnnnnnnnnnnnnnnnnnnnnnnnnnnnnnnnnnnnnnnnnnnnnnnnnnnnnnnnnnnnnnnnnnnnnnnnnnnnnnnnnnnnnnnnnnnnnnnnnnnnnnnnnnnnnnnnnnnnnnnnnnnnnnnnnnnnnnnnnnnnnnnnnnnnnnnnnnnnnnnnnnnnnnnnnnnnnnnnnnnnnnnnnnnnnnnnnnnnnnnnnnnnnnnnnnnnnnnnnnnnnnnnnnnnnnnnnnnnnnnnnnnnnnnnnnnnnnnnnnnnnnnnnnnnnnnnnnnnnnnnnnnnnnnnnnnnnnnnnnnnnnnnnnnnnnnnnnnnnnnnnnnnnnnnnnnnnnnnnnnnnnnnnnnnnnnnnnnnnnnnnnnnnnnnnnnnnnnnnnnnnnnnnnnnnnnnnnnnnnnnnnnnnnnnnnnnnnnnnnnnnnnnnnnnnnnnnnnnnnnnnnnnnnnnnnnnnnnnnnnnnnnnnnnnnnnnnnnnnnnnnnnnnnnnnnnnnnnnnnnnnnnnnnnnnnnnnnnnnnnnnnnnnnnnnnnnnnnnnnnnnnnnnnnnnnnnnnnnnnnnnnnnnnnnnnnnnnnnnnnnnnnnnnnnnnnnnnnnnnnnnnnnnnnnnnnnnnnnnnnnnnnnnnnnnnnnnnnnnnnnnnnnnnnnnnnnnnnnnnnnnnnnnnnnnnnnnnnnnnnnnnnnnnnnnnnnnnnnnnnnnnnnnnnnnnnnnnnnnnnnnnnnnnnnnnnnnnnnnnnnnnnnnnnnnnnnnnnnnnnnnnnnnnnnnnnnnnnnnnnnnnnnnnnnnnnnnnnnnnnnnnnnnnnnnnnnnnnnnnnnnnnnnnnnnnnnnnnnnnnnnnnnnnnnnnnnnnnnnnnnnnnnnnnnnnnnnnnnnnnnnnnnnnnnnnnnnnnnnnnnnnnnnnnnnnnnnnnnnnnnnnnnnnnnnnnnnnnnnnnnnnnnnnnnnnnnnnnnnnnnnnnnnnnnnnnnnnnnnnnnnnnnnnnnnnnnnnnnnnnnnnnnnnnnnnnnnnnnnnnnnnnnnnnnnnnnnnnnnnnnnnnnnnnnnnnnnnnnnnnnnnnnnnnnnnnnnnnnnnnnnnnnnnnnnnnnnnnnnnnnnnnnnnnnnnnnnnnnnnnnnnnnnnnnnnnnnnnnnnnnnnnnnnnnnnnnnnnnnnnnnnnnnnnnnnnnnnnnnnnnnnnnnnnnnnnnnnnnnnnnnnnnnnnnnnnnnnnnnnnnnnnnnnnnnnnnnnnnnnnnnnnnnnnnnnnnnnnnnnnnnnnnnnnnnnnnnnnnnnnnnnnnnnnnnnnnnnnnnnnnnnnnnnnnnnnnnnnnnnnnnnnnnnnnnnnnnnnnnnnnnnnnnnnnnnnnnnnnnnnnnnnnnnnnnnnnnnnnnnnnnnnnnnnnnnnnnnnnnnnnnnnnnnnnnnnnnnnnnnnnnnnnnnnnnnnnnnnnnnnnnnnnnnnnnnnnnnnnnnnnnnnnnnnnnnnnnnnnnnnnnnnnnnnnnnnnnnnnnnnnnnnnnnnnnnnnnnnnnnnnnnnnnnnnnnnnnnnnnnnnnnnnnnnnnnnnnnnnnnnnnnnnnnnnnnnnnnnnnnnnnnnnnnnnnnnnnnnnnnnnnnnnnnnnnnnnnnnnnnnnnnnnnnnnnnnnnnnnnnnnnnnnnnnnnnnnnnnnnnnnnnnnnnnnnnnnnnnnnnnnnnnnnnnnnnnnnnnnnnnnnnnnnnnnnnnnnnnnnnnnnnnnnnnnnnnnnnnnnnnnnnnnnnnnnnnnnnnnnnnnnnnnnnnnnnnnnnnnnnnnnnnnnnnnnnnnnnnnnnnnnnnnnnnnnnnnnnnnnnnnnnnnnnnnnnnnnnnnnnnnnnnnnnnnnnnnnnnnnnnnnnnnnnnnnnnnnnnnnnnnnnnnnnnnnnnnnnnnnnnnnnnnnnnnnnnnnnnnnnnnnnnnnnnnnnnnnnnnnnnnnnnnnnnnnnnnnnnnnnnnnnnnnnnnnnnnnnnnnnnnnnnnnnnnnnnnnnnnnnnnnnnnnnnnnnnnnnnnnnnnnnnnnnnnnnnnnnnnnnnnnnnnnnnnnnnnnnnnnnnnnnnnnnnnnnnnnnnnnnnnnnnnnnnnnnnnnnnnnnnnnnnnnnnnnnnnnnnnnnnnnnnnnnnnnnnnnnnnnnnnnnnnnnnnnnnnnnnnnnnnnnnnnnnnnnnnnnnnnnnnnnnnnnnnnnnnnnnnnnnnnnnnnnnnnnnnnnnnnnnnnnnnnnnnnnnnnnnnnnnnnnnnnnnnnnnnnnnnnnnnnnnnnnnnnnnnnnnnnnnnnnnnnnnnnnnnnnnnnnnnnnnnnnnnnnnnnnnnnnnnnnnnnnnnnnnnnnnnnnnnnnnnnnnnnnnnnnnnnnnnnnnnnnnnnnnnnnnnnnnnnnnnnnnnnnnnnnnnnnnnnnnnnnnnnnnnnnnnnnnnnnnnnnnnnnnnnnnnnnnnnnnnnnnnnnnnnnnnnnnnnnnnnnnnnnnnnnnnnnnnnnnnnnnnnnnnnnnnnnnnnnnnnnnnnnnnnnnnnnnnnnnnnnnnnnnnnnnnnnnnnnnnnnnnnnnnnnnnnnnnnnnnnnnnnnnnnnnnnnnnnnnnnnnnnnnnnnnnnnnnnnnnnnnnnnnnnnnnnnnnnnnnnnnnnnnnnnnnnnnnnnnnnnnnnnnnnnnnnnnnnnnnnnnnnnnnnnnnnnnnnnnnnnnnnnnnnnnnnnnnnnnnnnnnnnnnnnnnnnnnnnnnnnnnnnnnnnnnnnnnnnnnnnnnnnnnnnnnnnnnnnnnnnnnnnnnnnnnnnnnnnnnnnnnnnnnnnnnnnnnnnnnnnnnnnnnnnnnnnnnnnnnnnnnnnnnnnnnnnnnnnnnnnnnnnnnnnnnnnnnnnnnnnnnnnnnnnnnnnnnnnnnnnnnnnnnnnnnnnnnnnnnnnnnnnnnnnnnnnnnnnnnnnnnnnnnnnnnnnnnnnnnnnnnnnnnnnnnnnnnnnnnnnnnnnnnnnnnnnnnnnnnnnnnnnnnnnnnnnnnnnnnnnnnnnnnnnnnnnnnnnnnnnnnnnnnnnnnnnnnnnnnnnnnnnnnnnnnnnnnnnnnnnnnnnnnnnnnnnnnnnnnnnnnnnnnnnnnnnnnnnnnnnnnnnnnnnnnnnnnnnnnnnnnnnnnnnnnnnnnnnnnnnnnnnnnnnnnnnnnnnnnnnnnnnnnnnnnnnnnnnnnnnnnnnnnnnnnnnnnnnnnnnnnnnnnnnnnnnnnnnnnnnnnnnnnnnnnnnnnnnnnnnnnnnnnnnnnnnnnnnnnnnnnnnnnnnnnnnnnnnnnnnnnnnnnnnnnnnnnnnnnnnnnnnnnnnnnnnnnnnnnnnnnnnnnnnnnnnnnnnnnnnnnnnnnnnnnnnnnnnnnnnnnnnnnnnnnnnnnnnnnnnnnnnnnnnnnnnnnnnnnnnnnnnnnnnnnnnnnnnnnnnnnnnnnnnnnnnnnnnnnnnnnnnnnnnnnnnnnnnnnnnnnnnnnnnnnnnnnnnnnnnnnnnnnnnnnnnnnnnnnnnnnnnnnnnnnnnnnnnnnnnnnnnnnnnnnnnnnnnnnnnnnnnnnnnnnnnnnnnnnnnnnnnnnnnnnnnnnnnnnnnnnnnnnnnnnnnnnnnnnnnnnnnnnnnnnnnnnnnnnnnnnnnnnnnnnnnnnnnnnnnnnnnnnnnnnnnnnnnnnnnnnnnnnnnnnnnnnnnnnnnnnnnnnnnnnnnnnnnnnnnnnnnnnnnnnnnnnnnnnnnnnnnnnnnnnnnnnnnnnnnnnnnnnnnnnnnnnnnnnnnnnnnnnnnnnnnnnnnnnnnnnnnnnnnnnnnnnnnnnnnnnnnnnnnnnnnnnnnnnnnnnnnnnnnnnnnnnnnnnnnnnnnnnnnnnnnnnnnnnnnnnnnnnnnnnnnnnnnnnnnnnnnnnnnnnnnnnnnnnnnnnnnnnnnnnnnnnnnnnnnnnnnnnnnnnnnnnnnnnnnnnnnnnnnnnnnnnnnnnnnnnnnnnnnnnnnnnnnnnnnnnnnnnnnnnnnnnnnnnnnnnnnnnnnnnnnnnnnnnnnnnnnnnnnnnnnnnnnnnnnnnnnnnnnnnnnnnnnnnnnnnnnnnnnnnnnnnnnnnnnnnnnnnnnnnnnnnnnnnnnnnnnnnnnnnnnnnnnnnnnnnnnnnnnnnnnnnnnnnnnnnnnnnnnnnnnnnnnnnnnnnnnnnnnnnnnnnnnnnnnnnnnnnnnnnnnnnnnnnnnnnnnnnnnnnnnnnnnnnnnnnnnnnnnnnnnnnnnnnnnnnnnnnnnnnnnnnnnnnnnnnnnnnnnnnnnnnnnnnnnnnnnnnnnnnnnnnnnnnnnnnnnnnnnnnnnnnnnnnnnnnnnnnnnnnnnnnnnnnnnnnnnnnnnnnnnnnnnnnnnnnnnnnnnnnnnnnnnnnnnnnnnnnnnnnnnnnnnnnnnnnnnnnnnnnnnnnnnnnnnnnnnnnnnnnnnnnnnnnnnnnnnnnnnnnnnnnnnnnnnnnnnnnnnnnnnnnnnnnnnnnnnnnnnnnnnnnnnnnnnnnnnnnnnnnnnnnnnnnnnnnnnnnnnnnnnnnnnnnnnnnnnnnnnnnnnnnnnnnnnnnnnnnnnnnnnnnnnnnnnnnnnnnnnnnnnnnnnnnnnnnnnnnnnnnnnnnnnnnnnnnnnnnnnnnnnnnnnnnnnnnnnnnnnnnnnnnnnnnnnnnnnnnnnnnnnnnnnnnnnnnnnnnnnnnnnnnnnnnnnnnnnnnnnnnnnnnnnnnnnnnnnnnnnnnnnnnnnnnnnnnnnnnnnnnnnnnnnnnnnnnnnnnnnnnnnnnnnnnnnnnnnnnnnnnnnnnnnnnnnnnnnnnnnnnnnnnnnnnnnnnnnnnnnnnnnnnnnnnnnnnnnnnnnnnnnnnnnnnnnnnnnnnnnnnnnnnnnnnnnnnnnnnnnnnnnnnnnnnnnnnnnnnnnnnnnnnnnnnnnnnnnnnnnnnnnnnnnnnnnnnnnnnnnnnnnnnnnnnnnnnnnnnnnnnnnnnnnnnnnnnnnnnnnnnnnnnnnnnnnnnnnnnnnnnnnnnnnnnnnnnnnnnnnnnnnnnnnnnnnnnnnnnnnnnnnnnnnnnnnnnnnnnnnnnnnnnnnnnnnnnnnnnnnnnnnnnnnnnnnnnnnnnnnnnnnnnnnnnnnnnnnnnnnnnnnnnnnnnnnnnnnnnnnnnnnnnnnnnnnnnnnnnnnnnnnnnnnnnnnnnnnnnnnnnnnnnnnnnnnnnnnnnnnnnnnnnnnnnnnnnnnnnnnnnnnnnnnnnnnnnnnnnnnnnnnnnnnnnnnnnnnnnnnnnnnnnnnnnnnnnnnnnnnnnnnnnnnnnnnnnnnnnnnnnnnnnnnnnnnnnnnnnnnnnnnnnnnnnnnnnnnnnnnnnnnnnnnnnnnnnnnnnnnnnnnnnnnnnnnnnnnnnnnnnnnnnnnnnnnnnnnnnnnnnnnnnnnnnnnnnnnnnnnnnnnnnnnnnnnnnnnnnnnnnnnnnnnnnnnnnnnnnnnnnnnnnnnnnnnnnnnnnnnnnnnnnnnnnnnnnnnnnnnnnnnnnnnnnnnnnnnnnnnnnnnnnnnnnnnnnnnnnnnnnnnnnnnnnnnnnnnnnnnnnnnnnnnnnnnnnnnnnnnnnnnnnnnnnnnnnnnnnnnnnnnnnnnnnnnnnnnnnnnnnnnnnnnnnnnnnnnnnnnnnnnnnnnnnnnnnnnnnnnnnnnnnnnnnnnnnnnnnnnnnnnnnnnnnnnnnnnnnnnnnnnnnnnnnnnnnnnnnnnnnnnnnnnnnnnnnnnnnnnnnnnnnnnnnnnnnnnnnnnnnnnnnnnnnnnnnnnnnnnnnnnnnnnnnnnnnnnnnnnnnnnnnnnnnnnnnnnnnnnnnnnnnnnnnnnnnnnnnnnnnnnnnnnnnnnnnnnnnnnnnnnnnnnnnnnnnnnnnnnnnnnnnnnnnnnnnnnnnnnnnnnnnnnnnnnnnnnnnnnnnnnnnnnnnnnnnnnnnnnnnnnnnnnnnnnnnnnnnnnnnnnnnnnnnnnnnnnnnnnnnnnnnnnnnnnnnnnnnnnnnnnnnnnnnnnnnnnnnnnnnnnnnnnnnnnnnnnnnnnnnnnnnnnnnnnnnnnnnnnnnnnnnnnnnnnnnnnnnnnnnnnnnnnnnnnnnnnnnnnnnnnnnnnnnnnnnnnnnnnnnnnnnnnnnnnnnnnnnnnnnnnnnnnnnnnnnnnnnnnnnnnnnnnnnnnnnnnnnnnnnnnnnnnnnnnnnnnnnnnnnnnnnnnnnnnnnnnnnnnnnnnnnnnnnnnnnnnnnnnnnnnnnnnnnnnnnnnnnnnnnnnnnnnnnnnnnnnnnnnnnnnnnnnnnnnnnnnnnnnnnnnnnnnnnnnnnnnnnnnnnnnnnnnnnnnnnnnnnnnnnnnnnnnnnnnnnnnnnnnnnnnnnnnnnnnnnnnnnnnnnnnnnnnnnnnnnnnnnnnnnnnnnnnnnnnnnnnnnnnnnnnnnnnnnnnnnnnnnnnnnnnnnnnnnnnnnnnnnnnnnnnnnnnnnnnnnnnnnnnnnnnnnnnnnnnnnnnnnnnnnnnnnnnnnnnnnnnnnnnnnnnnnnnnnnnnnnnnnnnnnnnnnnnnnnnnnnnnnnnnnnnnnnnnnnnnnnnnnnnnnnnnnnnnnnnnnnnnnnnnnnnnnnnnnnnnnnnnnnnnnnnnnnnnnnnnnnnnnnnnnnnnnnnnnnnnnnnnnnnnnnnnnnnnnnnnnnnnnnnnnnnnnnnnnnnnnnnnnnnnnnnnnnnnnnnnnnnnnnnnnnnnnnnnnnnnnnnnnnnnnnnnnnnnnnnnnnnnnnnnnnnnnnnnnnnnnnnnnnnnnnnnnnnnnnnnnnnnnnnnnnnnnnnnnnnnnnnnnnnnnnnnnnnnnnnnnnnnnnnnnnnnnnnnnnnnnnnnnnnnnnnnnnnnnnnnnnnnnnnnnnnnnnnnnnnnnnnnnnnnnnnnnnnnnnnnnnnnnnnnnnnnnnnnnnnnnnnnnnnnnnnnnnnnnnnnnnnnnnnnnnnnnnnnnnnnnnnnnnnnnnnnnnnnnnnnnnnnnnnnnnnnnnnnnnnnnnnnnnnnnnnnnnnnnnnnnnnnnnnnnnnnnnnnnnnnnnnnnnnnnnnnnnnnnnnnnnnnnnnnnnnnnnnnnnnnnnnnnnnnnnnnnnnnnnnnnnnnnnnnnnnnnnnnnnnnnnnnnnnnnnnnnnnnnnnnnnnnnnnnnnnnnnnnnnnnnnnnnnnnnnnnnnnnnnnnnnnnnnnnnnnnnnnnnnnnnnnnnnnnnnnnnnnnnnnnnnnnnnnnnnnnnnnnnnnnnnnnnnnnnnnnnnnnnnnnnnnnnnnnnnnnnnnnnnnnnnnnnnnnnnnnnnnnnnnnnnnnnnnnnnnnnnnnnnnnnnnnnnnnnnnnnnnnnnnnnnnnnnnnnnnnnnnnnnnnnnnnnnnnnnnnnnnnnnnnnnnnnnnnnnnnnnnnnnnnnnnnnnnnnnnnnnnnnnnnnnnnnnnnnnnnnnnnnnnnnnnnnnnnnnnnnnnnnnnnnnnnnnnnnnnnnnnnnnnnnnnnnnnnnnnnnnnnnnnnnnnnnnnnnnnnnnnnnnnnnnnnnnnnnnnnnnnnnnnnnnnnnnnnnnnnnnnnnnnnnnnnnnnnnnnnnnnnnnnnnnnnnnnnnnnnnnnnnnnnnnnnnnnnnnnnnnnnnnnnnnnnnnnnnnnnnnnnnnnnnnnnnnnnnnnnnnnnnnnnnnnnnnnnnnnnnnnnnnnnnnnnnnnnnnnnnnnnnnnnnnnnnnnnnnnnnnnnnnnnnnnnnnnnnnnnnnnnnnnnnnnnnnnnnnnnnnnnnnnnnnnnnnnnnnnnnnnnnnnnnnnnnnnnnnnnnnnnnnnnnnnnnnnnnnnnnnnnnnnnnnnnnnnnnnnnnnnnnnnnnnnnnnnnnnnnnnnnnnnnnnnnnnnnnnnnnnnnnnnnnnnnnnnnnnnnnnnnnnnnnnnnnnnnnnnnnnnnnnnnnnnnnnnnnnnnnnnnnnnnnnnnnnnnnnnnnnnnnnnnnnnnnnnnnnnnnnnnnnnnnnnnnnnnnnnnnnnnnnnnnnnnnnnnnnnnnnnnnnnnnnnnnnnnnnnnnnnnnnnnnnnnnnnnnnnnnnnnnnnnnnnnnnnnnnnnnnnnnnnnnnnnnnnnnnnnnnnnnnnnnnnnnnnnnnnnnnnnnnnnnnnnnnnnnnnnnnnnnnnnnnnnnnnnnnnnnnnnnnnnnnnnnnnnnnnnnnnnnnnnnnnnnnnnnnnnnnnnnnnnnnnnnnnnnnnnnnnnnnnnnnnnnnnnnnnnnnnnnnnnnnnnnnnnnnnnnnnnnnnnnnnnnnnnnnnnnnnnnnnnnnnnnnnnnnnnnnnnnnnnnnnnnnnnnnnnnnnnnnnnnnnnnnnnnnnnnnnnnnnnnnnnnnnnnnnnnnnnnnnnnnnnnnnnnnnnnnnnnnnnnnnnnnnnnnnnnnnnnnnnnnnnnnnnnnnnnnnnnnnnnnnnnnnnnnnnnnnnnnnnnnnnnnnnnnnnnnnnnnnnnnnnnnnnnnnnnnnnnnnnnnnnnnnnnnnnnnnnnnnnnnnnnnnnnnnnnnnnnnnnnnnnnnnnnnnnnnnnnnnnnnnnnnnnnnnnnnnnnnnnnnnnnnnnnnnnnnnnnnnnnnnnnnnnnnnnnnnnnnnnnnnnnnnnnnnnnnnnnnnnnnnnnnnnnnnnnnnnnnnnnnnnnnnnnnnnnnnnnnnnnnnnnnnnnnnnnnnnnnnnnnnnnnnnnnnnnnnnnnnnnnnnnnnnnnnnnnnnnnnnnnnnnnnnnnnnnnnnnnnnnnnnnnnnnnnnnnnnnnnnnnnnnnnnnnnnnnnnnnnnnnnnnnnnnnnnnnnnnnnnnnnnnnnnnnnnnnnnnnnnnnnnnnnnnnnnnnnnnnnnnnnnnnnnnnnnnnnnnnnnnnnnnnnnnnnnnnnnnnnnnnnnnnnnnnnnnnnnnnnnnnnnnnnnnnnnnnnnnnnnnnnnnnnnnnnnnnnnnnnnnnnnnnnnnnnnnnnnnnnnnnnnnnnnnnnnnnnnnnnnnnnnnnnnnnnnnnnnnnnnnnnnnnnnnnnnnnnnnnnnnnnnnnnnnnnnnnnnnnnnnnnnnnnnnnnnnnnnnnnnnnnnnnnnnnnnnnnnnnnnnnnnnnnnnnnnnnnnnnnnnnnnnnnnnnnnnnnnnnnnnnnnnnnnnnnnnnnnnnnnnnnnnnnnnnnnnnnnnnnnnnnnnnnnnnnnnnnnnnnnnnnnnnnnnnnnnnnnnnnnnnnnnnnnnnnnnnnnnnnnnnnnnnnnnnnnnnnnnnnnnnnnnnnnnnnnnnnnnnnnnnnnnnnnnnnnnnnnnnnnnnnnnnnnnnnnnnnnnnnnnnnnnnnnnnnnnnnnnnnnnnnnnnnnnnnnnnnnnnnnnnnnnnnnnnnnnnnnnnnnnnnnnnnnnnnnnnnnnnnnnnnnnnnnnnnnnnnnnnnnnnnnnnnnnnnnnnnnnnnnnnnnnnnnnnnnnnnnnnnnnnnnnnnnnnnnnnnnnnnnnnnnnnnnnnnnnnnnnnnnnnnnnnnnnnnnnnnnnnnnnnnnnnnnnnnnnnnnnnnnnnnnnnnnnnnnnnnnnnnnnnnnnnnnnnnnnnnnnnnnnnnnnnnnnnnnnnnnnnnnnnnnnnnnnnnnnnnnnnnnnnnnnnnnnnnnnnnnnnnnnnnnnnnnnnnnnnnnnnnnnnnnnnnnnnnnnnnnnnnnnnnnnnnnnnnnnnnnnnnnnnnnnnnnnnnnnnnnnnnnnnnnnnnnnnnnnnnnnnnnnnnnnnnnnnnnnnnnnnnnnnnnnnnnnnnnnnnnnnnnnnnnnnnnnnnnnnnnnnnnnnnnnnnnnnnnnnnnnnnnnnnnnnnnnnnnnnnnnnnnnnnnnnnnnnnnnnnnnnnnnnnnnnnnnnnnnnnnnnnnnnnnnnnnnnnnnnnnnnnnnnnnnnnnnnnnnnnnnnnnnnnnnnnnnnnnnnnnnnnnnnnnnnnnnnnnnnnnnnnnnnnnnnnnnnnnnnnnnnnnnnnnnnnnnnnnnnnnnnnnnnnnnnnnnnnnnnnnnnnnnnnnnnnnnnnnnnnnnnnnnnnnnnnnnnnnnnnnnnnnnnnnnnnnnnnnnnnnnnnnnnnnnnnnnnnnnnnnnnnnnnnnnnnnnnnnnnnnnnnnnnnnnnnnnnnnnnnnnnnnnnnnnnnnnnnnnnnnnnnnnnnnnnnnnnnnnnnnnnnnnnnnnnnnnnnnnnnnnnnnnnnnnnnnnnnnnnnnnnnnnnnnnnnnnnnnnnnnnnnnnnnnnnnnnnnnnnnnnnnnnnnnnnnnnnnnnnnnnnnnnnnnnnnnnnnnnnnnnnnnnnnnnnnnnnnnnnnnnnnnnnnnnnnnnnnnnnnnnnnnnnnnnnnnnnnnnnnnnnnnnnnnnnnnnnnnnnnnnnnnnnnnnnnnnnnnnnnnnnnnnnnnnnnnnnnnnnnnnnnnnnnnnnnnnnnnnnnnnnnnnnnnnnnnnnnnnnnnnnnnnnnnnnnnnnnnnnnnnnnnnnnnnnnnnnnnnnnnnnnnnnnnnnnnnnnnnnnnnnnnnnnnnnnnnnnnnnnnnnnnnnnnnnnnnnnnnnnnnnnnnnnnnnnnnnnnnnnnnnnnnnnnnnnnnnnnnnnnnnnnnnnnnnnnnnnnnnnnnnnnnnnnnnnnnnnnnnnnnnnnnnnnnnnnnnnnnnnnnnnnnnnnnnnnnnnnnnnnnnnnnnnnnnnnnnnnnnnnnnnnnnnnnnnnnnnnnnnnnnnnnnnnnnnnnnnnnnnnnnnnnnnnnnnnnnnnnnnnnnnnnnnnnnnnnnnnnnnnnnnnnnnnnnnnnnnnnnnnnnnnnnnnnnnnnnnnnnnnnnnnnnnnnnnnnnnnnnnnnnnnnnnnnnnnnnnnnnnnnnnnnnnnnnnnnnnnnnnnnnnnnnnnnnnnnnnnnnnnnnnnnnnnnnnnnnnnnnnnnnnnnnnnnnnnnnnnnnnnnnnnnnnnnnnnnnnnnnnnnnnnnnnnnnnnnnnnnnnnnnnnnnnnnnnnnnnnnnnnnnnnnnnnnnnnnnnnnnnnnnnnnnnnnnnnnnnnnnnnnnnnnnnnnnnnnnnnnnnnnnnnnnnnnnnnnnnnnnnnnnnnnnnnnnnnnnnnnnnnnnnnnnnnnnnnnnnnnnnnnnnnnnnnnnnnnnnnnnnnnnnnnnnnnnnnnnnnnnnnnnnnnnnnnnnnnnnnnnnnnnnnnnnnnnnnnnnnnnnnnnnnnnnnnnnnnnnnnnnnnnnnnnnnnnnnnnnnnnnnnnnnnnnnnnnnnnnnnnnnnnnnnnnnnnnnnnnnnnnnnnnnnnnnnnnnnnnnnnnnnnnnnnnnnnnnnnnnnnnnnnnnnnnnnnnnnnnnnnnnnnnnnnnnnnnnnnnnnnnnnnnnnnnnnnnnnnnnnnnnnnnnnnnnnnnnnnnnnnnnnnnnnnnnnnnnnnnnnnnnnnnnnnnnnnnnnnnnnnnnnnnnnnnnnnnnnnnnnnnnnnnnnnnnnnnnnnnnnnnnnnnnnnnnnnnnnnnnnnnnnnnnnnnnnnnnnnnnnnnnnnnnnnnnnnnnnnnnnnnnnnnnnnnnnnnnnnnnnnnnnnnnnnnnnnnnnnnnnnnnnnnnnnnnnnnnnnnnnnnnnnnnnnnnnnnnnnnnnnnnnnnnnnnnnnnnnnnnnnnnnnnnnnnnnnnnnnnnnnnnnnnnnnnnnnnnnnnnnnnnnnnnnnnnnnnnnnnnnnnnnnnnnnnnnnnnnnnnnnnnnnnnnnnnnnnnnnnnnnnnnnnnnnnnnnnnnnnnnnnnnnnnnnnnnnnnnnnnnnnnnnnnnnnnnnnnnnnnnnnnnnnnnnnnnnnnnnnnnnnnnnnnnnnnnnnnnnnnnnnnnnnnnnnnnnnnnnnnnnnnnnnnnnnnnnnnnnnnnnnnnnnnnnnnnnnnnnnnnnnnnnnnnnnnnnnnnnnnnnnnnnnnnnnnnnnnnnnnnnnnnnnnnnnnnnnnnnnnnnnnnnnnnnnnnnnnnnnnnnnnnnnnnnnnnnnnnnnnnnnnnnnnnnnnnnnnnnnnnnnnnnnnnnnnnnnnnnnnnnnnnnnnnnnnnnnnnnnnnnnnnnnnnnnnnnnnnnnnnnnnnnnnnnnnnnnnnnnnnnnnnnnnnnnnnnnnnnnnnnnnnnnnnnnnnnnnnnnnnnnnnnnnnnnnnnnnnnnnnnnnnnnnnnnnnnnnnnnnnnnnnnnnnnnnnnnnnnnnnnnnnnnnnnnnnnnnnnnnnnnnnnnnnnnnnnnnnnnnnnnnnnnnnnnnnnnnnnnnnnnnnnnnnnnnnnnnnnnnnnnnnnnnnnnnnnnnnnnnnnnnnnnnnnnnnnnnnnnnnnnnnnnnnnnnnnnnnnnnnnnnnnnnnnnnnnnnnnnnnnnnnnnnnnnnnnnnnnnnnnnnnnnnnnnnnnnnnnnnnnnnnnnnnnnnnnnnnnnnnnnnnnnnnnnnnnnnnnnnnnnnnnnnnnnnnnnnnnnnnnnnnnnnnnnnnnnnnnnnnnnnnnnnnnnnnnnnnnnnnnnnnnnnnnnnnnnnnnnnnnnnnnnnnnnnnnnnnnnnnnnnnnnnnnnnnnnnnnnnnnnnnnnnnnnnnnnnnnnnnnnnnnnnnnnnnnnnnnnnnnnnnnnnnnnnnnnnnnnnnnnnnnnnnnnnnnnnnnnnnnnnnnnnnnnnnnnnnnnnnnnnnnnnnnnnnnnnnnnnnnnnnnnnnnnnnnnnnnnnnnnnnnnnnnnnnnnnnnnnnnnnnnnnnnnnnnnnnnnnnnnnnnnnnnnnnnnnnnnnnnnnnnnnnnnnnnnnnnnnnnnnnnnnnnnnnnnnnnnnnnnnnnnnnnnnnnnnnnnnnnnnnnnnnnnnnnnnnnnnnnnnnnnnnnnnnnnnnnnnnnnnnnnnnnnnnnnnnnnnnnnnnnnnnnnnnnnnnnnnnnnnnnnnnnnnnnnnnnnnnnnnnnnnnnnnnnnnnnnnnnnnnnnnnnnnnnnnnnnnnnnnnnnnnnnnnnnnnnnnnnnnnnnnnnnnnnnnnnnnnnnnnnnnnnnnnnnnnnnnnnnnnnnnnnnnnnnnnnnnnnnnnnnnnnnnnnnnnnnnnnnnnnnnnnnnnnnnnnnnnnnnnnnnnnnnnnnnnnnnnnnnnnnnnnnnnnnnnnnnnnnnnnnnnnnnnnnnnnnnnnnnnnnnnnnnnnnnnnnnnnnnnnnnnnnnnnnnnnnnnnnnnnnnnnnnnnnnnnnnnnnnnnnnnnnnnnnnnnnnnnnnnnnnnnnnnnnnnnnnnnnnnnnnnnnnnnnnnnnnnnnnnnnnnnnnnnnnnnnnnnnnnnnnnnnnnnnnnnnnnnnnnnnnnnnnnnnnnnnnnnnnnnnnnnnnnnnnnnnnnnnnnnnnnnnnnnnnnnnnnnnnnnnnnnnnnnnnnnnnnnnnnnnnnnnnnnnnnnnnnnnnnnnnnnnnnnnnnnnnnnnnnnnnnnnnnnnnnnnnnnnnnnnnnnnnnnnnnnnnnnnnnnnnnnnnnnnnnnnnnnnnnnnnnnnnnnnnnnnnnnnnnnnnnnnnnnnnnnnnnnnnnnnnnnnnnnnnnnnnnnnnnnnnnnnnnnnnnnnnnnnnnnnnnnnnnnnnnnnnnnnnnnnnnnnnnnnnnnnnnnnnnnnnnnnnnnnnnnnnnnnnnnnnnnnnnnnnnnnnnnnnnnnnnnnnnnnnnnnnnnnnnnnnnnnnnnnnnnnnnnnnnnnnnnnnnnnnnnnnnnnnnnnnnnnnnnnnnnnnnnnnnnnnnnnnnnnnnnnnnnnnnnnnnnnnnnnnnnnnnnnnnnnnnnnnnnnnnnnnnnnnnnnnnnnnnnnnnnnnnnnnnnnnnnnnnnnnnnnnnnnnnnnnnnnnnnnnnnnnnnnnnnnnnnnnnnnnnnnnnnnnnnnnnnnnnnnnnnnnnnnnnnnnnnnnnnnnnnnnnnnnnnnnnnnnnnnnnnnnnnnnnnnnnnnnnnnnnnnnnnnnnnnnnnnnnnnnnnnnnnnnnnnnnnnnnnnnnnnnnnnnnnnnnnnnnnnnnnnnnnnnnnnnnnnnnnnnnnnnnnnnnnnnnnnnnnnnnnnnnnnnnnnnnnnnnnnnnnnnnnnnnnnnnnnnnnnnnnnnnnnnnnnnnnnnnnnnnnnnnnnnnnnnnnnnnnnnnnnnnnnnnnnnnnnnnnnnnnnnnnnnnnnnnnnnnnnnnnnnnnnnnnnnnnnnnnnnnnnnnnnnnnnnnnnnnnnnnnnnnnnnnnnnnnnnnnnnnnnnnnnnnnnnnnnnnnnnnnnnnnnnnnnnnnnnnnnnnnnnnnnnnnnnnnnnnnnnnnnnnnnnnnnnnnnnnnnnnnnnnnnnnnnnnnnnnnnnnnnnnnnnnnnnnnnnnnnnnnnnnnnnnnnnnnnnnnnnnnnnnnnnnnnnnnnnnnnnnnnnnnnnnnnnnnnnnnnnnnnnnnnnnnnnnnnnnnnnnnnnnnnnnnnnnnnnnnnnnnnnnnnnnnnnnnnnnnnnnnnnnnnnnnnnnnnnnnnnnnnnnnnnnnnnnnnnnnnnnnnnnnnnnnnnnnnnnnnnnnnnnnnnnnnnnnnnnnnnnnnnnnnnnnnnnnnnnnnnnnnnnnnnnnnnnnnnnnnnnnnnnnnnnnnnnnnnnnnnnnnnnnnnnnnnnnnnnnnnnnnnnnnnnnnnnnnnnnnnnnnnnnnnnnnnnnnnnnnnnnnnnnnnnnnnnnnnnnnnnnnnnnnnnnnnnnnnnnnnnnnnnnnnnnnnnnnnnnnnnnnnnnnnnnnnnnnnnnnnnnnnnnnnnnnnnnnnnnnnnnnnnnnnnnnnnnnnnnnnnnnnnnnnnnnnnnnnnnnnnnnnnnnnnnnnnnnnnnnnnnnnnnnnnnnnnnnnnnnnnnnnnnnnnnnnnnnnnnnnnnnnnnnnnnnnnnnnnnnnnnnnnnnnnnnnnnnnnnnnnnnnnnnnnnnnnnnnnnnnnnnnnnnnnnnnnnnnnnnnnnnnnnnnnnnnnnnnnnnnnnnnnnnnnnnnnnnnnnnnnnnnnnnnnnnnnnnnnnnnnnnnnnnnnnnnnnnnnnnnnnnnnnnnnnnnnnnnnnnnnnnnnnnnnnnnnnnnnnnnnnnnnnnnnnnnnnnnnnnnnnnnnnnnnnnnnnnnnnnnnnnnnnnnnnnnnnnnnnnnnnnnnnnnnnnnnnnnnnnnnnnnnnnnnnnnnnnnnnnnnnnnnnnnnnnnnnnnnnnnnnnnnnnnnnnnnnnnnnnnnnnnnnnnnnnnnnnnnnnnnnnnnnnnnnnnnnnnnnnnnnnnnnnnnnnnnnnnnnnnnnnnnnnnnnnnnnnnnnnnnnnnnnnnnnnnnnnnnnnnnnnnnnnnnnnnnnnnnnnnnnnnnnnnnnnnnnnnnnnnnnnnnnnnnnnnnnnnnnnnnnnnnnnnnnnnnnnnnnnnnnnnnnnnnnnnnnnnnnnnnnnnnnnnnnnnnnnnnnnnnnnnnnnnnnnnnnnnnnnnnnnnnnnnnnnnnnnnnnnnnnnnnnnnnnnnnnnnnnnnnnnnnnnnnnnnnnnnnnnnnnnnnnnnnnnnnnnnnnnnnnnnnnnnnnnnnnnnnnnnnnnnnnnnnnnnnnnnnnnnnnnnnnnnnnnnnnnnnnnnnnnnnnnnnnnnnnnnnnnnnnnnnnnnnnnnnnnnnnnnnnnnnnnnnnnnnnnnnnnnnnnnnnnnnnnnnnnnnnnnnnnnnnnnnnnnnnnnnnnnnnnnnnnnnnnnnnnnnnnnnnnnnnnnnnnnnnnnnnnnnnnnnnnnnnnnnnnnnnnnnnnnnnnnnnnnnnnnnnnnnnnnnnnnnnnnnnnnnnnnnnnnnnnnnnnnnnnnnnnnnnnnnnnnnnnnnnnnnnnnnnnnnnnnnnnnnnnnnnnnnnnnnnnnnnnnnnnnnnnnnnnnnnnnnnnnnnnnnnnnnnnnnnnnnnnnnnnnnnnnnnnnnnnnnnnnnnnnnnnnnnnnnnnnnnnnnnnnnnnnnnnnnnnnnnnnnnnnnnnnnnnnnnnnnnnnnnnnnnnnnnnnnnnnnnnnnnnnnnnnnnnnnnnnnnnnnnnnnnnnnnnnnnnnnnnnnnnnnnnnnnnnnnnnnnnnnnnnnnnnnnnnnnnnnnnnnnnnnnnnnnnnnnnnnnnnnnnnnnnnnnnnnnnnnnnnnnnnnnnnnnnnnnnnnnnnnnnnnnnnnnnnnnnnnnnnnnnnnnnnnnnnnnnnnnnnnnnnnnnnnnnnnnnnnnnnnnnnnnnnnnnnnnnnnnnnnnnnnnnnnnnnnnnnnnnnnnnnnnnnnnnnnnnnnnnnnnnnnnnnnnnnnnnnnnnnnnnnnnnnnnnnnnnnnnnnnnnnnnnnnnnnnnnnnnnnnnnnnnnnnnnnnnnnnnnnnnnnnnnnnnnnnnnnnnnnnnnnnnnnnnnnnnnnnnnnnnnnnnnnnnnnnnnnnnnnnnnnnnnnnnnnnnnnnnnnnnnnnnnnnnnnnnnnnnnnnnnnnnnnnnnnnnnnnnnnnnnnnnnnnnnnnnnnnnnnnnnnnnnnnnnnnnnnnnnnnnnnnnnnnnnnnnnnnnnnnnnnnnnnnnnnnnnnnnnnnnnnnnnnnnnnnnnnnnnnnnnnnnnnnnnnnnnnnnnnnnnnnnnnnnnnnnnnnnnnnnnnnnnnnnnnnnnnnnnnnnnnnnnnnnnnnnnnnnnnnnnnnnnnnnnnnnnnnnnnnnnnnnnnnnnnnnnnnnnnnnnnnnnnnnnnnnnnnnnnnnnnnnnnnnnnnnnnnnnnnnnnnnnnnnnnnnnnnnnnnnnnnnnnnnnnnnnnnnnnnnnnnnnnnnnnnnnnnnnnnnnnnnnnnnnnnnnnnnnnnnnnnnnnnnnnnnnnnnnnnnnnnnnnnnnnnnnnnnnnnnnnnnnnnnnnnnnnnnnnnnnnnnnnnnnnnnnnnnnnnnnnnnnnnnnnnnnnnnnnnnnnnnnnnnnnnnnnnnnnnnnnnnnnnnnnnnnnnnnnnnnnnnnnnnnnnnnnnnnnnnnnnnnnnnnnnnnnnnnnnnnnnnnnnnnnnnnnnnnnnnnnnnnnnnnnnnnnnnnnnnnnnnnnnnnnnnnnnnnnnnnnnnnnnnnnnnnnnnnnnnnnnnnnnnnnnnnnnnnnnnnnnnnnnnnnnnnnnnnnnnnnnnnnnnnnnnnnnnnnnnnnnnnnnnnnnnnnnnnnnnnnnnnnnnnnnnnnnnnnnnnnnnnnnnnnnnnnnnnnnnnnnnnnnnnnnnnnnnnnnnnnnnnnnnnnnnnnnnnnnnnnnnnnnnnnnnnnnnnnnnnnnnnnnnnnnnnnnnnnnnnnnnnnnnnnnnnnnnnnnnnnnnnnnnnnnnnnnnnnnnnnnnnnnnnnnnnnnnnnnnnnnnnnnnnnnnnnnnnnnnnnnnnnnnnnnnnnnnnnnnnnnnnnnnnnnnnnnnnnnnnnnnnnnnnnnnnnnnnnnnnnnnnnnnnnnnnnnnnnnnnnnnnnnnnnnnnnnnnnnnnnnnnnnnnnnnnnnnnnnnnnnnnnnnnnnnnnnnnnnnnnnnnnnnnnnnnnnnnnnnnnnnnnnnnnnnnnnnnnnnnnnnnnnnnnnnnnnnnnnnnnnnnnnnnnnnnnnnnnnnnnnnnnnnnnnnnnnnnnnnnnnnnnnnnnnnnnnnnnnnnnnnnnnnnnnnnnnnnnnnnnnnnnnnnnnnnnnnnnnnnnnnnnnnnnnnnnnnnnnnnnnnnnnnnnnnnnnnnnnnnnnnnnnnnnnnnnnnnnnnnnnnnnnnnnnnnnnnnnnnnnnnnnnnnnnnnnnnnnnnnnnnnnnnnnnnnnnnnnnnnnnnnnnnnnnnnnnnnnnnnnnnnnnnnnnnnnnnnnnnnnnnnnnnnnnnnnnnnnnnnnnnnnnnnnnnnnnnnnnnnnnnnnnnnnnnnnnnnnnnnnnnnnnnnnnnnnnnnnnnnnnnnnnnnnnnnnnnnnnnnnnnnnnnnnnnnnnnnnnnnnnnnnnnnnnnnnnnnnnnnnnnnnnnnnnnnnnnnnnnnnnnnnnnnnnnnnnnnnnnnnnnnnnnnnnnnnnnnnnnnnnnnnnnnnnnnnnnnnnnnnnnnnnnnnnnnnnnnnnnnnnnnnnnnnnnnnnnnnnnnnnnnnnnnnnnnnnnnnnnnnnnnnnnnnnnnnnnnnnnnnnnnnnnnnnnnnnnnnnnnnnnnnnnnnnnnnnnnnnnnnnnnnnnnnnnnnnnnnnnnnnnnnnnnnnnnnnnnnnnnnnnnnnnnnnnnnnnnnnnnnnnnnnnnnnnnnnnnnnnnnnnnnnnnnnnnnnnnnnnnnnnnnnnnnnnnnnnnnnnnnnnnnnnnnnnnnnnnnnnnnnnnnnnnnnnnnnnnnnnnnnnnnnnnnnnnnnnnnnnnnnnnnnnnnnnnnnnnnnnnnnnnnnnnnnnnnnnnnnnnnnnnnnnnnnnnnnnnnnnnnnnnnnnnnnnnnnnnnnnnnnnnnnnnnnnnnnnnnnnnnnnnnnnnnnnnnnnnnnnnnnnnnnnnnnnnnnnnnnnnnnnnnnnnnnnnnnnnnnnnnnnnnnnnnnnnnnnnnnnnnnnnnnnnnnnnnnnnnnnnnnnnnnnnnnnnnnnnnnnnnnnnnnnnnnnnnnnnnnnnnnnnnnnnnnnnnnnnnnnnnnnnnnnnnnnnnnnnnnnnnnnnnnnnnnnnnnnnnnnnnnnnnnnnnnnnnnnnnnnnnnnnnnnnnnnnnnnnnnnnnnnnnnnnnnnnnnnnnnnnnnnnnnnnnnnnnnnnnnnnnnnnnnnnnnnnnnnnnnnnnnnnnnnnnnnnnnnnnnnnnnnnnnnnnnnnnnnnnnnnnnnnnnnnnnnnnnnnnnnnnnnnnnnnnnnnnnnnnnnnnnnnnnnnnnnnnnnnnnnnnnnnnnnnnnnnnnnnnnnnnnnnnnnnnnnnnnnnnnnnnnnnnnnnnnnnnnnnnnnnnnnnnnnnnnnnnnnnnnnnnnnnnnnnnnnnnnnnnnnnnnnnnnnnnnnnnnnnnnnnnnnnnnnnnnnnnnnnnnnnnnnnnnnnnnnnnnnnnnnnnnnnnnnnnnnnnnnnnnnnnnnnnnnnnnnnnnnnnnnnnnnnnnnnnnnnnnnnnnnnnnnnnnnnnnnnnnnnnnnnnnnnnnnnnnnnnnnnnnnnnnnnnnnnnnnnnnnnnnnnnnnnnnnnnnnnnnnnnnnnnnnnnnnnnnnnnnnnnnnnnnnnnnnnnnnnnnnnnnnnnnnnnnnnnnnnnnnnnnnnnnnnnnnnnnnnnnnnnnnnnnnnnnnnnnnnnnnnnnnnnnnnnnnnnnnnnnnnnnnnnnnnnnnnnnnnnnnnnnnnnnnnnnnnnnnnnnnnnnnnnnnnnnnnnnnnnnnnnnnnnnnnnnnnnnnnnnnnnnnnnnnnnnnnnnnnnnnnnnnnnnnnnnnnnnnnnnnnnnnnnnnnnnnnnnnnnnnnnnnnnnnnnnnnnnnnnnnnnnnnnnnnnnnnnnnnnnnnnnnnnnnnnnnnnnnnnnnnnnnnnnnnnnnnnnnnnnnnnnnnnnnnnnnnnnnnnnnnnnnnnnnnnnnnnnnnnnnnnnnnnnnnnnnnnnnnnnnnnnnnnnnnnnnnnnnnnnnnnnnnnnnnnnnnnnnnnnnnnnnnnnnnnnnnnnnnnnnnnnnnnnnnnnnnnnnnnnnnnnnnnnnnnnnnnnnnnnnnnnnnnnnnnnnnnnnnnnnnnnnnnnnnnnnnnnnnnnnnnnnnnnnnnnnnnnnnnnnnnnnnnnnnnnnnnnnnnnnnnnnnnnnnnnnnnnnnnnnnnnnnnnnnnnnnnnnnnnnnnnnnnnnnnnnnnnnnnnnnnnnnnnnnnnnnnnnnnnnnnnnnnnnnnnnnnnnnnnnnnnnnnnnnnnnnnnnnnnnnnnnnnnnnnnnnnnnnnnnnnnnnnnnnnnnnnnnnnnnnnnnnnnnnnnnnnnnnnnnnnnnnnnnnnnnnnnnnnnnnnnnnnnnnnnnnnnnnnnnnnnnnnnnnnnnnnnnnnnnnnnnnnnnnnnnnnnnnnnnnnnnnnnnnnnnnnnnnnnnnnnnnnnnnnnnnnnnnnnnnnnnnnnnnnnnnnnnnnnnnnnnnnnnnnnnnnnnnnnnnnnnnnnnnnnnnnnnnnnnnnnnnnnnnnnnnnnnnnnnnnnnnnnnnnnnnnnnnnnnnnnnnnnnnnnnnnnnnnnnnnnnnnnnnnnnnnnnnnnnnnnnnnnnnnnnnnnnnnnnnnnnnnnnnnnnnnnnnnnnnnnnnnnnnnnnnnnnnnnnnnnnnnnnnnnnnnnnnnnnnnnnnnnnnnnnnnnnnnnnnnnnnnnnnnnnnnnnnnnnnnnnnnnnnnnnnnnnnnnnnnnnnnnnnnnnnnnnnnnnnnnnnnnnnnnnnnnnnnnnnnnnnnnnnnnnnnnnnnnnnnnnnnnnnnnnnnnnnnnnnnnnnnnnnnnnnnnnnnnnnnnnnnnnnnnnnnnnnnnnnnnnnnnnnnnnnnnnnnnnnnnnnnnnnnnnnnnnnnnnnnnnnnnnnnnnnnnnnnnnnnnnnnnnnnnnnnnnnnnnnnnnnnnnnnnnnnnnnnnnnnnnnnnnnnnnnnnnnnnnnnnnnnnnnnnnnnnnnnnnnnnnnnnnnnnnnnnnnnnnnnnnnnnnnnnnnnnnnnnnnnnnnnnnnnnnnnnnnnnnnnnnnnnnnnnnnnnnnnnnnnnnnnnnnnnnnnnnnnnnnnnnnnnnnnnnnnnnnnnnnnnnnnnnnnnnnnnnnnnnnnnnnnnnnnnnnnnnnnnnnnnnnnnnnnnnnnnnnnnnnnnnnnnnnnnnnnnnnnnnnnnnnnnnnnnnnnnnnnnnnnnnnnnnnnnnnnnnnnnnnnnnnnnnnnnnnnnnnnnnnnnnnnnnnnnnnnnnnnnnnnnnnnnnnnnnnnnnnnnnnnnnnnnnnnnnnnnnnnnnnnnnnnnnnnnnnnnnnnnnnnnnnnnnnnnnnnnnnnnnnnnnnnnnnnnnnnnnnnnnnnnnnnnnnnnnnnnnnnnnnnnnnnnnnnnnnnnnnnnnnnnnnnnnnnnnnnnnnnnnnnnnnnnnnnnnnnnnnnnnnnnnnnnnnnnnnnnnnnnnnnnnnnnnnnnnnnnnnnnnnnnnnnnnnnnnnnnnnnnnnnnnnnnnnnnnnnnnnnnnnnnnnnnnnnnnnnnnnnnnnnnnnnnnnnnnnnnnnnnnnnnnnnnnnnnnnnnnnnnnnnnnnnnnnnnnnnnnnnnnnnnnnnnnnnnnnnnnnnnnnnnnnnnnnnnnnnnnnnnnnnnnnnnnnnnnnnnnnnnnnnnnnnnnnnnnnnnnnnnnnnnnnnnnnnnnnnnnnnnnnnnnnnnnnnnnnnnnnnnnnnnnnnnnnnnnnnnnnnnnnnnnnnnnnnnnnnnnnnnnnnnnnnnnnnnnnnnnnnnnnnnnnnnnnnnnnnnnnnnnnnnnnnnnnnnnnnnnnnnnnnnnnnnnnnnnnnnnnnnnnnnnnnnnnnnnnnnnnnnnnnnnnnnnnnnnnnnnnnnnnnnnnnnnnnnnnnnnnnnnnnnnnnnnnnnnnnnnnnnnnnnnnnnnnnnnnnnnnnnnnnnnnnnnnnnnnnnnnnnnnnnnnnnnnnnnnnnnnnnnnnnnnnnnnnnnnnnnnnnnnnnnnnnnnnnnnnnnnnnnnnnnnnnnnnnnnnnnnnnnnnnnnnnnnnnnnnnnnnnnnnnnnnnnnnnnnnnnnnnnnnnnnnnnnnnnnnnnnnnnnnnnnnnnnnnnnnnnnnnnnnnnnnnnnnnnnnnnnnnnnnnnnnnnnnnnnnnnnnnnnnnnnnnnnnnnnnnnnnnnnnnnnnnnnnnnnnnnnnnnnnnnnnnnnnnnnnnnnnnnnnnnnnnnnnnnnnnnnnnnnnnnnnnnnnnnnnnnnnnnnnnnnnnnnnnnnnnnnnnnnnnnnnnnnnnnnnnnnnnnnnnnnnnnnnnnnnnnnnnnnnnnnnnnnnnnnnnnnnnnnnnnnnnnnnnnnnnnnnnnnnnnnnnnnnnnnnnnnnnnnnnnnnnnnnnnnnnnnnnnnnnnnnnnnnnnnnnnnnnnnnnnnnnnnnnnnnnnnnnnnnnnnnnnnnnnnnnnnnnnnnnnnnnnnnnnnnnnnnnnnnnnnnnnnnnnnnnnnnnnnnnnnnnnnnnnnnnnnnnnnnnnnnnnnnnnnnnnnnnnnnnnnnnnnnnnnnnnnnnnnnnnnnnnnnnnnnnnnnnnnnnnnnnnnnnnnnnnnnnnnnnnnnnnnnnnnnnnnnnnnnnnnnnnnnnnnnnnnnnnnnnnnnnnnnnnnnnnnnnnnnnnnnnnnnnnnnnnnnnnnnnnnnnnnnnnnnnnnnnnnnnnnnnnnnnnnnnnnnnnnnnnnnnnnnnnnnnnnnnnnnnnnnnnnnnnnnnnnnnnnnnnnnnnnnnnnnnnnnnnnnnnnnnnnnnnnnnnnnnnnnnnnnnnnnnnnnnnnnnnnnnnnnnnnnnnnnnnnnnnnnnnnnnnnnnnnnnnnnnnnnnnnnnnnnnnnnnnnnnnnnnnnnnnnnnnnnnnnnnnnnnnnnnnnnnnnnnnnnnnnnnnnnnnnnnnnnnnnnnnnnnnnnnnnnnnnnnnnnnnnnnnnnnnnnnnnnnnnnnnnnnnnnnnnnnnnnnnnnnnnnnnnnnnnnnnnnnnnnnnnnnnnnnnnnnnnnnnnnnnnnnnnnnnnnnnnnnnnnnnnnnnnnnnnnnnnnnnnnnnnnnnnnnnnnnnnnnnnnnnnnnnnnnnnnnnnnnnnnnnnnnnnnnnnnnnnnnnnnnnnnnnnnnnnnnnnnnnnnnnnnnnnnnnnnnnnnnnnnnnnnnnnnnnnnnnnnnnnnnnnnnnnnnnnnnnnnnnnnnnnnnnnnnnnnnnnnnnnnnnnnnnnnnnnnnnnnnnnnnnnnnnnnnnnnnnnnnnnnnnnnnnnnnnnnnnnnnnnnnnnnnnnnnnnnnnnnnnnnnnnnnnnnnnnnnnnnnnnnnnnnnnnnnnnnnnnnnnnnnnnnnnnnnnnnnnnnnnnnnnnnnnnnnnnnnnnnnnnnnnnnnnnnnnnnnnnnnnnnnnnnnnnnnnnnnnnnnnnnnnnnnnnnnnnnnnnnnnnnnnnnnnnnnnnnnnnnnnnnnnnnnnnnnnnnnnnnnnnnnnnnnnnnnnnnnnnnnnnnnnnnnnnnnnnnnnnnnnnnnnnnnnnnnnnnnnnnnnnnnnnnnnnnnnnnnnnnnnnnnnnnnnnnnnnnnnnnnnnnnnnnnnnnnnnnnnnnnnnnnnnnnnnnnnnnnnnnnnnnnnnnnnnnnnnnnnnnnnnnnnnnnnnnnnnnnnnnnnnnnnnnnnnnnnnnnnnnnnnnnnnnnnnnnnnnnnnnnnnnnnnnnnnnnnnnnnnnnnnnnnnnnnnnnnnnnnnnnnnnnnnnnnnnnnnnnnnnnnnnnnnnnnnnnnnnnnnnnnnnnnnnnnnnnnnnnnnnnnnnnnnnnnnnnnnnnnnnnnnnnnnnnnnnnnnnnnnnnnnnnnnnnnnnnnnnnnnnnnnnnnnnnnnnnnnnnnnnnnnnnnnnnnnnnnnnnnnnnnnnnnnnnnnnnnnnnnnnnnnnnnnnnnnnnnnnnnnnnnnnnnnnnnnnnnnnnnnnnnnnnnnnnnnnnnnnnnnnnnnnnnnnnnnnnnnnnnnnnnnnnnnnnnnnnnnnnnnnnnnnnnnnnnnnnnnnnnnnnnnnnnnnnnnnnnnnnnnnnnnnnnnnnnnnnnnnnnnnnnnnnnnnnnnnnnnnnnnnnnnnnnnnnnnnnnnnnnnnnnnnnnnnnnnnnnnnnnnnnnnnnnnnnnnnnnnnnnnnnnnnnnnnnnnnnnnnnnnnnnnnnnnnnnnnnnnnnnnnnnnnnnnnnnnnnnnnnnnnnnnnnnnnnnnnnnnnnnnnnnnnnnnnnnnnnnnnnnnnnnnnnnnnnnnnnnnnnnnnnnnnnnnnnnnnnnnnnnnnnnnnnnnnnnnnnnnnnnnnnnnnnnnnnnnnnnnnnnnnnnnnnnnnnnnnnnnnnnnnnnnnnnnnnnnnnnnnnnnnnnnnnnnnnnnnnnnnnnnnnnnnnnnnnnnnnnnnnnnnnnnnnnnnnnnnnnnnnnnnnnnnnnnnnnnnnnnnnnnnnnnnnnnnnnnnnnnnnnnnnnnnnnnnnnnnnnnnnnnnnnnnnnnnnnnnnnnnnnnnnnnnnnnnnnnnnnnnnnnnnnnnnnnnnnnnnnnnnnnnnnnnnnnnnnnnnnnnnnnnnnnnnnnnnnnnnnnnnnnnnnnnnnnnnnnnnnnnnnnnnnnnnnnnnnnnnnnnnnnnnnnnnnnnnnnnnnnnnnnnnnnnnnnnnnnnnnnnnnnnnnnnnnnnnnnnnnnnnnnnnnnnnnnnnnnnnnnnnnnnnnnnnnnnnnnnnnnnnnnnnnnnnnnnnnnnnnnnnnnnnnnnnnnnnnnnnnnnnnnnnnnnnnnnnnnnnnnnnnnnnnnnnnnnnnnnnnnnnnnnnnnnnnnnnnnnnnnnnnnnnnnnnnnnnnnnnnnnnnnnnnnnnnnnnnnnnnnnnnnnnnnnnnnnnnnnnnnnnnnnnnnnnnnnnnnnnnnnnnnnnnnnnnnnnnnnnnnnnnnnnnnnnnnnnnnnnnnnnnnnnnnnnnnnnnnnnnnnnnnnnnnnnnnnnnnnnnnnnnnnnnnnnnnnnnnnnnnnnnnnnnnnnnnnnnnnnnnnnnnnnnnnnnnnnnnnnnnnnnnnnnnnnnnnnnnnnnnnnnnnnnnnnnnnnnnnnnnnnnnnnnnnnnnnnnnnnnnnnnnnnnnnnnnnnnnnnnnnnnnnnnnnnnnnnnnnnnnnnnnnnnnnnnnnnnnnnnnnnnnnnnnnnnnnnnnnnnnnnnnnnnnnnnnnnnnnnnnnnnnnnnnnnnnnnnnnnnnnnnnnnnnnnnnnnnnnnnnnnnnnnnnnnnnnnnnnnnnnnnnnnnnnnnnnnnnnnnnnnnnnnnnnnnnnnnnnnnnnnnnnnnnnnnnnnnnnnnnnnnnnnnnnnnnnnnnnnnnnnnnnnnnnnnnnnnnnnnnnnnnnnnnnnnnnnnnnnnnnnnnnnnnnnnnnnnnnnnnnnnnnnnnnnnnnnnnnnnnnnnnnnnnnnnnnnnnnnnnnnnnnnnnnnnnnnnnnnnnnnnnnnnnnnnnnnnnnnnnnnnnnnnnnnnnnnnnnnnnnnnnnnnnnnnnnnnnnnnnnnnnnnnnnnnnnnnnnnnnnnnnnnnnnnnnnnnnnnnnnnnnnnnnnnnnnnnnnnnnnnnnnnnnnnnnnnnnnnnnnnnnnnnnnnnnnnnnnnnnnnnnnnnnnnnnnnnnnnnnnnnnnnnnnnnnnnnnnnnnnnnnnnnnnnnnnnnnnnnnnnnnnnnnnnnnnnnnnnnnnnnnnnnnnnnnnnnnnnnnnnnnnnnnnnnnnnnnnnnnnnnnnnnnnnnnnnnnnnnnnnnnnnnnnnnnnnnnnnnnnnnnnnnnnnnnnnnnnnnnnnnnnnnnnnnnnnnnnnnnnnnnnnnnnnnnnnnnnnnnnnnnnnnnnnnnnnnnnnnnnnnnnnnnnnnnnnnnnnnnnnnnnnnnnnnnnnnnnnnnnnnnnnnnnnnnnnnnnnnnnnnnnnnnnnnnnnnnnnnnnnnnnnnnnnnnnnnnnnnnnnnnnnnnnnnnnnnnnnnnnnnnnnnnnnnnnnnnnnnnnnnnnnnnnnnnnnnnnnnnnnnnnnnnnnnnnnnnnnnnnnnnnnnnnnnnnnnnnnnnnnnnnnnnnnnnnnnnnnnnnnnnnnnnnnnnnnnnnnnnnnnnnnnnnnnnnnnnnnnnnnnnnnnnnnnnnnnnnnnnnnnnnnnnnnnnnnnnnnnnnnnnnnnnnnnnnnnnnnnnnnnnnnnnnnnnnnnnnnnnnnnnnnnnnnnnnnnnnnnnnnnnnnnnnnnnnnnnnnnnnnnnnnnnnnnnnnnnnnnnnnnnnnnnnnnnnnnnnnnnnnnnnnnnnnnnnnnnnnnnnnnnnnnnnnnnnnnnnnnnnnnnnnnnnnnnnnnnnnnnnnnnnnnnnnnnnnnnnnnnnnnnnnnnnnnnnnnnnnnnnnnnnnnnnnnnnnnnnnnnnnnnnnnnnnnnnnnnnnnnnnnnnnnnnnnnnnnnnnnnnnnnnnnnnnnnnnnnnnnnnnnnnnnnnnnnnnnnnnnnnnnnnnnnnnnnnnnnnnnnnnnnnnnnnnnnnnnnnnnnnnnnnnnnnnnnnnnnnnnnnnnnnnnnnnnnnnnnnnnnnnnnnnnnnnnnnnnnnnnnnnnnnnnnnnnnnnnnnnnnnnnnnnnnnnnnnnnnnnnnnnnnnnnnnnnnnnnnnnnnnnnnnnnnnnnnnnnnnnnnnnnnnnnnnnnnnnnnnnnnnnnnnnnnnnnnnnnnnnnnnnnnnnnnnnnnnnnnnnnnnnnnnnnnnnnnnnnnnnnnnnnnnnnnnnnnnnnnnnnnnnnnnnnnnnnnnnnnnnnnnnnnnnnnnnnnnnnnnnnnnnnnnnnnnnnnnnnnnnnnnnnnnnnnnnnnnnnnnnnnnnnnnnnnnnnnnnnnnnnnnnnnnnnnnnnnnnnnnnnnnnnnnnnnnnnnnnnnnnnnnnnnnnnnnnnnnnnnnnnnnnnnnnnnnnnnnnnnnnnnnnnnnnnnnnnnnnnnnnnnnnnnnnnnnnnnnnnnnnnnnnnnnnnnnnnnnnnnnnnnnnnnnnnnnnnnnnnnnnnnnnnnnnnnnnnnnnnnnnnnnnnnnnnnnnnnnnnnnnnnnnnnnnnnnnnnnnnnnnnnnnnnnnnnnnnnnnnnnnnnnnnnnnnnnnnnnnnnnnnnnnnnnnnnnnnnnnnnnnnnnnnnnnnnnnnnnnnnnnnnnnnnnnnnnnnnnnnnnnnnnnnnnnnnnnnnnnnnnnnnnnnnnnnnnnnnnnnnnnnnnnnnnnnnnnnnnnnnnnnnnnnnnnnnnnnnnnnnnnnnnnnnnnnnnnnnnnnnnnnnnnnnnnnnnnnnnnnnnnnnnnnnnnnnnnnnnnnnnnnnnnnnnnnnnnnnnnnnnnnnnnnnnnnnnnnnnnnnnnnnnnnnnnnnnnnnnnnnnnnnnnnnnnnnnnnnnnnnnnnnnnnnnnnnnnnnnnnnnnnnnnnnnnnnnnnnnnnnnnnnnnnnnnnnnnnnnnnnnnnnnnnnnnnnnnnnnnnnnnnnnnnnnnnnnnnnnnnnnnnnnnnnnnnnnnnnnnnnnnnnnnnnnnnnnnnnnnnnnnnnnnnnnnnnnnnnnnnnnnnnnnnnnnnnnnnnnnnnnnnnnnnnnnnnnnnnnnnnnnnnnnnnnnnnnnnnnnnnnnnnnnnnnnnnnnnnnnnnnnnnnnnnnnnnnnnnnnnnnnnnnnnnnnnnnnnnnnnnnnnnnnnnnnnnnnnnnnnnnnnnnnnnnnnnnnnnnnnnnnnnnnnnnnnnnnnnnnnnnnnnnnnnnnnnnnnnnnnnnnnnnnnnnnnnnnnnnnnnnnnnnnnnnnnnnnnnnnnnnnnnnnnnnnnnnnnnnnnnnnnnnnnnnnnnnnnnnnnnnnnnnnnnnnnnnnnnnnnnnnnnnnnnnnnnnnnnnnnnnnnnnnnnnnnnnnnnnnnnnnnnnnnnnnnnnnnnnnnnnnnnnnnnnnnnnnnnnnnnnnnnnnnnnnnnnnnnnnnnnnnnnnnnnnnnnnnnnnnnnnnnnnnnnnnnnnnnnnnnnnnnnnnnnnnnnnnnnnnnnnnnnnnnnnnnnnnnnnnnnnnnnnnnnnnnnnnnnnnnnnnnnnnnnnnnnnnnnnnnnnnnnnnnnnnnnnnnnnnnnnnnnnnnnnnnnnnnnnnnnnnnnnnnnnnnnnnnnnnnnnnnnnnnnnnnnnnnnnnnnnnnnnnnnnnnnnnnnnnnnnnnnnnnnnnnnnnnnnnnnnnnnnnnnnnnnnnnnnnnnnnnnnnnnnnnnnnnnnnnnnnnnnnnnnnnnnnnnnnnnnnnnnnnnnnnnnnnnnnnnnnnnnnnnnnnnnnnnnnnnnnnnnnnnnnnnnnnnnnnnnnnnnnnnnnnnnnnnnnnnnnnnnnnnnnnnnnnnnnnnnnnnnnnnnnnnnnnnnnnnnnnnnnnnnnnnnnnnnnnnnnnnnnnnnnnnnnnnnnnnnnnnnnnnnnnnnnnnnnnnnnnnnnnnnnnnnnnnnnnnnnnnnnnnnnnnnnnnnnnnnnnnnnnnnnnnnnnnnnnnnnnnnnnnnnnnnnnnnnnnnnnnnnnnnnnnnnnnnnnnnnnnnnnnnnnnnnnnnnnnnnnnnnnnnnnnnnnnnnnnnnnnnnnnnnnnnnnnnnnnnnnnnnnnnnnnnnnnnnnnnnnnnnnnnnnnnnnnnnnnnnnnnnnnnnnnnnnnnnnnnnnnnnnnnnnnnnnnnnnnnnnnnnnnnnnnnnnnnnnnnnnnnnnnnnnnnnnnnnnnnnnnnnnnnnnnnnnnnnnnnnnnnnnnnnnnnnnnnnnnnnnnnnnnnnnnnnnnnnnnnnnnnnnnnnnnnnnnnnnnnnnnnnnnnnnnnnnnnnnnnnnnnnnnnnnnnnnnnnnnnnnnnnnnnnnnnnnnnnnnnnnnnnnnnnnnnnnnnnnnnnnnnnnnnnnnnnnnnnnnnnnnnnnnnnnnnnnnnnnnnnnnnnnnnnnnnnnnnnnnnnnnnnnnnnnnnnnnnnnnnnnnnnnnnnnnnnnnnnnnnnnnnnnnnnnnnnnnnnnnnnnnnnnnnnnnnnnnnnnnnnnnnnnnnnnnnnnnnnnnnnnnnnnnnnnnnnnnnnnnnnnnnnnnnnnnnnnnnnnnnnnnnnnnnnnnnnnnnnnnnnnnnnnnnnnnnnnnnnnnnnnnnnnnnnnnnnnnnnnnnnnnnnnnnnnnnnnnnnnnnnnnnnnnnnnnnnnnnnnnnnnnnnnnnnnnnnnnnnnnnnnnnnnnnnnnnnnnnnnnnnnnnnnnnnnnnnnnnnnnnnnnnnnnnnnnnnnnnnnnnnnnnnnnnnnnnnnnnnnnnnnnnnnnnnnnnnnnnnnnnnnnnnnnnnnnnnnnnnnnnnnnnnnnnnnnnnnnnnnnnnnnnnnnnnnnnnnnnnnnnnnnnnnnnnnnnnnnnnnnnnnnnnnnnnnnnnnnnnnnnnnnnnnnnnnnnnnnnnnnnnnnnnnnnnnnnnnnnnnnnnnnnnnnnnnnnnnnnnnnnnnnnnnnnnnnnnnnnnnnnnnnnnnnnnnnnnnnnnnnnnnnnnnnnnnnnnnnnnnnnnnnnnnnnnnnnnnnnnnnnnnnnnnnnnnnnnnnnnnnnnnnnnnnnnnnnnnnnnnnnnnnnnnnnnnnnnnnnnnnnnnnnnnnnnnnnnnnnnnnnnnnnnnnnnnnnnnnnnnnnnnnnnnnnnnnnnnnnnnnnnnnnnnnnnnnnnnnnnnnnnnnnnnnnnnnnnnnnnnnnnnnnnnnnnnnnnnnnnnnnnnnnnnnnnnnnnnnnnnnnnnnnnnnnnnnnnnnnnnnnnnnnnnnnnnnnnnnnnnnnnnnnnnnnnnnnnnnnnnnnnnnnnnnnnnnnnnnnnnnnnnnnnnnnnnnnnnnnnnnnnnnnnnnnnnnnnnnnnnnnnnnnnnnnnnnnnnnnnnnnnnnnnnnnnnnnnnnnnnnnnnnnnnnnnnnnnnnnnnnnnnnnnnnnnnnnnnnnnnnnnnnnnnnnnnnnnnnnnnnnnnnnnnnnnnnnnnnnnnnnnnnnnnnnnnnnnnnnnnnnnnnnnnnnnnnnnnnnnnnnnnnnnnnnnnnnnnnnnnnnnnnnnnnnnnnnnnnnnnnnnnnnnnnnnnnnnnnnnnnnnnnnnnnnnnnnnnnnnnnnnnnnnnnnnnnnnnnnnnnnnnnnnnnnnnnnnnnnnnnnnnnnnnnnnnnnnnnnnnnnnnnnnnnnnnnnnnnnnnnnnnnnnnnnnnnnnnnnnnnnnnnnnnnnnnnnnnnnnnnnnnnnnnnnnnnnnnnnnnnnnnnnnnnnnnnnnnnnnnnnnnnnnnnnnnnnnnnnnnnnnnnnnnnnnnnnnnnnnnnnnnnnnnnnnnnnnnnnnnnnnnnnnnnnnnnnnnnnnnnnnnnnnnnnnnnnnnnnnnnnnnnnnnnnnnnnnnnnnnnnnnnnnnnnnnnnnnnnnnnnnnnnnnnnnnnnnnnnnnnnnnnnnnnnnnnnnnnnnnnnnnnnnnnnnnnnnnnnnnnnnnnnnnnnnnnnnnnnnnnnnnnnnnnnnnnnnnnnnnnnnnnnnnnnnnnnnnnnnnnnnnnnnnnnnnnnnnnnnnnnnnnnnnnnnnnnnnnnnnnnnnnnnnnnnnnnnnnnnnnnnnnnnnnnnnnnnnnnnnnnnnnnnnnnnnnnnnnnnnnnnnnnnnnnnnnnnnnnnnnnnnnnnnnnnnnnnnnnnnnnnnnnnnnnnnnnnnnnnnnnnnnnnnnnnnnnnnnnnnnnnnnnnnnnnnnnnnnnnnnnnnnnnnnnnnnnnnnnnnnnnnnnnnnnnnnnnnnnnnnnnnnnnnnnnnnnnnnnnnnnnnnnnnnnnnnnnnnnnnnnnnnnnnnnnnnnnnnnnnnnnnnnnnnnnnnnnnnnnnnnnnnnnnnnnnnnnnnnnnnnnnnnnnnnnnnnnnnnnnnnnnnnnnnnnnnnnnnnnnnnnnnnnnnnnnnnnnnnnnnnnnnnnnnnnnnnnnnnnnnnnnnnnnnnnnnnnnnnnnnnnnnnnnnnnnnnnnnnnnnnnnnnnnnnnnnnnnnnnnnnnnnnnnnnnnnnnnnnnnnnnnnnnnnnnnnnnnnnnnnnnnnnnnnnnnnnnnnnnnnnnnnnnnnnnnnnnnnnnnnnnnnnnnnnnnnnnnnnnnnnnnnnnnnnnnnnnnnnnnnnnnnnnnnnnnnnnnnnnnnnnnnnnnnnnnnnnnnnnnnnnnnnnnnnnnnnnnnnnnnnnnnnnnnnnnnnnnnnnnnnnnnnnnnnnnnnnnnnnnnnnnnnnnnnnnnnnnnnnnnnnnnnnnnnnnnnnnnnnnnnnnnnnnnnnnnnnnnnnnnnnnnnnnnnnnnnnnnnnnnnnnnnnnnnnnnnnnnnnnnnnnnnnnnnnnnnnnnnnnnnnnnnnnnnnnnnnnnnnnnnnnnnnnnnnnnnnnnnnnnnnnnnnnnnnnnnnnnnnnnnnnnnnnnnnnnnnnnnnnnnnnnnnnnnnnnnnnnnnnnnnnnnnnnnnnnnnnnnnnnnnnnnnnnnnnnnnnnnnnnnnnnnnnnnnnnnnnnnnnnnnnnnnnnnnnnnnnnnnnnnnnnnnnnnnnnnnnnnnnnnnnnnnnnnnnnnnnnnnnnnnnnnnnnnnnnnnnnnnnnnnnnnnnnnnnnnnnnnnnnnnnnnnnnnnnnnnnnnnnnnnnnnnnnnnnnnnnnnnnnnnnnnnnnnnnnnnnnnnnnnnnnnnnnnnnnnnnnnnnnnnnnnnnnnnnnnnnnnnnnnnnnnnnnnnnnnnnnnnnnnnnnnnnnnnnnnnnnnnnnnnnnnnnnnnnnnnnnnnnnnnnnnnnnnnnnnnnnnnnnnnnnnnnnnnnnnnnnnnnnnnnnnnnnnnnnnnnnnnnnnnnnnnnnnnnnnnnnnnnnnnnnnnnnnnnnnnnnnnnnnnnnnnnnnnnnnnnnnnnnnnnnnnnnnnnnnnnnnnnnnnnnnnnnnnnnnnnnnnnnnnnnnnnnnnnnnnnnnnnnnnnnnnnnnnnnnnnnnnnnnnnnnnnnnnnnnnnnnnnnnnnnnnnnnnnnnnnnnnnnnnnnnnnnnnnnnnnnnnnnnnnnnnnnnnnnnnnnnnnnnnnnnnnnnnnnnnnnnnnnnnnnnnnnnnnnnnnnnnnnnnnnnnnnnnnnnnnnnnnnnnnnnnnnnnnnnnnnnnnnnnnnnnnnnnnnnnnnnnnnnnnnnnnnnnnnnnnnnnnnnnnnnnnnnnnnnnnnnnnnnnnnnnnnnnnnnnnnnnnnnnnnnnnnnnnnnnnnnnnnnnnnnnnnnnnnnnnnnnnnnnnnnnnnnnnnnnnnnnnnnnnnnnnnnnnnnnnnnnnnnnnnnnnnnnnnnnnnnnnnnnnnnnnnnnnnnnnnnnnnnnnnnnnnnnnnnnnnnnnnnnnnnnnnnnnnnnnnnnnnnnnnnnnnnnnnnnnnnnnnnnnnnnnnnnnnnnnnnnnnnnnnnnnnnnnnnnnnnnnnnnnnnnnnnnnnnnnnnnnnnnnnnnnnnnnnnnnnnnnnnnnnnnnnnnnnnnnnnnnnnnnnnnnnnnnnnnnnnnnnnnnnnnnnnnnnnnnnnnnnnnnnnnnnnnnnnnnnnnnnnnnnnnnnnnnnnnnnnnnnnnnnnnnnnnnnnnnnnnnnnnnnnnnnnnnnnnnnnnnnnnnnnnnnnnnnnnnnnnnnnnnnnnnnnnnnnnnnnnnnnnnnnnnnnnnnnnnnnnnnnnnnnnnnnnnnnnnnnnnnnnnnnnnnnnnnnnnnnnnnnnnnnnnnnnnnnnnnnnnnnnnnnnnnnnnnnnnnnnnnnnnnnnnnnnnnnnnnnnnnnnnnnnnnnnnnnnnnnnnnnnnnnnnnnnnnnnnnnnnnnnnnnnnnnnnnnnnnnnnnnnnnnnnnnnnnnnnnnnnnnnnnnnnnnnnnnnnnnnnnnnnnnnnnnnnnnnnnnnnnnnnnnnnnnnnnnnnnnnnnnnnnnnnnnnnnnnnnnnnnnnnnnnnnnnnnnnnnnnnnnnnnnnnnnnnnnnnnnnnnnnnnnnnnnnnnnnnnnnnnnnnnnnnnnnnnnnnnnnnnnnnnnnnnnnnnnnnnnnnnnnnnnnnnnnnnnnnnnnnnnnnnnnnnnnnnnnnnnnnnnnnnnnnnnnnnnnnnnnnnnnnnnnnnnnnnnnnnnnnnnnnnnnnnnnnnnnnnnnnnnnnnnnnnnnnnnnnnnnnnnnnnnnnnnnnnnnnnnnnnnnnnnnnnnnnnnnnnnnnnnnnnnnnnnnnnnnnnnnnnnnnnnnnnnnnnnnnnnnnnnnnnnnnnnnnnnnnnnnnnnnnnnnnnnnnnnnnnnnnnnnnnnnnnnnnnnnnnnnnnnnnnnnnnnnnnnnnnnnnnnnnnnnnnnnnnnnnnnnnnnnnnnnnnnnnnnnnnnnnnnnnnnnnnnnnnnnnnnnnnnnnnnnnnnnnnnnnnnnnnnnnnnnnnnnnnnnnnnnnnnnnnnnnnnnnnnnnnnnnnnnnnnnnnnnnnnnnnnnnnnnnnnnnnnnnnnnnnnnnnnnnnnnnnnnnnnnnnnnnnnnnnnnnnnnnnnnnnnnnnnnnnnnnnnnnnnnnnnnnnnnnnnnnnnnnnnnnnnnnnnnnnnnnnnnnnnnnnnnnnnnnnnnnnnnnnnnnnnnnnnnnnnnnnnnnnnnnnnnnnnnnnnnnnnnnnnnnnnnnnnnnnnnnnnnnnnnnnnnnnnnnnnnnnnnnnnnnnnnnnnnnnnnnnnnnnnnnnnnnnnnnnnnnnnnnnnnnnnnnnnnnnnnnnnnnnnnnnnnnnnnnnnnnnnnnnnnnnnnnnnnnnnnnnnnnnnnnnnnnnnnnnnnnnnnnnnnnnnnnnnnnnnnnnnnnnnnnnnnnnnnnnnnnnnnnnnnnnnnnnnnnnnnnnnnnnnnnnnnnnnnnnnnnnnnnnnnnnnnnnnnnnnnnnnnnnnnnnnnnnnnnnnnnnnnnnnnnnnnnnnnnnnnnnnnnnnnnnnnnnnnnnnnnnnnnnnnnnnnnnnnnnnnnnnnnnnnnnnnnnnnnnnnnnnnnnnnnnnnnnnnnnnnnnnnnnnnnnnnnnnnnnnnnnnnnnnnnnnnnnnnnnnnnnnnnnnnnnnnnnnnnnnnnnnnnnnnnnnnnnnnnnnnnnnnnnnnnnnnnnnnnnnnnnnnnnnnnnnnnnnnnnnnnnnnnnnnnnnnnnnnnnnnnnnnnnnnnnnnnnnnnnnnnnnnnnnnnnnnnnnnnnnnnnnnnnnnnnnnnnnnnnnnnnnnnnnnnnnnnnnnnnnnnnnnnnnnnnnnnnnnnnnnnnnnnnnnnnnnnnnnnnnnnnnnnnnnnnnnnnnnnnnnnnnnnnnnnnnnnnnnnnnnnnnnnnnnnnnnnnnnnnnnnnnnnnnnnnnnnnnnnnnnnnnnnnnnnnnnnnnnnnnnnnnnnnnnnnnnnnnnnnnnnnnnnnnnnnnnnnnnnnnnnnnnnnnnnnnnnnnnnnnnnnnnnnnnnnnnnnnnnnnnnnnnnnnnnnnnnnnnnnnnnnnnnnnnnnnnnnnnnnnnnnnnnnnnnnnnnnnnnnnnnnnnnnnnnnnnnnnnnnnnnnnnnnnnnnnnnnnnnnnnnnnnnnnnnnnnnnnnnnnnnnnnnnnnnnnnnnnnnnnnnnnnnnnnnnnnnnnnnnnnnnnnnnnnnnnnnnnnnnnnnnnnnnnnnnnnnnnnnnnnnnnnnnnnnnnnnnnnnnnnnnnnnnnnnnnnnnnnnnnnnnnnnnnnnnnnnnnnnnnnnnnnnnnnnnnnnnnnnnnnnnnnnnnnnnnnnnnnnnnnnnnnnnnnnnnnnnnnnnnnnnnnnnnnnnnnnnnnnnnnnnnnnnnnnnnnnnnnnnnnnnnnnnnnnnnnnnnnnnnnnnnnnnnnnnnnnnnnnnnnnnnnnnnnnnnnnnnnnnnnnnnnnnnnnnnnnnnnnnnnnnnnnnnnnnnnnnnnnnnnnnnnnnnnnnnnnnnnnnnnnnnnnnnnnnnnnnnnnnnnnnnnnnnnnnnnnnnnnnnnnnnnnnnnnnnnnnnnnnnnnnnnnnnnnnnnnnnnnnnnnnnnnnnnnnnnnnnnnnnnnnnnnnnnnnnnnnnnnnnnnnnnnnnnnnnnnnnnnnnnnnnnnnnnnnnnnnnnnnnnnnnnnnnnnnnnnnnnnnnnnnnnnnnnnnnnnnnnnnnnnnnnnnnnnnnnnnnnnnnnnnnnnnnnnnnnnnnnnnnnnnnnnnnnnnnnnnnnnnnnnnnnnnnnnnnnnnnnnnnnnnnnnnnnnnnnnnnnnnnnnnnnnnnnnnnnnnnnnnnnnnnnnnnnnnnnnnnnnnnnnnnnnnnnnnnnnnnnnnnnnnnnnnnnnnnnnnnnnnnnnnnnnnnnnnnnnnnnnnnnnnnnnnnnnnnnnnnnnnnnnnnnnnnnnnnnnnnnnnnnnnnnnnnnnnnnnnnnnnnnnnnnnnnnnnnnnnnnnnnnnnnnnnnnnnnnnnnnnnnnnnnnnnnnnnnnnnnnnnnnnnnnnnnnnnnnnnnnnnnnnnnnnnnnnnnnnnnnnnnnnnnnnnnnnnnnnnnnnnnnnnnnnnnnnnnnnnnnnnnnnnnnnnnnnnnnnnnnnnnnnnnnnnnnnnnnnnnnnnnnnnnnnnnnnnnnnnnnnnnnnnnnnnnnnnnnnnnnnnnnnnnnnnnnnnnnnnnnnnnnnnnnnnnnnnnnnnnnnnnnnnnnnnnnnnnnnnnnnnnnnnnnnnnnnnnnnnnnnnnnnnnnnnnnnnnnnnnnnnnnnnnnnnnnnnnnnnnnnnnnnnnnnnnnnnnnnnnnnnnnnnnnnnnnnnnnnnnnnnnnnnnnnnnnnnnnnnnnnnnnnnnnnnnnnnnnnnnnnnnnnnnnnnnnnnnnnnnnnnnnnnnnnnnnnnnnnnnnnnnnnnnnnnnnnnnnnnnnnnnnnnnnnnnnnnnnnnnnnnnnnnnnnnnnnnnnnnnnnnnnnnnnnnnnnnnnnnnnnnnnnnnnnnnnnnnnnnnnnnnnnnnnnnnnnnnnnnnnnnnnnnnnnnnnnnnnnnnnnnnnnnnnnnnnnnnnnnnnnnnnnnnnnnnnnnnnnnnnnnnnnnnnnnnnnnnnnnnnnnnnnnnnnnnnnnnnnnnnnnnnnnnnnnnnnnnnnnnnnnnnnnnnnnnnnnnnnnnnnnnnnnnnnnnnnnnnnnnnnnnnnnnnnnnnnnnnnnnnnnnnnnnnnnnnnnnnnnnnnnnnnnnnnnnnnnnnnnnnnnnnnnnnnnnnnnnnnnnnnnnnnnnnnnnnnnnnnnnnnnnnnnnnnnnnnnnnnnnnnnnnnnnnnnnnnnnnnnnnnnnnnnnnnnnnnnnnnnnnnnnnnnnnnnnnnnnnnnnnnnnnnnnnnnnnnnnnnnnnnnnnnnnnnnnnnnnnnnnnnnnnnnnnnnnnnnnnnnnnnnnnnnnnnnnnnnnnnnnnnnnnnnnnnnnnnnnnnnnnnnnnnnnnnnnnnnnnnnnnnnnnnnnnnnnnnnnnnnnnnnnnnnnnnnnnnnnnnnnnnnnnnnnnnnnnnnnnnnnnnnnnnnnnnnnnnnnnnnnnnnnnnnnnnnnnnnnnnnnnnnnnnnnnnnnnnnnnnnnnnnnnnnnnnnnnnnnnnnnnnnnnnnnnnnnnnnnnnnnnnnnnnnnnnnnnnnnnnnnnnnnnnnnnnnnnnnnnnnnnnnnnnnnnnnnnnnnnnnnnnnnnnnnnnnnnnnnnnnnnnnnnnnnnnnnnnnnnnnnnnnnnnnnnnnnnnnnnnnnnnnnnnnnnnnnnnnnnnnnnnnnnnnnnnnnnnnnnnnnnnnnnnnnnnnnnnnnnnnnnnnnnnnnnnnnnnnnnnnnnnnnnnnnnnnnnnnnnnnnnnnnnnnnnnnnnnnnnnnnnnnnnnnnnnnnnnnnnnnnnnnnnnnnnnnnnnnnnnnnnnnnnnnnnnnnnnnnnnnnnnnnnnnnnnnnnnnnnnnnnnnnnnnnnnnnnnnnnnnnnnnnnnnnnnnnnnnnnnnnnnnnnnnnnnnnnnnnnnnnnnnnnnnnnnnnnnnnnnnnnnnnnnnnnnnnnnnnnnnnnnnnnnnnnnnnnnnnnnnnnnnnnnnnnnnnnnnnnnnnnnnnnnnnnnnnnnnnnnnnnnnnnnnnnnnnnnnnnnnnnnnnnnnnnnnnnnnnnnnnnnnnnnnnnnnnnnnnnnnnnnnnnnnnnnnnnnnnnnnnnnnnnnnnnnnnnnnnnnnnnnnnnnnnnnnnnnnnnnnnnnnnnnnnnnnnnnnnnnnnnnnnnnnnnnnnnnnnnnnnnnnnnnnnnnnnnnnnnnnnnnnnnnnnnnnnnnnnnnnnnnnnnnnnnnnnnnnnnnnnnnnnnnnnnnnnnnnnnnnnnnnnnnnnnnnnnnnnnnnnnnnnnnnnnnnnnnnnnnnnnnnnnnnnnnnnnnnnnnnnnnnnnnnnnnnnnnnnnnnnnnnnnnnnnnnnnnnnnnnnnnnnnnnnnnnnnnnnnnnnnnnnnnnnnnnnnnnnnnnnnnnnnnnnnnnnnnnnnnnnnnnnnnnnnnnnnnnnnnnnnnnnnnnnnnnnnnnnnnnnnnnnnnnnnnnnnnnnnnnnnnnnnnnnnnnnnnnnnnnnnnnnnnnnnnnnnnnnnnnnnnnnnnnnnnnnnnnnnnnnnnnnnnnnnnnnnnnnnnnnnnnnnnnnnnnnnnnnnnnnnnnnnnnnnnnnnnnnnnnnnnnnnnnnnnnnnnnnnnnnnnnnnnnnnnnnnnnnnnnnnnnnnnnnnnnnnnnnnnnnnnnnnnnnnnnnnnnnnnnnnnnnnnnnnnnnnnnnnnnnnnnnnnnnnnnnnnnnnnnnnnnnnnnnnnnnnnnnnnnnnnnnnnnnnnnnnnnnnnnnnnnnnnnnnnnnnnnnnnnnnnnnnnnnnnnnnnnnnnnnnnnnnnnnnnnnnnnnnnnnnnnnnnnnnnnnnnnnnnnnnnnnnnnnnnnnnnnnnnnnnnnnnnnnnnnnnnnnnnnnnnnnnnnnnnnnnnnnnnnnnnnnnnnnnnnnnnnnnnnnnnnnnnnnnnnnnnnnnnnnnnnnnnnnnnnnnnnnnnnnnnnnnnnnnnnnnnnnnnnnnnnnnnnnnnnnnnnnnnnnnnnnnnnnnnnnnnnnnnnnnnnnnnnnnnnnnnnnnnnnnnnnnnnnnnnnnnnnnnnnnnnnnnnnnnnnnnnnnnnnnnnnnnnnnnnnnnnnnnnnnnnnnnnnnnnnnnnnnnnnnnnnnnnnnnnnnnnnnnnnnnnnnnnnnnnnnnnnnnnnnnnnnnnnnnnnnnnnnnnnnnnnnnnnnnnnnnnnnnnnnnnnnnnnnnnnnnnnnnnnnnnnnnnnnnnnnnnnnnnnnnnnnnnnnnnnnnnnnnnnnnnnnnnnnnnnnnnnnnnnnnnnnnnnnnnnnnnnnnnnnnnnnnnnnnnnnnnnnnnnnnnnnnnnnnnnnnnnnnnnnnnnnnnnnnnnnnnnnnnnnnnnnnnnnnnnnnnnnnnnnnnnnnnnnnnnnnnnnnnnnnnnnnnnnnnnnnnnnnnnnnnnnnnnnnnnnnnnnnnnnnnnnnnnnnnnnnnnnnnnnnnnnnnnnnnnnnnnnnnnnnnnnnnnnnnnnnnnnnnnnnnnnnnnnnnnnnnnnnnnnnnnnnnnnnnnnnnnnnnnnnnnnnnnnnnnnnnnnnnnnnnnnnnnnnnnnnnnnnnnnnnnnnnnnnnnnnnnnnnnnnnnnnnnnnnnnnnnnnnnnnnnnnnnnnnnnnnnnnnnnnnnnnnnnnnnnnnnnnnnnnnnnnnnnnnnnnnnnnnnnnnnnnnnnnnnnnnnnnnnnnnnnnnnnnnnnnnnnnnnnnnnnnnnnnnnnnnnnnnnnnnnnnnnnnnnnnnnnnnnnnnnnnnnnnnnnnnnnnnnnnnnnnnnnnnnnnnnnnnnnnnnnnnnnnnnnnnnnnnnnnnnnnnnnnnnnnnnnnnnnnnnnnnnnnnnnnnnnnnnnnnnnnnnnnnnnnnnnnnnnnnnnnnnnnnnnnnnnnnnnnnnnnnnnnnnnnnnnnnnnnnnnnnnnnnnnnnnnnnnnnnnnnnnnnnnnnnnnnnnnnnnnnnnnnnnnnnnnnnnnnnnnnnnnnnnnnnnnnnnnnnnnnnnnnnnnnnnnnnnnnnnnnnnnnnnnnnnnnnnnnnnnnnnnnnnnnnnnnnnnnnnnnnnnnnnnnnnnnnnnnnnnnnnnnnnnnnnnnnnnnnnnnnnnnnnnnnnnnnnnnnnnnnnnnnnnnnnnnnnnnnnnnnnnnnnnnnnnnnnnnnnnnnnnnnnnnnnnnnnnnnnnnnnnnnnnnnnnnnnnnnnnnnnnnnnnnnnnnnnnnnnnnnnnnnnnnnnnnnnnnnnnnnnnnnnnnnnnnnnnnnnnnnnnnnnnnnnnnnnnnnnnnnnnnnnnnnnnnnnnnnnnnnnnnnnnnnnnnnnnnnnnnnnnnnnnnnnnnnnnnnnnnnnnnnnnnnnnnnnnnnnnnnnnnnnnnnnnnnnnnnnnnnnnnnnnnnnnnnnnnnnnnnnnnnnnnnnnnnnnnnnnnnnnnnnnnnnnnnnnnnnnnnnnnnnnnnnnnnnnnnnnnnnnnnnnnnnnnnnnnnnnnnnnnnnnnnnnnnnnnnnnnnnnnnnnnnnnnnnnnnnnnnnnnnnnnnnnnnnnnnnnnnnnnnnnnnnnnnnnnnnnnnnnnnnnnnnnnnnnnnnnnnnnnnnnnnnnnnnnnnnnnnnnnnnnnnnnnnnnnnnnnnnnnnnnnnnnnnnnnnnnnnnnnnnnnnnnnnnnnnnnnnnnnnnnnnnnnnnnnnnnnnnnnnnnnnnnnnnnnnnnnnnnnnnnnnnnnnnnnnnnnnnnnnnnnnnnnnnnnnnnnnnnnnnnnnnnnnnnnnnnnnnnnnnnnnnnnnnnnnnnnnnnnnnnnnnnnnnnnnnnnnnnnnnnnnnnnnnnnnnnnnnnnnnnnnnnnnnnnnnnnnnnnnnnnnnnnnnnnnnnnnnnnnnnnnnnnnnnnnnnnnnnnnnnnnnnnnnnnnnnnnnnnnnnnnnnnnnnnnnnnnnnnnnnnnnnnnnnnnnnnnnnnnnnnnnnnnnnnnnnnnnnnnnnnnnnnnnnnnnnnnnnnnnnnnnnnnnnnnnnnnnnnnnnnnnnnnnnnnnnnnnnnnnnnnnnnnnnnnnnnnnnnnnnnnnnnnnnnnnnnnnnnnnnnnnnnnnnnnnnnnnnnnnnnnnnnnnnnnnnnnnnnnnnnnnnnnnnnnnnnnnnnnnnnnnnnnnnnnnnnnnnnnnnnnnnnnnnnnnnnnnnnnnnnnnnnnnnnnnnnnnnnnnnnnnnnnnnnnnnnnnnnnnnnnnnnnnnnnnnnnnnnnnnnnnnnnnnnnnnnnnnnnnnnnnnnnnnnnnnnnnnnnnnnnnnnnnnnnnnnnnnnnnnnnnnnnnnnnnnnnnnnnnnnnnnnnnnnnnnnnnnnnnnnnnnnnnnnnnnnnnnnnnnnnnnnnnnnnnnnnnnnnnnnnnnnnnnnnnnnnnnnnnnnnnnnnnnnnnnnnnnnnnnnnnnnnnnnnnnnnnnnnnnnnnnnnnnnnnnnnnnnnnnnnnnnnnnnnnnnnnnnnnnnnnnnnnnnnnnnnnnnnnnnnnnnnnnnnnnnnnnnnnnnnnnnnnnnnnnnnnnnnnnnnnnnnnnnnnnnnnnnnnnnnnnnnnnnnnnnnnnnnnnnnnnnnnnnnnnnnnnnnnnnnnnnnnnnnnnnnnnnnnnnnnnnnnnnnnnnnnnnnnnnnnnnnnnnnnnnnnnnnnnnnnnnnnnnnnnnnnnnnnnnnnnnnnnnnnnnnnnnnnnnnnnnnnnnnnnnnnnnnnnnnnnnnnnnnnnnnnnnnnnnnnnnnnnnnnnnnnnnnnnnnnnnnnnnnnnnnnnnnnnnnnnnnnnnnnnnnnnnnnnnnnnnnnnnnnnnnnnnnnnnnnnnnnnnnnnnnnnnnnnnnnnnnnnnnnnnnnnnnnnnnnnnnnnnnnnnnnnnnnnnnnnnnnnnnnnnnnnnnnnnnnnnnnnnnnnnnnnnnnnnnnnnnnnnnnnnnnnnnnnnnnnnnnnnnnnnnnnnnnnnnnnnnnnnnnnnnnnnnnnnnnnnnnnnnnnnnnnnnnnnnnnnnnnnnnnnnnnnnnnnnnnnnnnnnnnnnnnnnnnnnnnnnnnnnnnnnnnnnnnnnnnnnnnnnnnnnnnnnnnnnnnnnnnnnnnnnnnnnnnnnnnnnnnnnnnnnnnnnnnnnnnnnnnnnnnnnnnnnnnnnnnnnnnnnnnnnnnnnnnnnnnnnnnnnnnnnnnnnnnnnnnnnnnnnnnnnnnnnnnnnnnnnnnnnnnnnnnnnnnnnnnnnnnnnnnnnnnnnnnnnnnnnnnnnnnnnnnnnnnnnnnnnnnnnnnnnnnnnnnnnnnnnnnnnnnnnnnnnnnnnnnnnnnnnnnnnnnnnnnnnnnnnnnnnnnnnnnnnnnnnnnnnnnnnnnnnnnnnnnnnnnnnnnnnnnnnnnnnnnnnnnnnnnnnnnnnnnnnnnnnnnnnnnnnnnnnnnnnnnnnnnnnnnnnnnnnnnnnnnnnnnnnnnnnnnnnnnnnnnnnnnnnnnnnnnnnnnnnnnnnnnnnnnnnnnnnnnnnnnnnnnnnnnnnnnnnnnnnnnnnnnnnnnnnnnnnnnnnnnnnnnnnnnnnnnnnnnnnnnnnnnnnnnnnnnnnnnnnnnnnnnnnnnnnnnnnnnnnnnnnnnnnnnnnnnnnnnnnnnnnnnnnnnnnnnnnnnnnnnnnnnnnnnnnnnnnnnnnnnnnnnnnnnnnnnnnnnnnnnnnnnnnnnnnnnnnnnnnnnnnnnnnnnnnnnnnnnnnnnnnnnnnnnnnnnnnnnnnnnnnnnnnnnnnnnnnnnnnnnnnnnnnnnnnnnnnnnnnnnnnnnnnnnnnnnnnnnnnnnnnnnnnnnnnnnnnnnnnnnnnnnnnnnnnnnnnnnnnnnnnnnnnnnnnnnnnnnnnnnnnnnnnnnnnnnnnnnnnnnnnnnnnnnnnnnnnnnnnnnnnnnnnnnnnnnnnnnnnnnnnnnnnnnnnnnnnnnnnnnnnnnnnnnnnnnnnnnnnnnnnnnnnnnnnnnnnnnnnnnnnnnnnnnnnnnnnnnnnnnnnnnnnnnnnnnnnnnnnnnnnnnnnnnnnnnnnnnnnnnnnnnnnnnnnnnnnnnnnnnnnnnnnnnnnnnnnnnnnnnnnnnnnnnnnnnnnnnnnnnnnnnnnnnnnnnnnnnnnnnnnnnnnnnnnnnnnnnnnnnnnnnnnnnnnnnnnnnnnnnnnnnnnnnnnnnnnnnnnnnnnnnnnnnnnnnnnnnnnnnnnnnnnnnnnnnnnnnnnnnnnnnnnnnnnnnnnnnnnnnnnnnnnnnnnnnnnnnnnnnnnnnnnnnnnnnnnnnnnnnnnnnnnnnnnnnnnnnnnnnnnnnnnnnnnnnnnnnnnnnnnnnnnnnnnnnnnnnnnnnnnnnnnnnnnnnnnnnnnnnnnnnnnnnnnnnnnnnnnnnnnnnnnnnnnnnnnnnnnnnnnnnnnnnnnnnnnnnnnnnnnnnnnnnnnnnnnnnnnnnnnnnnnnnnnnnnnnnnnnnnnnnnnnnnnnnnnnnnnnnnnnnnnnnnnnnnnnnnnnnnnnnnnnnnnnnnnnnnnnnnnnnnnnnnnnnnnnnnnnnnnnnnnnnnnnnnnnnnnnnnnnnnnnnnnnnnnnnnnnnnnnnnnnnnnnnnnnnnnnnnnnnnnnnnnnnnnnnnnnnnnnnnnnnnnnnnnnnnnnnnnnnnnnnnnnnnnnnnnnnnnnnnnnnnnnnnnnnnnnnnnnnnnnnnnnnnnnnnnnnnnnnnnnnnnnnnnnnnnnnnnnnnnnnnnnnnnnnnnnnnnnnnnnnnnnnnnnnnnnnnnnnnnnnnnnnnnnnnnnnnnnnnnnnnnnnnnnnnnnnnnnnnnnnnnnnnnnnnnnnnnnnnnnnnnnnnnnnnnnnnnnnnnnnnnnnnnnnnnnnnnnnnnnnnnnnnnnnnnnnnnnnnnnnnnnnnnnnnnnnnnnnnnnnnnnnnnnnnnnnnnnnnnnnnnnnnnnnnnnnnnnnnnnnnnnnnnnnnnnnnnnnnnnnnnnnnnnnnnnnnnnnnnnnnnnnnnnnnnnnnnnnnnnnnnnnnnnnnnnnnnnnnnnnnnnnnnnnnnnnnnnnnnnnnnnnnnnnnnnnnnnnnnnnnnnnnnnnnnnnnnnnnnnnnnnnnnnnnnnnnnnnnnnnnnnnnnnnnnnnnnnnnnnnnnnnnnnnnnnnnnnnnnnnnnnnnnnnnnnnnnnnnnnnnnnnnnnnnnnnnnnnnnnnnnnnnnnnnnnnnnnnnnnnnnnnnnnnnnnnnnnnnnnnnnnnnnnnnnnnnnnnnnnnnnnnnnnnnnnnnnnnnnnnnnnnnnnnnnnnnnnnnnnnnnnnnnnnnnnnnnnnnnnnnnnnnnnnnnnnnnnnnnnnnnnnnnnnnnnnnnnnnnnnnnnnnnnnnnnnnnnnnnnnnnnnnnnnnnnnnnnnnnnnnnnnnnnnnnnnnnnnnnnnnnnnnnnnnnnnnngctgtctccagtggcgtctacttctacaagatgagcgctggcaaatacagcagcaccaaaaagatgatcatgatgaagtaattcatcgggatataacctataaccaagccccgggaccgaaaggttccggggctttttctactctcctgaaaagaacgtggatgacaggatcgactggatctttgaaggtggaaaggtgaaaaggtggaatggtggaaaggttcccccgaaacaagtccaccaggctatatactgtgtcatcacgagtggggtggcaaagtccgtttgccacagagaccggaggtctctcccaaaaaggcaactccgttgcctctgccgaacagacttcggcagcccttaagttatctgcgtatatctgcgtgaaccgcgtgaaccacttgaaccttgattctgtcttttcaagtcccaaacaagcacccagaccaaaaacaaccggcatcaattatttgacaatcgcattaaatatccaacacattccgcaatatgcttcatagcgccgtcccttgctgctactggctttggagtcatcatccttaggtcatccctcaccgggttaaggatgactgccggatgacccacgccggagaggggaatgcaaatgaggcccatccctctataatatataggtgctacgataggtggaaaggaggacttcgtggtgacgtggtgtcgtggtaacgtggtgctgtcggaaaagagatagaacgcggatgacaggatcgactggatctttgagagtggaaaggtgaaaaggtggaatggaggaaagtttcccccgaaacaagtccaccatgctatatactgtgtcatcatgagtggggtggcaaagtccgtttgccacagagaccggaggtctctcccaaaaaggcaactccgttgcctctgccgaacagacttcggcagccctggtccgaaacctccccccataatactaatccgcgctcatctgcgcctttatccgcgtatatcagcgtgaaccgcttgacccgggatccagtcaccccagaggagccacccccgtttcccgcctgttcagcgtgcagacagcagtcgtgtcaggaaagcttgtccagttcttcgcggacgtttttgcagcggggatagtctttgccgaaggtgttttcccagatgctcagcaccctggtcagcagttcccgggcggtgttcgtgtcgccctgtctggcacgcagcctggccagagagaagaggtaatgggctgtctgggaatggttttcgccatagtggagggtatggccgtctatcgcctgcttgagcaatggttccgcttcttccaggcgtccctggcgcagtagcacactgcccagatttccggcgcagaccgccgtaaaccagtgtccatcagggaaaaggctttccatcatttccagcgcggcgcggagcatctcctcggctttatccggcctgtccatcaaactgtaaagcgaagcgaggttgttcatgcggtctgccacgttggagctgggcccggggcgtttttcgatattcagcgagcggcgcagcagtttttcagcctgctcgtagcggccggtatctttgtaaaagcgtcccaggttgttcagatagggggagaggcgggggctgcgtggcccgagctggcgggttctggcctccaccaccttcagatagagcggctcggcatcgtccatgcggtgcatatagtgatagagcagggccagatggaagagccgttcgatgtgttccgggctgtccccgccccaggcctggcaggacaactcggctgccagcagcatacattcctcaatcttggccagcagcatgcggtcccagaagtaatcggccgccatctcatagtaatgggcggcttttttgagttccccggcggctttgaagtggcgggcgatctccgcggaatgctccttgagtgcctgttcaaagacggtttccatggcttcggcggccgccaggtgcagttttttaagctccttttcgcggatgctggcatagaccgccttctgtaacaggctgtgggaaaagatgtaaaagagttcatcggcatcctgccagattttccgtccccccgctttgcccagttgctggatggggttgccttcgagcatgtgggagaggaggacaacattgaagcggaagcccagcacactggcgccgcggacgctttcctgaacctttttggagagccgggcaatgcgccgggaaatcacctcgtcgatgcctcccgccgccgcttccaagccctcttgcgctatttcgccgtggggactgagcagcttgttttccagcagataagcggcaagctgttcggcattgaaaggattgccgcccgcgcaggcgtggaaagcggaaaaggcctcgcggggcaggcggggaaggcccagcagattgaggtagagcttgcggctggcgctggagttgagggagcccagggcgaggctctccaagccatcttttttgacggcaagctccgcgggcagcctgcccttttccgtccgggcggtagccagcagaaagagcgggcgcacgccgtgttgccacagcagttccaggaattgacggctcaggggatcgagccattggacatcgtcaataaagataagcacaggggatttggcgcacagccagcgcaggtaatccagccaggcctgctgctgacggggcagcctggcttcgggggcgatcccgcgccagggcgagccatcccaggagagattcagcagcgaggcgagggcggcttcgcaatcctgtcccagcgaggaaccgcgggtgcgcttttgccacgcttcgcggaaatgctgcaccgcctgcgcgggagcctcatcctccaaaagccccaaactggcacgcagcaactgggatacgatatccagagggaggggggaatcctgcctgcaagccagcagatacacctgccgccggggagtctcgaaggcgcgcaaagcttcgcgtgccaacctgcttttgcccactcccgccgttccatgcaccaccatcgcctggggcgaggaggccgccaaaccatcgcgtatcctgctatgcagcagagcggtctccttctccctgccaatcatgcaaagcggttgtccggtgatcagttgccccggcagcatgcccagacggtaggcgcggggcgcggcttttgaggcggctttttcccttttgaggggggtgaagatgaaggagttgtgctgctggttgcgcagcttgtggtcggcgagggcttcgccggggcgggcaagctccaggagcttctgggcgcgggtgatggcttcgcccgggaagaaggttgccttccacaggtctttgccggcagccatggaaaagatgtagccggtgcagcaggcggcgcgggctttgtggcgcgtggcagcttccaaagccaggcggcaggcgcgctgcattttgttgaccttgttgtgggggaaatcgaagagcaggatggcatgcagccgcttgtgccgcacatagatggctgccaaaaaggcgtcgtagatcaccgccagcagttccagcgcctggatggttggctccagggggccgtccggaggctcgtccaggctgaggcagcagcaaacgctgtgccggacgtcagccgcgggattgagtctgtgaaagcgggaatgaatgaagtggtggccgtgttgcttgcccaagcgcttcctttccggaatatcaggcaactggggaaagggcggatgctcggcaagtttgccaggcctggcatccaactcccagcccagtctgttcaatgcctggggagagtaataaggttggttgggctggccggggttttcacgcaggacatccagttggggagaccagaacacatattcaaactggagggggttctcaaagatgcgccaggacagggtgccaaaacccacggccaggcggattacattcggcattccatgatgggggctggcgtagctgttgatcgcgccgatagtgtgattgatgcgtgccagcagtgccgcgatcagcaccggagtgctttccggcaacagggcgtggatgcagtttccctcatactggaagagcagtccgcctgcgttcctgatcaggctcagcagcctttcataggcttcggtgaaagttgcttccatcctgtcaatcacctgccgccgctgcttgagccttactcctttgatattgtaagtggcaacggtgcaaaagcgcaggatatagccggtgatctgcccctgcaggatgttttgctcatactgctgcaggatgtagctgggcaccacgcggttcatatctggctacctgccttgcctggcttaactataatctcctttctgcctacttatcccccaggctcagattggcgaaggcggtgagggtgatctccgcgtccgcgctttccagatagctgacgcgtgcccggtcgcccgcgcgggtgatgggcagacggctgctcaggttgctggaggcgataaagattatatccggcgcttcggtcagggtaaggtagtagtaggtgcgtccatccgtggtgtccgagccaaagcgggcgatggagcctgtgagggtggcctgcttgtccgctgcctccggggatatccccatccggcttccggccagggccatctgatagttgtcgcgcgcgctgcgcacgctttcacccactcccaccagggaaaagtcgcgcactgaaacgaagctgaacatcttgattagcccggcgctgtccttgagggtcataaaataggtcggcttgccgttcatgttcaccaggatggggaaggtggcatagtatttgaagttttgcaccttgccttcggcggagcgcatggcggcagtctcggtggcaccggagaccaggtagaggtggctgcttttggtgcgggtgtccgtgagcgcaaagcccaccgttccctcgtccgaacccacgctggtgaggccggagtagaaatagctgcgctgatcgcggccatagatcacgttgtaaccgggcgtcacccgcagcaggtcgcgtttgccgaacacgctgttccaaaagccgtgcacatatttgccccaccaggaaagctggggaagcacaaagtaggagggctggatgcggtcaacccaggcgggaatcttgctgtcgtcatagatgccgccgctttttttgaggggaaagtatttgatctcacccgtgccggcatgcacgatggcgagtccggtggcttccggggcactcactccgatcttgtgggtgtaggtggtgatggtccagtagggttcgccattgtcgtccagttcaaaggtatcgcctgccaggccgatgcccgcgaagccgttccaccagagatggcggtagaggtcttgtccaaagtaggcgttgcgctgatagcggatttggatgggtttgcctttcagctcgcgcacaaaggtgatatcctgcggattggtggccgagaccttgatgtagcccggggtgcctttgcttgtgttggtgatccacttccagaagccgctgtgcagcaggggacagacccagaaaagcttgccatccaccatctggatggtcgggttgccgagcaccacccggctgccgagggcgaagtcctcgcccagtttcttggctgccaaatccttggcgaaagcggaatccaggatcggcacctgatccagattgaccggcgccaccaggtcggaaaactcggtcttttccacctcgccgatcatgcggcggtagctgccggaattgaagatgccggaagagaagaagggcgccaagatcagccacagcgccagaaggggatagaccacatagaggatcttgcgcaggcgccggattgccagcagcggagccaggcagatcatcagggggacgatccagtccaaaaagcggatatgcagcaccggaagcacaaagtaaagcataaaacccagcagcaggacggacagcactacggccggcagggctttgatcctgaacttgggaaacttgatcacgacaggttttggcgtttgttgttgcatcatttgaacctccctgaactaagctttgtttttatactctaccagatggcggcggatttgtcaagccggaatcgcggcccgcctccaatacagaatggaaaaaagtggactcggctcgaagaccgctcctatccttgcggatacagaggcgcgaccgcccgctcaaacactccctgaaccttggaaatggccagcccgtaattggtgatcggcactccgcgccgctgggcttccacgatgcggcggctcatctccatctggttgagcatgcaggctccgcagtggatcaccagcgcgaagtcctccagattgggcggaaagtcgtgtcccgcgtacacttcatataccagttccttgcccgtgaactggctcagccagcgcggaatcttcacccgtccgatgtcatccgcctgcacgtggtgggaacaggcttcggcgatcaggatcttgtcgccgtcgcgcagcttgtcgatctgcctcaccccttccgccaggacgtccagatcgcctttgtagcgggcaaagaggatggaaaaggtggtcatcttcacctctgggggcaggtcattcaccaccttcagcaccacctgcgaatccgtgatcaccagatcaggcggttccttcagggtttgcagggcataggccagttcccgctctttcaccaccgtcaccaccgcgtcgtgatccagcagttcgcgaatcacctgcacctgcggcaggatcaggcgtcccttgggcgcggcgaggtcgatgggagtcaccagcagcaccctgtccccggccttcaccaagtcacccgccagggggcgctcctccagcagatgggcgggcgccagcttgatcagcagttccttggcggcatcgatgttttcccccttgagggcggagacggagacccagggcagtccccgttcctcgcaccaggcgatattggcgggggcaggctcgcgcaaatccctgtggttaaagaccattaacagcggtatcttcatctcgcggatgcgtttcagggaggacagctcgctctccgcgaaggggcggccatcgttcacaaacacggctatgtccgtgcggtaaagtatcttataggtggcgagtacccgtttttcgcccagttcgccgctgtcgtccagtccagcggtgtcaaagaaggtcaccgggcccaggggcagaagttcatagcgtttgtccaccgggtctgtggtggtgcccggggtgctggaaacgatggctatctcctgtcctgccagggcgttgatcaaggacgattttccagcgttgcggttacccagcagggtgatgtttacgcgttctccgcggggtgtgctcatctatcttctcccaaaaagtcttgcggcttgcggccgctaatagcttttattatcagttctttcatgtttctttccttgtcggactggataccagcccatgtaaaaataatatatgtgaaaagcgcgaatctgtcaagcaaagagaattctggcagacaggggcctgtgtttttgatatatccacaaattacacaaattaacacggattaaaagaacagaataaggacaagtgtccagcctaaaaacaacaaccagaccctgaaacaaaccgccaccaagccctaaagccgtgtcatcccgggctgtcggggtcaccgccaaagcgcgaagcggtttggtggggtggcttgacccgggatccagtcttttaaaaacaaccagcaagccccgaaacaaagcacaacagactaaaaaccgtgtcatcccgggctgtcggggtccccgccaaagcgcgaagcggtttggtggggtggcttgacccgggatccagtcttttagaaacaaacgcgtaaggttttaaaaaagcaggcacctttccacctcaaaacacctttccacaaattctccccccatatatataggtgctacgaccccttcatgccaggcgggaagcggatcccagggcaagtatatatatacttgcccgtaattgcgcggccatgggctggctgccctccctttcccctcgcgcgcgggtggctctcatttgcatccagcgttttggcgtgagtcttccttaggtcatccttataatttataaggttgacctaaggatgatggcatcaaatccagtagcagcaaaggagggcggtatgaaggattatgcggaaggttgtggtatttttgtggaaaggtggaaaggtgcccccgaaacaagtccaccaagttatattttgtgtcatcacgggaagtcggggccccctctggggtggcttacccgtgatccagtctttttaaaagaaacatccacaaattacacaaattaacacgaattaaaagaacattaaagagtcaacacacccgactccggaacaaaaccctccagactaaaaaccgtgtcatcacagcctgcgagccgtgatccagtgcccaggtgtggcaaagtccgtttgccacagagaccggaggtctcttccaaacaggcaactccgttgcctctgccgaacggacttcggcaacccttatattacaccaatccgtgtcaatctgcgccctttatccgcgtttatctgcgtgaaccgtggaacccgggatccagtcttttggaatgtttgaacttcgctgaaaacatttttcgctaccaggaatgaaaactggacaacaaacgcagcttgggatatctgacactaagagtgtaattcacacgatcaataagaacatagcgtgctgtgcatacaaaacatattaccgacggacttctgttctgaaatatggacgttttgaacttggtaaacagtccgtatatggactaccagctgggacttgccattaggcatatgcccgaatgtaaagctatattcttatataacgcattgtagacagcacaggttgttctctgctctttccatattacactagtggtcatcatttcaccagtaggggtttttttacgcttttttcccgggagttttcatgtaaagcaccctactggacaaagagatgggagccggaaaacacagcctgaactgggacggcaccgactccaacggcgcccaactggcaagcggagtctatatctaccgcctcagcaccggaaagacgagcgccagccgcaaaatgatattgctgaagtgacggacagccgcccttccaagtccgataattaacttgaaccgccgcgcattacacacggcggttctttccaacaagccaagtatcagcagcgggaaaactgcgctgaaaaagccgctggtggggctccgtaaaatgggagtggaagccgccgcatggaacaccttgaaagtaacaagataccgccccaaattgatctttcctaacccaaaatccgcaaagcaaatttcttgacaatgatctttggcttaaatataaggttcctatcgaacaaaaggagcatgttatgtacaatcttctttgtgataattgggtaaacgtggtctatctttcgggcaaaccagatagaatatctttagttcaaactcttgaagacgcacactgtctgcaactggcatacagcaatcctatggaccggttcgctgttttcagattcctgcttgctcttggctactggtgtttcgccaacaccaacggggagcctgaacctgataagccgcttccgacctcctggatatcctggctggaagaaaacaaggggtatttcgagctttttggggatggacagagatttttccaagccgatcccagttccaggatcagagccattaccgaccttattcatgagataccaacagctcacaacctatgccatttcaatcatgtcaccgactatatcgatgggctctgcgaagcttgctgcatcaagggactgctgagattacctgtctttaccactgtcggtggcagagggataggcgcgggaatcaacaacactcctccattttacctgctctggcatgcaaatgacctcgctggcatgctggttcaaaattggcaaccctgggataatatggggattccggcatggttgggttcttttcaaaaagaaagcaggaaagtgggcttacttgccggaatgacctggctgccgcgcaaggtgcatctgcatgatcctgtctcaggtcaggcagcatgttgttcctgcggcttaccctccaaagctctcgtctattcctgcagcataaaacctgaaccagtgccggaaggccttaaatggaaagaccctcatggtgtttacaccgatcagggaaaaagtctccagtccaaaatcaaactgatgtccaatgatagatacactttcgcggaccgggattggtatagcccgttgttcagctatttgcacgcggaaggaaactccagacaaggaaaactatggttggttggatttgccagcgataaagcaaaaagcatagacatctgggacaagatcatcgagcttgagggaactgatacaaatgatgagctactggctcaattggcaaacagggctactgcccttaatgccatgcgcaagaagcctctcagaggtgatttcaaaaagtcagtgggcactccccagattgctgacattatcccccacgccgaaagcagaattgccatcaatgcgggtaaaatgactgagaacaggggctattcctggcaggatgccgatactgaatacggagaactgctcaccaaggttgcatgctctttggagccggctcaaacagtggacgccaggctcaagagaggtaaattcatttcccgcaagccctggccagttataccagaatccaaaacaaaacccgcagaggaggaccagaatgaatagaggaaccgttgacttcattgcaagcctggagaacctcaaagaaggcgatttgggcattcttagaaaactcaggggagcccggcttgatgaaaagcttcccggatttgacctgttttccgccctatggtggcctttgcggcaaaagaatcaacgcgctcccaagcgtgaagtggcttggttgatcgccaaactttttgctgaattccgctttgaacagcgcgagggagccacattgcccattcttatgggaggcatctgccggaagttggaacccaaaaaggaattaccccgggtattggcacgctttgatcaactcgcatcgcttgacattatgcagatggaagagccgctgtcggtcatcatgggtattttgcgcaagcaccagcaggtctgcctggactgggtagggcttactgatgttctgtcattttgggagcaggaacctgtcaaaagagaatggtcggattcatttattaaagcatacaagatcaacaaggaggattcagatgttgattgaaattcatatgattcagaatcacagcccggcaaatcttaaccgggacgacttgggcgcccccaagacctgttatttcggtggagtattacgttctcgcatctccagccagtgcatcaagcgcagcatccgttttgccccggaattcgcggaccttagaggaggtatccgaacaaggcgtctggcagagaaactcgaggaaatgctggaaaacaaagataagaagctggttgccaagtttcttgaagcctgcggaatcaaaaccaaatcttccaagaaagctgcaaaaaagtccgaaaagatacccgcggaagccgatgaagatcaggatgagcagcaggcggctgatacatctgacatgctggtttttaccacttatgatgccctgcgccaaatggcaaagctgctttccgactccaaactaagtgaaagcgaaaaactgctgcagttcaaagatctgctcacaaactgcgtccattctccggatatagcactttgcggcaggatgctggagaccaaagagcttaaaaacactggcgttgaaggcgccctacaggttgcacatgcgatctccacccacattgccagacctgagatagactattttgtggcggccgatgatgttcccggtgaagacgccggagcgggtcatattggcgaatccatgtttgcctcagcctgtttctacaaatacttctccattgattgggaacagttggtcaagaacctgaaaggggacacgaatctggcagcccacaccgtgggtgcctttctcctcgccgcagccaaaaccaaccccagtggcaaacagaacagcttcgccgctcataactatcccgatggcatccttgttgagttcaagaattcccctattagctacgccaacgcattcgtcaggccagtttccgtggtcaaggaatcggacctggtggaacaaagcatcggccagctttccaactacgtgaacgacatcaggcttggctattatgatgagcaatccccagttatcagcttctggttttctccaaacaatcgctattcccttggcaatgagcattccaaactggcttccagaaacattggcaacctcaatgagcttgtaggcgctgtgttggattatattggcggcttcaagtgggaagaagttcagaaaagcaaggcttatgttggcggctgacatgagtgcgccacccaacaccttattcttgcgcttggagggggctttgcagtcttggggcagcaacgaggctaagtttgctttgcgcaggactaccgacgctcccacaaaatcaggtgtcctggggctgctttgcgcggccatgggaattgggcgcgcggaggctgctgattcatggctcccaaaactcgccaacctgcgcatgggcgtgcggatagaccgccccggcatacgctggtgggacttccatactgttggagcgggacaaagaatgcgcatggcagagctgaaggcacccaaaaaaccttccatggttggagctgccctggctgataccctgacaccaagcaaagtaaaaaccagggcagagaccttgctctcacgccgcgaatatcttgccgacgccagttttctggtcgccttgcagggtgagccggaacttgtggaaaagctctccgccgctctggccaagccggtctgggcaatttatctggggcgcaaatcctgtcccccttcacgtcccgtgggcgagcatgctccgggcttttataacactttggaggaggcgctgtccgcggttcccctgcaaaagcgctggcacaatgaacccctgccgcaaatactgccttgcgtcatggactggatccccagccaggacggagaacatgcgcctgatgacgcggagattcattacgatctgccggtttcttttcagccgccccgccatttgccgcgcttcgtgatcaggcgtgagctggttgtgggagaggatgtgcaagtgagcagggaaaccggaaccagcgtttggaggcccaaaggaacccgggcggattataacaattccgagtataagaaggtcagggcggagcggcttgtgatggaccatgccgcgtgcatggtatgcaaagctcccgccacgactgttcaacacgtgaattaccgcagggcgggaggcaaggaaataccggaagacctgcgggcgctgtgccgcctctgccacgacgcctgcaccatgctggaatacggttccggcatgaccaccgaccgcatcgacccctgcgaccccatatggcgggagcgaatactggcaaagcgcaaagatatagtcgagttccgttcgcgcgggcagcgtttccgcaaaatgaagccagaggaggaaaacggatgatctacttgtccaagctattgatcgatactggaggcaatccagaccgtccccgccccggcagaaagtggctggacaatatctataacgtccaccgccgcctttccatggcgttcccttcaggtttgcgccgggagcaggatccgcatttcctgaagcccttttcgccaaacgacttccaaaaaactcccttccttttccgggtcgataacaacatcgacggaaacgataaaagggcgattattatcgtccagtccgttcttgagccggattgggattattgcttccaaaacgcgcttgatttcctggcagcgccaccggaaacaaaggagtataatccagagtttcaagcgggacaactgctccggttcaggctgcgggtaaacgccagcgtacgccgtcatattcctgagaaggtgcaacaggacggtcaaaccatagaaactggcaacatcctgcacaaaagggtttctctcacctgggatccctcttccaccccggatcaggcccttgccgactggctggctgccaaaagcccaaagctgggcttcacccttcagcgctgtgagcttcttcaactgggttgggtttatggctccaagcctgaacctaaaaatgtcaaagcaaaggaacagggacagggctactggcgtgaacacacatacaatcctctgcgcttccgttcggctctactggagggaattctcaaagtggatgacccgaaactgttcctggaaacgcttagaagcggcattggaaaagcgaaaagcttcggctttggcctgctgtccgttctgccaatcaggaatgatgaataaagacctgcactctatcccccggatcagagatcggcttagctatctctatgtggagcatgccaaaattgatcagaacgggcaagccatcgccattcacgatgccctgggagaaaccccggttccttgtgccggcttggctatgctgatgctgggaccgggcataaccatcacccatgcggcaatactttcactggctgcctgtggctgtctggtagcctgggtgggggaacatggcgtcaggttctatgccgcaggcacaggtacaacccgtagcgccgtcaatcttatgaaacaggcaaagtactgggcagacccggttttgcatttacgggttgtgcgctccatgtatcagttgaggttccaggatgagctttctcctgatttaactttgaaccagatcaggggcaaggaaggtgcccgggtgcgcgatacatatttccaactctcccaaaagtatggtgtgcccatgcagggcagaaactatcaaagagacaactggaataaagcggatcccataaaccgggcattatctgtggcaaactcctgcctctacggcatatcgcacgctgccattgttgctgcaggattctctcccggattgggctttgtccacactggcaagcaactgtcatttgtctatgatatcgcggatctatacaaaatggaaatggctgctcccgccgcattccgggcgaccgctgaagggatcggcgaactcgaccgcagagtcaggcttgcctgccgtgatgaattccacaggcagaatctactcaaacgcattgtcgcggatattagttctctcttcggtgatattatgccagaggatagcccggatgactgttttgccgaagaaccagccttgcctggaggactctggtctccagatggagaagtttccccaggcggcatatcttacgggcaggatgatctgccaaaggaagattgatggtggttttagtattggaaaatgtgccaagctccctgaggggtaagatcacacgttggctgctggaagtaaaagccggggtgtttgtgggtaaagtctcagcaatggttagagataaactgtgggataaggttagaagcaattgcagcggtggaacttgcctgatgatctggagtagtcagaccgagcaagggtttgatatcgaattctggggtgccgcatcaagagtcgttacggaatgggagggtatcaaacttatgaccaagcatccttaaactaaggcttgaaggagttcaatgacctcttagacctctattgatcaagtgtattccccatgcatgtgggggtgaaccgggcgtattcgatgcgcttaacggcgtgatttggtattccccatgcatgtgggggtgaaccgcacaaataccgttatttcaacactctgcccacgtattccccatgcatgtgggggtgaaccggatacacacgcatcggttgcataggctgtccggtattccccatgcatgtgggggtgaaccggatcacgtcaccaagatctggcttcggcacaggtattccccatgcatgtgggggtgaaccgcttatccgaatgctacaagctgcacgtgacctgtattccccatgcatgtgggggtgaaccgagacccttcaacctatcgcaaaagaattcaatgtattccccatgcatgtgggggtgaaccgactacaaaacgaggtgatcatatgagtgtcaagtattccccatgcatgtgggggtgaaccgcatctgttttgccttctgcattgccttgtatcgtattccccatgcatgtgggggtgaaccgaacgcccgccagccggcggcactgctggctatgtattccccatgcatgtgggggtgaaccgacgaatcccgtctatgccgcccaggccaacgcgtattccccatgcatgtgggggtgaaccgaaaccaggaattaacgtagtgccaggcaagacgtattccccatgcatgtgggggtgaaccgactttgacaaagccatccaggtaggtgatgccgtattccccatgcatgtgggggtgaaccgccgacgaaatagcgatgaagggactggtaacgtattccccatgcatgtgggggtgaaccggcggcggcggctttgtcggtatcctggtagaggtattccccatgcatgtgggggtgaaccgaggacgtagcgaggcggcttggtgacctgatggtattccccatgcatgtgggggtgaaccgcgcggagctttccttgttgtcaccggaaagaggtattccccatgcatgtgggggtgaaccgaattatcggaaataacaaagagtcttcaaggggtattccccatgcatgtgggggtgaaccgtcaacgaaaccagcaacctgctgatcgttggggtattccccatgcatgtgggggtgaaccgaggacgtagcgaggcggcttggtgacctgatggtattccccatgcatgtgggggtgaaccgcctgaatctatcaccctactgagacaggcaatgtattccccatgcatgtgggggtgaaccgatcgtccagattctcacgatcatcctggacatgtattccccatgcatgtgggggtgaaccgttataaagggcagtccagtgagcaatagcaaggtattccccatgcatgtgggggtgaaccgatggcaacaattagcaggaattaaacaagaaggtattccccatgcatgtgggggtgaaccgttccggatgcagtcatccgctgtcgatgtggagtattccccatgcatgtgggggtgaaccgttcatagcgccgcttttcagcctggctacggcgtattccccatgcatgtgggggtgaaccgacgcggcataaccgcatgggcagcgcgtattggtattccccacgcatgtgggggtgaaccgatcgacgccggcatcatcgaggatctgatcctgtattccccacgcatgtgggggtgttgcgatttcctcgcgcgcgggcgactctcatttgcatctggcgctcagaccttggtcttcctggggtcaaccttaacctttatatggatgacctaaggatgatggcaccaaagccagtagcagcaagggagagcggtatgaagtaatatgaggattatcgcgggaattattttgaggggacaagcatccaatctgggtagtttgttggtattttatcgtttggctaaagtggtggttttgtaattgacctgaaatcggggtgacggggttttatggttttttgtagttcttttttgtgtcgtgttgtaaaatattcaccctctttctatctgtgtattatgtggtttttaaaaaactggatcccgggtcaagccaccccgacagcccgggatgacacaattttagtgtctgtcgtggtctgtttcggggctgatgcttgtttttgggttggacgtttgtccttattctgttcttttaatccgtataatttgtgtaatttgtggatatttttaaaagactggatcccggctcgcaggccgatatagcttggtggacttgtttcggggctggatgactgtcccaaacggcgctatagcaagcgccactacagtaaaggcggtcgctgaaccgccttcagggcagattcttttgtcctttaccttatccggcaaaattaacttgacataatttattataggtgattatctggtaattgtcattaagtttcgttttgaaatctccaaggaggcagatatgaaacgatcgcttcttatattggcgctgcttgccgtcacggcatcagccttcgccgctggagtacttatcaacaagcaaaacactcagtttcagattgctcaattgcggagctgcagctatgaggttcaaatcaccaatcaggttgcggaagtgcaagtgaacgaaacatttgtcaacaacagcaacggttttttctatccccgctactattttcccatcccgcgaggcgccaacgcgacccgcttgagatggagctatggcgacacctggcaggaagcgtcaatttcaccggtgccgcaaaacccacagggcggcccgtcctcttttccggatgaatttgtcgtttatatccagttgatgccggtagttttcgacgtggcagactccatggccgtgaatgactccctgcggctggaactctcctacgtgatgatgttgagttacaatttcggcagcgtaaccctcaacctcaagaacgactacagcctgttgcagaacactcctctggatttgcaatccctggatgtgaacgtctcgtccgacaaggagattttggatttcaacatcctgaatgtgacagccagcacccaacacacggggcacaacgccagcgggcattactccctcgccaatcaacccgccaccgccaactatgcctgccagatactgctatcgaccgccgaactgggctcctggggcttgagtaccttactggatgaagtccccgatgagggagcgccggggtttttcgtcttcaatcttgaggaggaaagccttccggcggattccaccttattcctgcggctgaatatcgtgatcgacgtatccggctccatgacctttgaaaaccgcctggaaaacgccaagaccgccgcgatctatgtgctaaaccatctggaacccgaggattacttcaatatcatcctctttgaccaccgggtgcgccctctctgggattatctccactccaatacagacagcaaccgccaagccgccatttcctatatccagaattatgagattaccggtttgaacggaaccaacctctccggtggtttgcaaaacgcgctgtatcagttttccccaactcccccgggagtcaaaaactgtgtgctgctcctttccgacggccaaccgactgtcgggatgacggatacctaccaaataatcaacaatgttaaccaacacatcaccaactatcacatcgatccccgcatcttctgctttggagtcggcaccgaggtcaactatcatctgttaagcgcgctgtcacaatacacagacggcgtcaccatctttctggagagctccgagatcgtcaatacggtcagcagcttctacgacgtcatgcgcaatcctctgctcctcgatcccgaactggccgtcgtcccgcccgggatcacggaggtgtatccctatcccataccctccatttatggaggaatccagtatcgcatcgtgggcaggtatgcgactccgggaacctatcagatgacgatcagcggcgcgcaccagggcacccagttgaacctgaactattcccaaaaccttagcggagaggaagcccccggtttgagcttcattcccaagatctgggctgcttccaagatcgacaacctgatggtggagtattattcctatccgcccaattcggcggaagcgatcgccctgcgtgatcaaatcaccgagatcagccagagtttcggggtggtctgcgtcttcaccagtttcacttccgatccgcccgacacggatttggatgacgtggtccaacccgtggtaaaaatgcccctccgcctgctgcccaaccagcccaatcccttcaatccctccaccctgctctgttttgaagtgtccgctgaactggagggactggcagagatcagaatctataacctgaaaggacaactggtgaagatcctcacggtgaaggttgacggcaaaggcaggtacaacgtgccctggaacggcaccgatctgactgagcggtcggtttccagcggggtttatgtctatactatcagatttggtaaatacctgctccacggcaagatgacacttgccaaatagagccggtcgagatgccctttgcggcgctatggcaagcgccggtactttgaaaaggcggtcaccgcaccgccttttttctatccctttttaagatcttttacttcgtgttaacttgtgtaatttgtggatgattattctaaaagactggatcatggctcaagccaccccaccggattgttaccggtccggcgaggaccccggtaggccgtgatgacacgatgtttagcttggtggacttgtttaagggaaacctttccacctcaaaaacacttttccacctttccacgacctaataattcgtgtaaatttgtgtaatttgtggataactctaaaagtccaacctgcttcagccccagtatttgcggtccaggctgcggtattggatggcttcggagatgtggtcggatttgatggcggccaggccttccaggtcggcgatggtgcgcgccaccttgaggatgcggtcgaagacccgggcggaatagcccagcttgtcgatcgcgtgctgcatctggctttggctgggggcatccagcgcgcagtgtttgcgcagcagtttggaattcatctgggcgttgcagaagatgccgtcgttggcatagcgttcccgctggatggcgcgggcgcggttgaccctggcgcggatgtcggcggagctgtcgccggaaggcaaagacgccagatcggaatagctgaccgagggcacttccacgtggatgtcgatgcggtccagcagtgggccggagatacggctgcggtagcgttggatggcgccgtattcgcaggtgcaggggtgattggggatgctggagccgaaatagccgcagggacaggggttcatggaggcgatgagcatgaattccgcgggaaaagtgaggctttgggaggcgcgggagatggtgacgatgccatcctccaggggctggcgcagcacttccagcacaccgcgcttgaactccggcagctcatccagaaacagcacgccgcgatgcgccagggacacctcgccggggcgggggaaggttcctccgccgatcagggcgatatcgctgacggtatgatgcgggctgcgataggggcgggtggtgaggatgccattgtgaaaatctttggagtatcccgccacggagtggatcttggtggcctccagggcttcatccagcgagagttccggcaggatggtgggcacacgccgggccagcatggtcttgcccgaaccgggaggacccagcatcagcaggttgtggcctcctgcagcggagacctccagggcacgcttgacctgaaactgccccttcacgtcgtgcatatccacgggaaaggcgttcagggaggaaaaaatccgctcgcggtccacctcagcgggcggaatcttggcctcgccgcgcagaaagagggccgcctccttcagcgaggtgacagggatcacctgtaagccttcaatgatggcggcttccccggcattttcccagggcaggacgagggtgtcgatgccatcccgtttggcggctaaagcgatgggcagcactcctttgacggggcgcaggttgccatccagcgaaagctcgccgatcatggcggtcttggtcaggtattccaccggaatctgcttgatggactgcagcacggcgatggcgatggggaggtcgagggcggcgctgtccttgcggatgtccgccggggcgaggttgatggtgaagcggcgcacggcggcgtcccagccggaattgcgcagggcggcaaagatgcggtcctggctttccttgaccgcgttggatgccatgcccacgatagtgaccgcgaaaacctgagaggtggcgtcacactccacagtgagctgttgcccgtctatccctatcgtggtgtaagtgcgcactattccaaccatttgatcctacccttgtttggtattttgctttgtttgtcagtaaaatagcggtcggcgcaacggtcaagggaaaagtgcgggaggagggtgactatccacgaattattatttaacaggcttgctccagatacgcccatcctcgcggatgatccagtccggggagccgtccttgccgggcagggtgaggtcaaatccggcggaggtagtttccaggtgtggtttagtctttttgccatcccgcaggtaggggcgcgcgcccagttggcgcagctttccagcccagcgtccgtgatccataaaatactgtttttggaggtaatagacctggcgcagatattccttttcccgctcggaggcaggcggagtgaaacccgggtctgccgagcccgcggacgcggcggagaagaacagatagccccaacgctctggatagtgcatcgcgatcagtccctgggggctccaaacccagttgcgttcaggcataccgggcactttggtgtagctgccgtccagccactcggtatcccattgcacgcgggagaagttgagccgccaataatcgccgtcccggggcgggcaggggacgtgggcgaactcctcaaaggccgaccagggcagaaacatctccacgctccagccgctgtcgaggtcactggggtcgttgagggtgccgtcgattccgatggcaaagctcgctcccttgatatcccagccgttcagggggctgtgggcgtcgcggtagggcttgaggatgaagaggtcccagagggtgcccagggcgttgatctccagttcgtaatactcgtgggtgtcgccgttgggatcgaggaagacctcaaaatcgttgtcgtaaaagatcaccgcgtcacgctcggtgaggcttgcccagatgtggggctcctccagccaggcgccgatgtagaggccggagtcatcccagagcatcttgacccaggtgtccagatggggcgctggtttgaggtctccctcgatatccgtgaacagctccgtgggcagggcaagttgccagtcgatgtcgtccaggctgccatccaccttgatcccctccaccgttctgaacgcggtgtaggagcggggcgcgaactcgcccacgggcaggggaaaggtctcggcggcaaggacggaaaggatgagtaagaggatggggacaagcagttttttcatgggatagctccttatgtttcgcggcaggctgccagcagctcacccgcggtggcgacggccagaccgacgcaagtgtccgccgcgccgtaatagatgaagattctggtgccgggcagcacggtgccgtcggcttccacacgttcggggatggcggcagaggggaagaccacattgggcacctgcccgctcagttcccaagattcacgcggttccaggatgttttgcccgctcctggcgagcacgttccagggcaaagcgctgtcgtgcaacgaaattcccgcctgatatatgtttacgctggcaaagtgggtcgccacgccgtggtagatatgcagccagccctcggaggtcttgagcgggggcgggccggagccaagcagttcgtcccaatagtgtggacggccgctgaagacgggggccacgggctcccaatgaagcaagtcgggcgaggcatagcagacgatggtggctccggagcgcactccatccgcgcccagatggtcattgggacgggcaaagagcagatatcttccgccgatccgttccggaaagagaaccgcgttgcgcagcccggcatccgccagcaggccaagatagcgcaggctgcggcagtcttccgtttcaaacagcgcggagcggcagcctggggcgcaatcgatggcgcaggtgacgtagatgcgcccctccaggcgggtgacgcgggggtcgtagaggtggtaaatctcatagggaaaagcttccagcccactcaccgccacgggatggccgtccacgcggaaacttacgccatcggctgacgcggcgcggacaaacagggtgcgcctgccacgatcctgcacacgcagcagcaggacatactcgccgccaagcttgaccccgccggggttgaagacagagctgacatcgcgcggcaaggcatccgaaacggggatatccgcacgggtgaggatgggattgcgcggatggcggatcatagcaggcctttcagctctttgacgcgccgctcgcattcagcgaaatccctggaagggggatcgctccagaatagctccgccatgtaaagcatgcggtcatagaccatttccttcagacggcggctattggatatccgttccgtccagaggttggcctgtccgcccaggaagagtccggggttggaaaacctgaatttgccgaggtccagcccatagacatcccggctggtggtgactccgaagcctccggggcagtccgggtcttcgttgtagcgccagtcaaaatagaggcggttgttggggcagatgatgtagcggttgccgttgtcatgagccatacgggcggcatccaccccgtctccgcgccagcacatggcgatcgggcggctgtcgatcccgccgtccagaatctcatcccaaccgatcacatcccggccgcgtttttgcacatgagccaccagttgatgcaaaaaccacgcctggagatgctcttcatcccgcaaaccctcttccctgatgcgccgctggcaacggggacactctttccagcgctccttgggcacctcgtcaccgcccaggtggatgtattggccggggaagagttccagcacctcgtccagcaggtctttaaggaaatctatcacgctgtccttgccggcacagaggatgtccgtggaaatgccccagacgttgagcggctcgaagtcccgggggaagcaggccagttccggataggcggccaggatcgccatggcgtggccggggatgtcgatctccggcaccacctcgatgccgcggtcccgcgcgtaatccagcaccaggcgcacctgcttccgggtgtggaaaccgccgtagaggctgccatcctcctctttgcgccaggcgcccacttcgtgcaggcggggaaagcgtttgctctccagccgccagccctggtcgtcgctcaggtgccagtggaatttgttcagtttgacggctgccatccagtccagatagcggcggataaccttgtagtcaaaatagtggcggctggtgtccagatgcagtccccgccaggaaaaggagggccaatcctccaggtcgaagcagggcagtcgcgcggagtcctttttgccctgtcgggcagccttgtgccaaatctgccgcaggctctgcacgccatgcaccaggccgggatagtcttgggcgctgatcaccgtgccctggggacggctaaggatctggtaaaaaccgccccagtattttttcctgtgcgtaccgaagtccaggacgatctgatacggggtttcgctgtctggatccatgaagtccaacagcttgctgtaactgctttccaagctggaggagagatatctgtgggcactggcggagagctggggacagcacatgataataagcaacgggctggggcagaacgtctctttgaggaggtggtactctttgggttggggaagcatgtttcctaccttatcaacagggttttgatctggaagggcttgaagctgaggcggatgccccgctcgccgatgggctgcgcttcgctgtccggcaaggggttttccaacaggtcgcagacactccagagatggtggccgggtgccaaaagagtagcctcggcggaacctcccgcgcattcatggaggcggacaacgaggccgccaccggattcagcgggcttgatccaatcgagggtcacggcatcggaaagcaggcgcacgggcgaatggggcagagggttggcgagggcgggcactttcaggcagagcagatcggcacaaaaggcctcggcagcctgccagagccgggagcgggcgtagtctccgctgtggaagtaaaccgcgtaggaatactcgtgctcgcccaaatctgccagggggtcaacgtcggcgggagagcgcaagaggttgaggtccatctcgttgtcgcgcacatggcagccgaacttgtcggcgcagaaaatggcgcagccgcggtctgcctgggaaagatcgaagaacttctggaaaggcacctcgaagcgcgcttcctcccaggcgttgcggggcttggcgctgcgtcccagcatgccggactggatgccgaagctggcctgggcggaacgaacaacgggataccagtgcgcgcgcagcatcttgtgcttttcctgccagtcgatgtggtgcgaaatacgcagcaggcgttctccccggcgcagttccagggtctgccgcaggatggaggaacccacgcgcaaggtctggaccaggcgggcaaattcccccggcagggtgtagctttgcgccgcttcaaggctgatcccctccgctggcgtgggtgtggttgtgcggtaaaagtggttgatatcccaggcgccccagttgttgggttcatcctcccagagcagcaggcggttggattccgaggcgaggagcggcgtgccggactccttgtcccacacctcgctaacgcttccctgcggggttacggtcacgcgcaggaactcattttccaggcaatggccagccagaggaataggcttaggaatctcccccgctccggctttgaaggcgatggaacccactccccaggcgggcaggctggccttgaccagcgttccctccgggatggcgcaacaggtgagggggacgccgtcctccccgcagggcagcaggccttcgacaggggcgggaagcggcagccattctgtcttggacgcgggagaggggttgagcagcagccagccctggccgcgcgaggcttccccggaggcggcaagtttggcggcgcgctggttcagaaagtcttccaggatttggcggttaccggcgcagatggcactggcatcatcataaaccatgccgatcgaggagccggggatgatgtcgtgaaattgcagcagcaaggtatcctgccacacggggcgcagttcccggggatattcttccccgcccgtgagcgcggccagatattccgccgccctgagcagcctttccgcccgcgcgttgtcccgcttcatccgcgcctgggtggtgtatgtgccgcggtgatactccagataaagctcgccgggcatcacaggcagcagggagcggtccagagccttcaggtgctcaaaatagtctgacgacctggcaaagcggaacttcggcacaccctccaggtcgcgctgccggaggccatactccagatgcgcctcggtgggcccgccgccgccgtctccgatgccatagaggttgaggaaggcgtcgcaaacctcgctctgggcgaagcgttcctccgtctttaggaaggcggagggattgttggaaaagttgtagtcgtgggtgggtagttgttgcgccagcacccggctgccgtcgatgccctcccacaggaagaggttgtgggggaaggcgttgctttcgttccaggagagcttttgggtcataaactgctccacgccgcagcccttcatcagttggggcaggttgccactgaagccgaagcagtcgggcagccagaggacagccggctccacgccgaactcctcacggaaaaagcgtttgccatacatgaactggcggatgacggactccgcggagatgagattggtgtcgaactccacccaggacgccccctgcacctcccacctgccttccgccacgcgctttttcacctgcgcgtagagagcgggatacagctccttcatccagagatagagctgggcttgggaagcgccgaagatgtagtccggataccgttccagcaggcgcagcgcgttggcgaaggttctgccgcccttgcgtttggtttcgcgcaggggccagagccaggccagatccagatgggcgtgcccgacgctgaaagcggtgagcgcgctggcattagctggcttggcgagcaggtcgtccaggatgccagcgcaggcttcccggtcgttgttccaaaggtcgcaaacccggttcagtccatacaggatgcgctgcctgcgggtctgcccattggacaggctgagcgcaagatccagcagcagttcgatgtcccagagcagcttgcgcagccggggatcgcgccagaccaggctgcactcccgcagcctatactcgctttttcccccgccgaaaaggtcgttggcggcagcctcgatcagcagttccacccgctccccttcctgcaggggcaggggaacgaaatacttggcggcgttgtgataccagtcaaccttgggggtcaggccctgccagggcgtttggtctttgaacacgcaggcttcgccgtcacaatcgaaccacagccccagttccatacccgcgggggtcgccggagcctgcccgctgatcctgaaccaggcgctctgccagggtttgccccacagtccgccgacttcgatctccttgaaactcatcgaggcaagcttttcctgcgggatgggatccgccgcgctcacatactccgcccgcacgggcagcttttccccgtgcagcagcgctttctgcctctccgcgaggcgtttgatccgctcgatatggatcttttcgttgtgcattatttctccatgggtaccacgatgccccggataatgatattctggaagaagacaaacaccgccagggtggggatggcggcaatcaccagggcggcatagcccactccgctgctggcgcgctgcagtagctcgtagatgtgcaccatcagggtccacatcgactgatcctggcagaccaggaaggcaaagaggaagttgcggtaagccgcgttgaaggcccccagagcgataaccgccaggatcggcttgctaaggtacatggtgaactgccagaacatgcgcagctcccccgctccgtccaggctggcgctttcatagatttcccgcggcaggctatcgaaaaagcccttgagcaggaagatgaagtagccatccgccgccgcgggcaagaccagcgcccaaaaggtgttgagcaggttcaaacgcttcagcatcagaaagttcggaatgcccatcaccatcgccggaaaagccatggtgagcatgaagatcatgatgacctgatgcgtgaagcgcggtttgaaacggctgagcgcgtaggctgccagcgggttgaccgtgaccgcgaagaagatggaaagcagcacatagatcagggtgttgcgcagcgagcgggcatccgccagcatctgatccagcgccatggcatagttgcgggtgagaaactcccgccggatggcgcccttgcgctccagaaaggtgcccctgtcgatctccgcgctgggaaaggggactttcccaaagcccgcgtagctgcttccccacgcacggttgagcgcgccgagggagccatacttatcctccagccagtcccggaaccccgccgccacgctcactatcctgagttcttcgggagccgccctggtctggatatacagtgccagatcgtccacctgcgcgccgctgtccggcaggcggacggggatgccgacctgctcgaaactgctgtaagatgcctgccaggcagtgttcagcaggctgatcccaccatacttttccttcagcgcccggcggaatcccggctccgcctccggggaaagccgcagatgctggatggacagcacttcccgcgcgtattccagccagtaggggcgcagcgggtcgccccgggcgggacagctttcgggcaggattatctggctccaggaggagtagctggtacccaattccttgttcagcttgtccagattgccttggaaggtggggatcaggatggcgttgacaaaggttccgtccgggttcatatagagccgctgccagtccgggcgctgctccttgaaacgccggaacctgcccagatagccttcggtggagctggcaaagttgcgcaaaaagatgtccttttcctccaccgaaatctcttcccagcttttggccccggtgttgtagcggcggttgaaggccgccaggtcgccgccgttttcctcgcgcagcagcttgcggtattgcctctgcgccagcggatagaccccccttccgtaatgctccgacacatagtagaaattgactccgtagtccccgccgcgttcccgcagaaagcgcttccaatcctcatacacggcgggattggcgtccgagggcag

SEQ ID NO: 982 - DNA, 118081 bp, Artificial Sequence
  Synthetic Oligonucleotide
  misc_feature (1)..(88116): n is a, c, g, or t
nnnnnnnnnnnnnnnnnnnnnnnnnnnnnnnnnnnnnnnnnnnnnnnnnnnnnnnnnnnnnnnnnnnnnnnnnnnnnnnnnnnnnnnnnnnnnnnnnnnnnnnnnnnnnnnnnnnnnnnnnnnnnnnnnnnnnnnnnnnnnnnnnnnnnnnnnnnnnnnnnnnnnnnnnnnnnnnnnnnnnnnnnnnnnnnnnnnnnnnnnnnnnnnnnnnnnnnnnnnnnnnnnnnnnnnnnnnnnnnnnnnnnnnnnnnnnnnnnnnnnnnnnnnnnnnnnnnnnnnnnnnnnnnnnnnnnnnnnnnnnnnnnnnnnnnnnnnnnnnnnnnnnnnnnnnnnnnnnnnnnnnnnnnnnnnnnnnnnnnnnnnnnnnnnnnnnnnnnnnnnnnnnnnnnnnnnnnnnnnnnnnnnnnnnnnnnnnnnnnnnnnnnnnnnnnnnnnnnnnnnnnnnnnnnnnnnnnnnnnnnnnnnnnnnnnnnnnnnnnnnnnnnnnnnnnnnnnnnnnnnnnnnnnnnnnnnnnnnnnnnnnnnnnnnnnnnnnnnnnnnnnnnnnnnnnnnnnnnnnnnnnnnnnnnnnnnnnnnnnnnnnnnnnnnnnnnnnnnnnnnnnnnnnnnnnnnnnnnnnnnnnnnnnnnnnnnnnnnnnnnnnnnnnnnnnnnnnnnnnnnnnnnnnnnnnnnnnnnnnnnnnnnnnnnnnnnnnnnnnnnnnnnnnnnnnnnnnnnnnnnnnnnnnnnnnnnnnnnnnnnnnnnnnnnnnnnnnnnnnnnnnnnnnnnnnnnnnnnnnnnnnnnnnnnnnnnnnnnnnnnnnnnnnnnnnnnnnnnnnnnnnnnnnnnnnnnnnnnnnnnnnnnnnnnnnnnnnnnnnnnnnnnnnnnnnnnnnnnnnnnnnnnnnnnnnnnnnnnnnnnnnnnnnnnnnnnnnnnnnnnnnnnnnnnnnnnnnnnnnnnnnnnnnnnnnnnnnnnnnnnnnnnnnnnnnnnnnnnnnnnnnnnnnnnnnnnnnnnnnnnnnnnnnnnnnnnnnnnnnnnnnnnnnnnnnnnnnnnnnnnnnnnnnnnnnnnnnnnnnnnnnnnnnnnnnnnnnnnnnnnnnnnnnnnnnnnnnnnnnnnnnnnnnnnnnnnnnnnnnnnnnnnnnnnnnnnnnnnnnnnnnnnnnnnnnnnnnnnnnnnnnnnnnnnnnnnnnnnnnnnnnnnnnnnnnnnnnnnnnnnnnnnnnnnnnnnnnnnnnnnnnnnnnnnnnnnnnnnnnnnnnnnnnnnnnnnnnnnnnnnnnnnnnnnnnnnnnnnnnnnnnnnnnnnnnnnnnnnnnnnnnnnnnnnnnnnnnnnnnnnnnnnnnnnnnnnnnnnnnnnnnnnnnnnnnnnnnnnnnnnnnnnnnnnnnnnnnnnnnnnnnnnnnnnnnnnnnnnnnnnnnnnnnnnnnnnnnnnnnnnnnnnnnnnnnnnnnnnnnnnnnnnnnnnnnnnnnnnnnnnnnnnnnnnnnnnnnnnnnnnnnnnnnnnnnnnnnnnnnnnnnnnnnnnnnnnnnnnnnnnnnnnnnnnnnnnnnnnnnnnnnnnnnnnnnnnnnnnnnnnnnnnnnnnnnnnnnnnnnnnnnnnnnnnnnnnnnnnnnnnnnnnnnnnnnnnnnnnnnnnnnnnnnnnnnnnnnnnnnnnnnnnnnnnnnnnnnnnnnnnnnnnnnnnnnnnnnnnnnnnnnnnnnnnnnnnnnnnnnnnnnnnnnnnnnnnnnnnnnnnnnnnnnnnnnnnnnnnnnnnnnnnnnnnnnnnnnnnnnnnnnnnnnnnnnnnnnnnnnnnnnnnnnnnnnnnnnnnnnnnnnnnnnnnnnnnnnnnnnnnnnnnnnnnnnnnnnnnnnnnnnnnnnnnnnnnnnnnnnnnnnnnnnnnnnnnnnnnnnnnnnnnnnnnnnnnnnnnnnnnnnnnnnnnnnnnnnnnnnnnnnnnnnnnnnnnnnnnnnnnnnnnnnnnnnnnnnnnnnnnnnnnnnnnnnnnnnnnnnnnnnnnnnnnnnnnnnnnnnnnnnnnnnnnnnnnnnnnnnnnnnnnnnnnnnnnnnnnnnnnnnnnnnnnnnnnnnnnnnnnnnnnnnnnnnnnnnnnnnnnnnnnnnnnnnnnnnnnnnnnnnnnnnnnnnnnnnnnnnnnnnnnnnnnnnnnnnnnnnnnnnnnnnnnnnnnnnnnnnnnnnnnnnnnnnnnnnnnnnnnnnnnnnnnnnnnnnnnnnnnnnnnnnnnnnnnnnnnnnnnnnnnnnnnnnnnnnnnnnnnnnnnnnnnnnnnnnnnnnnnnnnnnnnnnnnnnnnnnnnnnnnnnnnnnnnnnnnnnnnnnnnnnnnnnnnnnnnnnnnnnnnnnnnnnnnnnnnnnnnnnnnnnnnnnnnnnnnnnnnnnnnnnnnnnnnnnnnnnnnnnnnnnnnnnnnnnnnnnnnnnnnnnnnnnnnnnnnnnnnnnnnnnnnnnnnnnnnnnnnnnnnnnnnnnnnnnnnnnnnnnnnnnnnnnnnnnnnnnnnnnnnnnnnnnnnnnnnnnnnnnnnnnnnnnnnnnnnnnnnnnnnnnnnnnnnnnnnnnnnnnnnnnnnnnnnnnnnnnnnnnnnnnnnnnnnnnnnnnnnnnnnnnnnnnnnnnnnnnnnnnnnnnnnnnnnnnnnnnnnnnnnnnnnnnnnnnnnnnnnnnnnnnnnnnnnnnnnnnnnnnnnnnnnnnnnnnnnnnnnnnnnnnnnnnnnnnnnnnnnnnnnnnnnnnnnnnnnnnnnnnnnnnnnnnnnnnnnnnnnnnnnnnnnnnnnnnnnnnnnnnnnnnnnnnnnnnnnnnnnnnnnnnnnnnnnnnnnnnnnnnnnnnnnnnnnnnnnnnnnnnnnnnnnnnnnnnnnnnnnnnnnnnnnnnnnnnnnnnnnnnnnnnnnnnnnnnnnnnnnnnnnnnnnnnnnnnnnnnnnnnnnnnnnnnnnnnnnnnnnnnnnnnnnnnnnnnnnnnnnnnnnnnnnnnnnnnnnnnnnnnnnnnnnnnnnnnnnnnnnnnnnnnnnnnnnnnnnnnnnnnnnnnnnnnnnnnnnnnnnnnnnnnnnnnnnnnnnnnnnnnnnnnnnnnnnnnnnnnnnnnnnnnnnnnnnnnnnnnnnnnnnnnnnnnnnnnnnnnnnnnnnnnnnnnnnnnnnnnnnnnnnnnnnnnnnnnnnnnnnnnnnnnnnnnnnnnnnnnnnnnnnnnnnnnnnnnnnnnnnnnnnnnnnnnnnnnnnnnnnnnnnnnnnnnnnnnnnnnnnnnnnnnnnnnnnnnnnnnnnnnnnnnnnnnnnnnnnnnnnnnnnnnnnnnnnnnnnnnnnnnnnnnnnnnnnnnnnnnnnnnnnnnnnnnnnnnnnnnnnnnnnnnnnnnnnnnnnnnnnnnnnnnnnnnnnnnnnnnnnnnnnnnnnnnnnnnnnnnnnnnnnnnnnnnnnnnnnnnnnnnnnnnnnnnnnnnnnnnnnnnnnnnnnnnnnnnnnnnnnnnnnnnnnnnnnnnnnnnnnnnnnnnnnnnnnnnnnnnnnnnnnnnnnnnnnnnnnnnnnnnnnnnnnnnnnnnnnnnnnnnnnnnnnnnnnnnnnnnnnnnnnnnnnnnnnnnnnnnnnnnnnnnnnnnnnnnnnnnnnnnnnnnnnnnnnnnnnnnnnnnnnnnnnnnnnnnnnnnnnnnnnnnnnnnnnnnnnnnnnnnnnnnnnnnnnnnnnnnnnnnnnnnnnnnnnnnnnnnnnnnnnnnnnnnnnnnnnnnnnnnnnnnnnnnnnnnnnnnnnnnnnnnnnnnnnnnnnnnnnnnnnnnnnnnnnnnnnnnnnnnnnnnnnnnnnnnnnnnnnnnnnnnnnnnnnnnnnnnnnnnnnnnnnnnnnnnnnnnnnnnnnnnnnnnnnnnnnnnnnnnnnnnnnnnnnnnnnnnnnnnnnnnnnnnnnnnnnnnnnnnnnnnnnnnnnnnnnnnnnnnnnnnnnnnnnnnnnnnnnnnnnnnnnnnnnnnnnnnnnnnnnnnnnnnnnnnnnnnnnnnnnnnnnnnnnnnnnnnnnnnnnnnnnnnnnnnnnnnnnnnnnnnnnnnnnnnnnnnnnnnnnnnnnnnnnnnnnnnnnnnnnnnnnnnnnnnnnnnnnnnnnnnnnnnnnnnnnnnnnnnnnnnnnnnnnnnnnnnnnnnnnnnnnnnnnnnnnnnnnnnnnnnnnnnnnnnnnnnnnnnnnnnnnnnnnnnnnnnnnnnnnnnnnnnnnnnnnnnnnnnnnnnnnnnnnnnnnnnnnnnnnnnnnnnnnnnnnnnnnnnnnnnnnnnnnnnnnnnnnnnnnnnnnnnnnnnnnnnnnnnnnnnnnnnnnnnnnnnnnnnnnnnnnnnnnnnnnnnnnnnnnnnnnnnnnnnnnnnnnnnnnnnnnnnnnnnnnnnnnnnnnnnnnnnnnnnnnnnnnnnnnnnnnnnnnnnnnnnnnnnnnnnnnnnnnnnnnnnnnnnnnnnnnnnnnnnnnnnnnnnnnnnnnnnnnnnnnnnnnnnnnnnnnnnnnnnnnnnnnnnnnnnnnnnnnnnnnnnnnnnnnnnnnnnnnnnnnnnnnnnnnnnnnnnnnnnnnnnnnnnnnnnnnnnnnnnnnnnnnnnnnnnnnnnnnnnnnnnnnnnnnnnnnnnnnnnnnnnnnnnnnnnnnnnnnnnnnnnnnnnnnnnnnnnnnnnnnnnnnnnnnnnnnnnnnnnnnnnnnnnnnnnnnnnnnnnnnnnnnnnnnnnnnnnnnnnnnnnnnnnnnnnnnnnnnnnnnnnnnnnnnnnnnnnnnnnnnnnnnnnnnnnnnnnnnnnnnnnnnnnnnnnnnnnnnnnnnnnnnnnnnnnnnnnnnnnnnnnnnnnnnnnnnnnnnnnnnnnnnnnnnnnnnnnnnnnnnnnnnnnnnnnnnnnnnnnnnnnnnnnnnnnnnnnnnnnnnnnnnnnnnnnnnnnnnnnnnnnnnnnnnnnnnnnnnnnnnnnnnnnnnnnnnnnnnnnnnnnnnnnnnnnnnnnnnnnnnnnnnnnnnnnnnnnnnnnnnnnnnnnnnnnnnnnnnnnnnnnnnnnnnnnnnnnnnnnnnnnnnnnnnnnnnnnnnnnnnnnnnnnnnnnnnnnnnnnnnnnnnnnnnnnnnnnnnnnnnnnnnnnnnnnnnnnnnnnnnnnnnnnnnnnnnnnnnnnnnnnnnnnnnnnnnnnnnnnnnnnnnnnnnnnnnnnnnnnnnnnnnnnnnnnnnnnnnnnnnnnnnnnnnnnnnnnnnnnnnnnnnnnnnnnnnnnnnnnnnnnnnnnnnnnnnnnnnnnnnnnnnnnnnnnnnnnnnnnnnnnnnnnnnnnnnnnnnnnnnnnnnnnnnnnnnnnnnnnnnnnnnnnnnnnnnnnnnnnnnnnnnnnnnnnnnnnnnnnnnnnnnnnnnnnnnnnnnnnnnnnnnnnnnnnnnnnnnnnnnnnnnnnnnnnnnnnnnnnnnnnnnnnnnnnnnnnnnnnnnnnnnnnnnnnnnnnnnnnnnnnnnnnnnnnnnnnnnnnnnnnnnnnnnnnnnnnnnnnnnnnnnnnnnnnnnnnnnnnnnnnnnnnnnnnnnnnnnnnnnnnnnnnnnnnnnnnnnnnnnnnnnnnnnnnnnnnnnnnnnnnnnnnnnnnnnnnnnnnnnnnnnnnnnnnnnnnnnnnnnnnnnnnnnnnnnnnnnnnnnnnnnnnnnnnnnnnnnnnnnnnnnnnnnnnnnnnnnnnnnnnnnnnnnnnnnnnnnnnnnnnnnnnnnnnnnnnnnnnnnnnnnnnnnnnnnnnnnnnnnnnnnnnnnnnnnnnnnnnnnnnnnnnnnnnnnnnnnnnnnnnnnnnnnnnnnnnnnnnnnnnnnnnnnnnnnnnnnnnnnnnnnnnnnnnnnnnnnnnnnnnnnnnnnnnnnnnnnnnnnnnnnnnnnnnnnnnnnnnnnnnnnnnnnnnnnnnnnnnnnnnnnnnnnnnnnnnnnnnnnnnnnnnnnnnnnnnnnnnnnnnnnnnnnnnnnnnnnnnnnnnnnnnnnnnnnnnnnnnnnnnnnnnnnnnnnnnnnnnnnnnnnnnnnnnnnnnnnnnnnnnnnnnnnnnnnnnnnnnnnnnnnnnnnnnnnnnnnnnnnnnnnnnnnnnnnnnnnnnnnnnnnnnnnnnnnnnnnnnnnnnnnnnnnnnnnnnnnnnnnnnnnnnnnnnnnnnnnnnnnnnnnnnnnnnnnnnnnnnnnnnnnnnnnnnnnnnnnnnnnnnnnnnnnnnnnnnnnnnnnnnnnnnnnnnnnnnnnnnnnnnnnnnnnnnnnnnnnnnnnnnnnnnnnnnnnnnnnnnnnnnnnnnnnnnnnnnnnnnnnnnnnnnnnnnnnnnnnnnnnnnnnnnnnnnnnnnnnnnnnnnnnnnnnnnnnnnnnnnnnnnnnnnnnnnnnnnnnnnnnnnnnnnnnnnnnnnnnnnnnnnnnnnnnnnnnnnnnnnnnnnnnnnnnnnnnnnnnnnnnnnnnnnnnnnnnnnnnnnnnnnnnnnnnnnnnnnnnnnnnnnnnnnnnnnnnnnnnnnnnnnnnnnnnnnnnnnnnnnnnnnnnnnnnnnnnnnnnnnnnnnnnnnnnnnnnnnnnnnnnnnnnnnnnnnnnnnnnnnnnnnnnnnnnnnnnnnnnnnnnnnnnnnnnnnnnnnnnnnnnnnnnnnnnnnnnnnnnnnnnnnnnnnnnnnnnnnnnnnnnnnnnnnnnnnnnnnnnnnnnnnnnnnnnnnnnnnnnnnnnnnnnnnnnnnnnnnnnnnnnnnnnnnnnnnnnnnnnnnnnnnnnnnnnnnnnnnnnnnnnnnnnnnnnnnnnnnnnnnnnnnnnnnnnnnnnnnnnnnnnnnnnnnnnnnnnnnnnnnnnnnnnnnnnnnnnnnnnnnnnnnnnnnnnnnnnnnnnnnnnnnnnnnnnnnnnnnnnnnnnnnnnnnnnnnnnnnnnnnnnnnnnnnnnnnnnnnnnnnnnnnnnnnnnnnnnnnnnnnnnnnnnnnnnnnnnnnnnnnnnnnnnnnnnnnnnnnnnnnnnnnnnnnnnnnnnnnnnnnnnnnnnnnnnnnnnnnnnnnnnnnnnnnnnnnnnnnnnnnnnnnnnnnnnnnnnnnnnnnnnnnnnnnnnnnnnnnnnnnnnnnnnnnnnnnnnnnnnnnnnnnnnnnnnnnnnnnnnnnnnnnnnnnnnnnnnnnnnnnnnnnnnnnnnnnnnnnnnnnnnnnnnnnnnnnnnnnnnnnnnnnnnnnnnnnnnnnnnnnnnnnnnnnnnnnnnnnnnnnnnnnnnnnnnnnnnnnnnnnnnnnnnnnnnnnnnnnnnnnnnnnnnnnnnnnnnnnnnnnnnnnnnnnnnnnnnnnnnnnnnnnnnnnnnnnnnnnnnnnnnnnnnnnnnnnnnnnnnnnnnnnnnnnnnnnnnnnnnnnnnnnnnnnnnnnnnnnnnnnnnnnnnnnnnnnnnnnnnnnnnnnnnnnnnnnnnnnnnnnnnnnnnnnnnnnnnnnnnnnnnnnnnnnnnnnnnnnnnnnnnnnnnnnnnnnnnnnnnnnnnnnnnnnnnnnnnnnnnnnnnnnnnnnnnnnnnnnnnnnnnnnnnnnnnnnnnnnnnnnnnnnnnnnnnnnnnnnnnnnnnnnnnnnnnnnnnnnnnnnnnnnnnnnnnnnnnnnnnnnnnnnnnnnnnnnnnnnnnnnnnnnnnnnnnnnnnnnnnnnnnnnnnnnnnnnnnnnnnnnnnnnnnnnnnnnnnnnnnnnnnnnnnnnnnnnnnnnnnnnnnnnnnnnnnnnnnnnnnnnnnnnnnnnnnnnnnnnnnnnnnnnnnnnnnnnnnnnnnnnnnnnnnnnnnnnnnnnnnnnnnnnnnnnnnnnnnnnnnnnnnnnnnnnnnnnnnnnnnnnnnnnnnnnnnnnnnnnnnnnnnnnnnnnnnnnnnnnnnnnnnnnnnnnnnnnnnnnnnnnnnnnnnnnnnnnnnnnnnnnnnnnnnnnnnnnnnnnnnnnnnnnnnnnnnnnnnnnnnnnnnnnnnnnnnnnnnnnnnnnnnnnnnnnnnnnnnnnnnnnnnnnnnnnnnnnnnnnnnnnnnnnnnnnnnnnnnnnnnnnnnnnnnnnnnnnnnnnnnnnnnnnnnnnnnnnnnnnnnnnnnnnnnnnnnnnnnnnnnnnnnnnnnnnnnnnnnnnnnnnnnnnnnnnnnnnnnnnnnnnnnnnnnnnnnnnnnnnnnnnnnnnnnnnnnnnnnnnnnnnnnnnnnnnnnnnnnnnnnnnnnnnnnnnnnnnnnnnnnnnnnnnnnnnnnnnnnnnnnnnnnnnnnnnnnnnnnnnnnnnnnnnnnnnnnnnnnnnnnnnnnnnnnnnnnnnnnnnnnnnnnnnnnnnnnnnnnnnnnnnnnnnnnnnnnnnnnnnnnnnnnnnnnnnnnnnnnnnnnnnnnnnnnnnnnnnnnnnnnnnnnnnnnnnnnnnnnnnnnnnnnnnnnnnnnnnnnnnnnnnnnnnnnnnnnnnnnnnnnnnnnnnnnnnnnnnnnnnnnnnnnnnnnnnnnnnnnnnnnnnnnnnnnnnnnnnnnnnnnnnnnnnnnnnnnnnnnnnnnnnnnnnnnnnnnnnnnnnnnnnnnnnnnnnnnnnnnnnnnnnnnnnnnnnnnnnnnnnnnnnnnnnnnnnnnnnnnnnnnnnnnnnnnnnnnnnnnnnnnnnnnnnnnnnnnnnnnnnnnnnnnnnnnnnnnnnnnnnnnnnnnnnnnnnnnnnnnnnnnnnnnnnnnnnnnnnnnnnnnnnnnnnnnnnnnnnnnnnnnnnnnnnnnnnnnnnnnnnnnnnnnnnnnnnnnnnnnnnnnnnnnnnnnnnnnnnnnnnnnnnnnnnnnnnnnnnnnnnnnnnnnnnnnnnnnnnnnnnnnnnnnnnnnnnnnnnnnnnnnnnnnnnnnnnnnnnnnnnnnnnnnnnnnnnnnnnnnnnnnnnnnnnnnnnnnnnnnnnnnnnnnnnnnnnnnnnnnnnnnnnnnnnnnnnnnnnnnnnnnnnnnnnnnnnnnnnnnnnnnnnnnnnnnnnnnnnnnnnnnnnnnnnnnnnnnnnnnnnnnnnnnnnnnnnnnnnnnnnnnnnnnnnnnnnnnnnnnnnnnnnnnnnnnnnnnnnnnnnnnnnnnnnnnnnnnnnnnnnnnnnnnnnnnnnnnnnnnnnnnnnnnnnnnnnnnnnnnnnnnnnnnnnnnnnnnnnnnnnnnnnnnnnnnnnnnnnnnnnnnnnnnnnnnnnnnnnnnnnnnnnnnnnnnnnnnnnnnnnnnnnnnnnnnnnnnnnnnnnnnnnnnnnnnnnnnnnnnnnnnnnnnnnnnnnnnnnnnnnnnnnnnnnnnnnnnnnnnnnnnnnnnnnnnnnnnnnnnnnnnnnnnnnnnnnnnnnnnnnnnnnnnnnnnnnnnnnnnnnnnnnnnnnnnnnnnnnnnnnnnnnnnnnnnnnnnnnnnnnnnnnnnnnnnnnnnnnnnnnnnnnnnnnnnnnnnnnnnnnnnnnnnnnnnnnnnnnnnnnnnnnnnnnnnnnnnnnnnnnnnnnnnnnnnnnnnnnnnnnnnnnnnnnnnnnnnnnnnnnnnnnnnnnnnnnnnnnnnnnnnnnnnnnnnnnnnnnnnnnnnnnnnnnnnnnnnnnnnnnnnnnnnnnnnnnnnnnnnnnnnnnnnnnnnnnnnnnnnnnnnnnnnnnnnnnnnnnnnnnnnnnnnnnnnnnnnnnnnnnnnnnnnnnnnnnnnnnnnnnnnnnnnnnnnnnnnnnnnnnnnnnnnnnnnnnnnnnnnnnnnnnnnnnnnnnnnnnnnnnnnnnnnnnnnnnnnnnnnnnnnnnnnnnnnnnnnnnnnnnnnnnnnnnnnnnnnnnnnnnnnnnnnnnnnnnnnnnnnnnnnnnnnnnnnnnnnnnnnnnnnnnnnnnnnnnnnnnnnnnnnnnnnnnnnnnnnnnnnnnnnnnnnnnnnnnnnnnnnnnnnnnnnnnnnnnnnnnnnnnnnnnnnnnnnnnnnnnnnnnnnnnnnnnnnnnnnnnnnnnnnnnnnnnnnnnnnnnnnnnnnnnnnnnnnnnnnnnnnnnnnnnnnnnnnnnnnnnnnnnnnnnnnnnnnnnnnnnnnnnnnnnnnnnnnnnnnnnnnnnnnnnnnnnnnnnnnnnnnnnnnnnnnnnnnnnnnnnnnnnnnnnnnnnnnnnnnnnnnnnnnnnnnnnnnnnnnnnnnnnnnnnnnnnnnnnnnnnnnnnnnnnnnnnnnnnnnnnnnnnnnnnnnnnnnnnnnnnnnnnnnnnnnnnnnnnnnnnnnnnnnnnnnnnnnnnnnnnnnnnnnnnnnnnnnnnnnnnnnnnnnnnnnnnnnnnnnnnnnnnnnnnnnnnnnnnnnnnnnnnnnnnnnnnnnnnnnnnnnnnnnnnnnnnnnnnnnnnnnnnnnnnnnnnnnnnnnnnnnnnnnnnnnnnnnnnnnnnnnnnnnnnnnnnnnnnnnnnnnnnnnnnnnnnnnnnnnnnnnnnnnnnnnnnnnnnnnnnnnnnnnnnnnnnnnnnnnnnnnnnnnnnnnnnnnnnnnnnnnnnnnnnnnnnnnnnnnnnnnnnnnnnnnnnnnnnnnnnnnnnnnnnnnnnnnnnnnnnnnnnnnnnnnnnnnnnnnnnnnnnnnnnnnnnnnnnnnnnnnnnnnnnnnnnnnnnnnnnnnnnnnnnnnnnnnnnnnnnnnnnnnnnnnnnnnnnnnnnnnnnnnnnnnnnnnnnnnnnnnnnnnnnnnnnnnnnnnnnnnnnnnnnnnnnnnnnnnnnnnnnnnnnnnnnnnnnnnnnnnnnnnnnnnnnnnnnnnnnnnnnnnnnnnnnnnnnnnnnnnnnnnnnnnnnnnnnnnnnnnnnnnnnnnnnnnnnnnnnnnnnnnnnnnnnnnnnnnnnnnnnnnnnnnnnnnnnnnnnnnnnnnnnnnnnnnnnnnnnnnnnnnnnnnnnnnnnnnnnnnnnnnnnnnnnnnnnnnnnnnnnnnnnnnnnnnnnnnnnnnnnnnnnnnnnnnnnnnnnnnnnnnnnnnnnnnnnnnnnnnnnnnnnnnnnnnnnnnnnnnnnnnnnnnnnnnnnnnnnnnnnnnnnnnnnnnnnnnnnnnnnnnnnnnnnnnnnnnnnnnnnnnnnnnnnnnnnnnnnnnnnnnnnnnnnnnnnnnnnnnnnnnnnnnnnnnnnnnnnnnnnnnnnnnnnnnnnnnnnnnnnnnnnnnnnnnnnnnnnnnnnnnnnnnnnnnnnnnnnnnnnnnnnnnnnnnnnnnnnnnnnnnnnnnnnnnnnnnnnnnnnnnnnnnnnnnnnnnnnnnnnnnnnnnnnnnnnnnnnnnnnnnnnnnnnnnnnnnnnnnnnnnnnnnnnnnnnnnnnnnnnnnnnnnnnnnnnnnnnnnnnnnnnnnnnnnnnnnnnnnnnnnnnnnnnnnnnnnnnnnnnnnnnnnnnnnnnnnnnnnnnnnnnnnnnnnnnnnnnnnnnnnnnnnnnnnnnnnnnnnnnnnnnnnnnnnnnnnnnnnnnnnnnnnnnnnnnnnnnnnnnnnnnnnnnnnnnnnnnnnnnnnnnnnnnnnnnnnnnnnnnnnnnnnnnnnnnnnnnnnnnnnnnnnnnnnnnnnnnnnnnnnnnnnnnnnnnnnnnnnnnnnnnnnnnnnnnnnnnnnnnnnnnnnnnnnnnnnnnnnnnnnnnnnnnnnnnnnnnnnnnnnnnnnnnnnnnnnnnnnnnnnnnnnnnnnnnnnnnnnnnnnnnnnnnnnnnnnnnnnnnnnnnnnnnnnnnnnnnnnnnnnnnnnnnnnnnnnnnnnnnnnnnnnnnnnnnnnnnnnnnnnnnnnnnnnnnnnnnnnnnnnnnnnnnnnnnnnnnnnnnnnnnnnnnnnnnnnnnnnnnnnnnnnnnnnnnnnnnnnnnnnnnnnnnnnnnnnnnnnnnnnnnnnnnnnnnnnnnnnnnnnnnnnnnnnnnnnnnnnnnnnnnnnnnnnnnnnnnnnnnnnnnnnnnnnnnnnnnnnnnnnnnnnnnnnnnnnnnnnnnnnnnnnnnnnnnnnnnnnnnnnnnnnnnnnnnnnnnnnnnnnnnnnnnnnnnnnnnnnnnnnnnnnnnnnnnnnnnnnnnnnnnnnnnnnnnnnnnnnnnnnnnnnnnnnnnnnnnnnnnnnnnnnnnnnnnnnnnnnnnnnnnnnnnnnnnnnnnnnnnnnnnnnnnnnnnnnnnnnnnnnnnnnnnnnnnnnnnnnnnnnnnnnnnnnnnnnnnnnnnnnnnnnnnnnnnnnnnnnnnnnnnnnnnnnnnnnnnnnnnnnnnnnnnnnnnnnnnnnnnnnnnnnnnnnnnnnnnnnnnnnnnnnnnnnnnnnnnnnnnnnnnnnnnnnnnnnnnnnnnnnnnnnnnnnnnnnnnnnnnnnnnnnnnnnnnnnnnnnnnnnnnnnnnnnnnnnnnnnnnnnnnnnnnnnnnnnnnnnnnnnnnnnnnnnnnnnnnnnnnnnnnnnnnnnnnnnnnnnnnnnnnnnnnnnnnnnnnnnnnnnnnnnnnnnnnnnnnnnnnnnnnnnnnnnnnnnnnnnnnnnnnnnnnnnnnnnnnnnnnnnnnnnnnnnnnnnnnnnnnnnnnnnnnnnnnnnnnnnnnnnnnnnnnnnnnnnnnnnnnnnnnnnnnnnnnnnnnnnnnnnnnnnnnnnnnnnnnnnnnnnnnnnnnnnnnnnnnnnnnnnnnnnnnnnnnnnnnnnnnnnnnnnnnnnnnnnnnnnnnnnnnnnnnnnnnnnnnnnnnnnnnnnnnnnnnnnnnnnnnnnnnnnnnnnnnnnnnnnnnnnnnnnnnnnnnnnnnnnnnnnnnnnnnnnnnnnnnnnnnnnnnnnnnnnnnnnnnnnnnnnnnnnnnnnnnnnnnnnnnnnnnnnnnnnnnnnnnnnnnnnnnnnnnnnnnnnnnnnnnnnnnnnnnnnnnnnnnnnnnnnnnnnnnnnnnnnnnnnnnnnnnnnnnnnnnnnnnnnnnnnnnnnnnnnnnnnnnnnnnnnnnnnnnnnnnnnnnnnnnnnnnnnnnnnnnnnnnnnnnnnnnnnnnnnnnnnnnnnnnnnnnnnnnnnnnnnnnnnnnnnnnnnnnnnnnnnnnnnnnnnnnnnnnnnnnnnnnnnnnnnnnnnnnnnnnnnnnnnnnnnnnnnnnnnnnnnnnnnnnnnnnnnnnnnnnnnnnnnnnnnnnnnnnnnnnnnnnnnnnnnnnnnnnnnnnnnnnnnnnnnnnnnnnnnnnnnnnnnnnnnnnnnnnnnnnnnnnnnnnnnnnnnnnnnnnnnnnnnnnnnnnnnnnnnnnnnnnnnnnnnnnnnnnnnnnnnnnnnnnnnnnnnnnnnnnnnnnnnnnnnnnnnnnnnnnnnnnnnnnnnnnnnnnnnnnnnnnnnnnnnnnnnnnnnnnnnnnnnnnnnnnnnnnnnnnnnnnnnnnnnnnnnnnnnnnnnnnnnnnnnnnnnnnnnnnnnnnnnnnnnnnnnnnnnnnnnnnnnnnnnnnnnnnnnnnnnnnnnnnnnnnnnnnnnnnnnnnnnnnnnnnnnnnnnnnnnnnnnnnnnnnnnnnnnnnnnnnnnnnnnnnnnnnnnnnnnnnnnnnnnnnnnnnnnnnnnnnnnnnnnnnnnnnnnnnnnnnnnnnnnnnnnnnnnnnnnnnnnnnnnnnnnnnnnnnnnnnnnnnnnnnnnnnnnnnnnnnnnnnnnnnnnnnnnnnnnnnnnnnnnnnnnnnnnnnnnnnnnnnnnnnnnnnnnnnnnnnnnnnnnnnnnnnnnnnnnnnnnnnnnnnnnnnnnnnnnnnnnnnnnnnnnnnnnnnnnnnnnnnnnnnnnnnnnnnnnnnnnnnnnnnnnnnnnnnnnnnnnnnnnnnnnnnnnnnnnnnnnnnnnnnnnnnnnnnnnnnnnnnnnnnnnnnnnnnnnnnnnnnnnnnnnnnnnnnnnnnnnnnnnnnnnnnnnnnnnnnnnnnnnnnnnnnnnnnnnnnnnnnnnnnnnnnnnnnnnnnnnnnnnnnnnnnnnnnnnnnnnnnnnnnnnnnnnnnnnnnnnnnnnnnnnnnnnnnnnnnnnnnnnnnnnnnnnnnnnnnnnnnnnnnnnnnnnnnnnnnnnnnnnnnnnnnnnnnnnnnnnnnnnnnnnnnnnnnnnnnnnnnnnnnnnnnnnnnnnnnnnnnnnnnnnnnnnnnnnnnnnnnnnnnnnnnnnnnnnnnnnnnnnnnnnnnnnnnnnnnnnnnnnnnnnnnnnnnnnnnnnnnnnnnnnnnnnnnnnnnnnnnnnnnnnnnnnnnnnnnnnnnnnnnnnnnnnnnnnnnnnnnnnnnnnnnnnnnnnnnnnnnnnnnnnnnnnnnnnnnnnnnnnnnnnnnnnnnnnnnnnnnnnnnnnnnnnnnnnnnnnnnnnnnnnnnnnnnnnnnnnnnnnnnnnnnnnnnnnnnnnnnnnnnnnnnnnnnnnnnnnnnnnnnnnnnnnnnnnnnnnnnnnnnnnnnnnnnnnnnnnnnnnnnnnnnnnnnnnnnnnnnnnnnnnnnnnnnnnnnnnnnnnnnnnnnnnnnnnnnnnnnnnnnnnnnnnnnnnnnnnnnnnnnnnnnnnnnnnnnnnnnnnnnnnnnnnnnnnnnnnnnnnnnnnnnnnnnnnnnnnnnnnnnnnnnnnnnnnnnnnnnnnnnnnnnnnnnnnnnnnnnnnnnnnnnnnnnnnnnnnnnnnnnnnnnnnnnnnnnnnnnnnnnnnnnnnnnnnnnnnnnnnnnnnnnnnnnnnnnnnnnnnnnnnnnnnnnnnnnnnnnnnnnnnnnnnnnnnnnnnnnnnnnnnnnnnnnnnnnnnnnnnnnnnnnnnnnnnnnnnnnnnnnnnnnnnnnnnnnnnnnnnnnnnnnnnnnnnnnnnnnnnnnnnnnnnnnnnnnnnnnnnnnnnnnnnnnnnnnnnnnnnnnnnnnnnnnnnnnnnnnnnnnnnnnnnnnnnnnnnnnnnnnnnnnnnnnnnnnnnnnnnnnnnnnnnnnnnnnnnnnnnnnnnnnnnnnnnnnnnnnnnnnnnnnnnnnnnnnnnnnnnnnnnnnnnnnnnnnnnnnnnnnnnnnnnnnnnnnnnnnnnnnnnnnnnnnnnnnnnnnnnnnnnnnnnnnnnnnnnnnnnnnnnnnnnnnnnnnnnnnnnnnnnnnnnnnnnnnnnnnnnnnnnnnnnnnnnnnnnnnnnnnnnnnnnnnnnnnnnnnnnnnnnnnnnnnnnnnnnnnnnnnnnnnnnnnnnnnnnnnnnnnnnnnnnnnnnnnnnnnnnnnnnnnnnnnnnnnnnnnnnnnnnnnnnnnnnnnnnnnnnnnnnnnnnnnnnnnnnnnnnnnnnnnnnnnnnnnnnnnnnnnnnnnnnnnnnnnnnnnnnnnnnnnnnnnnnnnnnnnnnnnnnnnnnnnnnnnnnnnnnnnnnnnnnnnnnnnnnnnnnnnnnnnnnnnnnnnnnnnnnnnnnnnnnnnnnnnnnnnnnnnnnnnnnnnnnnnnnnnnnnnnnnnnnnnnnnnnnnnnnnnnnnnnnnnnnnnnnnnnnnnnnnnnnnnnnnnnnnnnnnnnnnnnnnnnnnnnnnnnnnnnnnnnnnnnnnnnnnnnnnnnnnnnnnnnnnnnnnnnnnnnnnnnnnnnnnnnnnnnnnnnnnnnnnnnnnnnnnnnnnnnnnnnnnnnnnnnnnnnnnnnnnnnnnnnnnnnnnnnnnnnnnnnnnnnnnnnnnnnnnnnnnnnnnnnnnnnnnnnnnnnnnnnnnnnnnnnnnnnnnnnnnnnnnnnnnnnnnnnnnnnnnnnnnnnnnnnnnnnnnnnnnnnnnnnnnnnnnnnnnnnnnnnnnnnnnnnnnnnnnnnnnnnnnnnnnnnnnnnnnnnnnnnnnnnnnnnnnnnnnnnnnnnnnnnnnnnnnnnnnnnnnnnnnnnnnnnnnnnnnnnnnnnnnnnnnnnnnnnnnnnnnnnnnnnnnnnnnnnnnnnnnnnnnnnnnnnnnnnnnnnnnnnnnnnnnnnnnnnnnnnnnnnnnnnnnnnnnnnnnnnnnnnnnnnnnnnnnnnnnnnnnnnnnnnnnnnnnnnnnnnnnnnnnnnnnnnnnnnnnnnnnnnnnnnnnnnnnnnnnnnnnnnnnnnnnnnnnnnnnnnnnnnnnnnnnnnnnnnnnnnnnnnnnnnnnnnnnnnnnnnnnnnnnnnnnnnnnnnnnnnnnnnnnnnnnnnnnnnnnnnnnnnnnnnnnnnnnnnnnnnnnnnnnnnnnnnnnnnnnnnnnnnnnnnnnnnnnnnnnnnnnnnnnnnnnnnnnnnnnnnnnnnnnnnnnnnnnnnnnnnnnnnnnnnnnnnnnnnnnnnnnnnnnnnnnnnnnnnnnnnnnnnnnnnnnnnnnnnnnnnnnnnnnnnnnnnnnnnnnnnnnnnnnnnnnnnnnnnnnnnnnnnnnnnnnnnnnnnnnnnnnnnnnnnnnnnnnnnnnnnnnnnnnnnnnnnnnnnnnnnnnnnnnnnnnnnnnnnnnnnnnnnnnnnnnnnnnnnnnnnnnnnnnnnnnnnnnnnnnnnnnnnnnnnnnnnnnnnnnnnnnnnnnnnnnnnnnnnnnnnnnnnnnnnnnnnnnnnnnnnnnnnnnnnnnnnnnnnnnnnnnnnnnnnnnnnnnnnnnnnnnnnnnnnnnnnnnnnnnnnnnnnnnnnnnnnnnnnnnnnnnnnnnnnnnnnnnnnnnnnnnnnnnnnnnnnnnnnnnnnnnnnnnnnnnnnnnnnnnnnnnnnnnnnnnnnnnnnnnnnnnnnnnnnnnnnnnnnnnnnnnnnnnnnnnnnnnnnnnnnnnnnnnnnnnnnnnnnnnnnnnnnnnnnnnnnnnnnnnnnnnnnnnnnnnnnnnnnnnnnnnnnnnnnnnnnnnnnnnnnnnnnnnnnnnnnnnnnnnnnnnnnnnnnnnnnnnnnnnnnnnnnnnnnnnnnnnnnnnnnnnnnnnnnnnnnnnnnnnnnnnnnnnnnnnnnnnnnnnnnnnnnnnnnnnnnnnnnnnnnnnnnnnnnnnnnnnnnnnnnnnnnnnnnnnnnnnnnnnnnnnnnnnnnnnnnnnnnnnnnnnnnnnnnnnnnnnnnnnnnnnnnnnnnnnnnnnnnnnnnnnnnnnnnnnnnnnnnnnnnnnnnnnnnnnnnnnnnnnnnnnnnnnnnnnnnnnnnnnnnnnnnnnnnnnnnnnnnnnnnnnnnnnnnnnnnnnnnnnnnnnnnnnnnnnnnnnnnnnnnnnnnnnnnnnnnnnnnnnnnnnnnnnnnnnnnnnnnnnnnnnnnnnnnnnnnnnnnnnnnnnnnnnnnnnnnnnnnnnnnnnnnnnnnnnnnnnnnnnnnnnnnnnnnnnnnnnnnnnnnnnnnnnnnnnnnnnnnnnnnnnnnnnnnnnnnnnnnnnnnnnnnnnnnnnnnnnnnnnnnnnnnnnnnnnnnnnnnnnnnnnnnnnnnnnnnnnnnnnnnnnnnnnnnnnnnnnnnnnnnnnnnnnnnnnnnnnnnnnnnnnnnnnnnnnnnnnnnnnnnnnnnnnnnnnnnnnnnnnnnnnnnnnnnnnnnnnnnnnnnnnnnnnnnnnnnnnnnnnnnnnnnnnnnnnnnnnnnnnnnnnnnnnnnnnnnnnnnnnnnnnnnnnnnnnnnnnnnnnnnnnnnnnnnnnnnnnnnnnnnnnnnnnnnnnnnnnnnnnnnnnnnnnnnnnnnnnnnnnnnnnnnnnnnnnnnnnnnnnnnnnnnnnnnnnnnnnnnnnnnnnnnnnnnnnnnnnnnnnnnnnnnnnnnnnnnnnnnnnnnnnnnnnnnnnnnnnnnnnnnnnnnnnnnnnnnnnnnnnnnnnnnnnnnnnnnnnnnnnnnnnnnnnnnnnnnnnnnnnnnnnnnnnnnnnnnnnnnnnnnnnnnnnnnnnnnnnnnnnnnnnnnnnnnnnnnnnnnnnnnnnnnnnnnnnnnnnnnnnnnnnnnnnnnnnnnnnnnnnnnnnnnnnnnnnnnnnnnnnnnnnnnnnnnnnnnnnnnnnnnnnnnnnnnnnnnnnnnnnnnnnnnnnnnnnnnnnnnnnnnnnnnnnnnnnnnnnnnnnnnnnnnnnnnnnnnnnnnnnnnnnnnnnnnnnnnnnnnnnnnnnnnnnnnnnnnnnnnnnnnnnnnnnnnnnnnnnnnnnnnnnnnnnnnnnnnnnnnnnnnnnnnnnnnnnnnnnnnnnnnnnnnnnnnnnnnnnnnnnnnnnnnnnnnnnnnnnnnnnnnnnnnnnnnnnnnnnnnnnnnnnnnnnnnnnnnnnnnnnnnnnnnnnnnnnnnnnnnnnnnnnnnnnnnnnnnnnnnnnnnnnnnnnnnnnnnnnnnnnnnnnnnnnnnnnnnnnnnnnnnnnnnnnnnnnnnnnnnnnnnnnnnnnnnnnnnnnnnnnnnnnnnnnnnnnnnnnnnnnnnnnnnnnnnnnnnnnnnnnnnnnnnnnnnnnnnnnnnnnnnnnnnnnnnnnnnnnnnnnnnnnnnnnnnnnnnnnnnnnnnnnnnnnnnnnnnnnnnnnnnnnnnnnnnnnnnnnnnnnnnnnnnnnnnnnnnnnnnnnnnnnnnnnnnnnnnnnnnnnnnnnnnnnnnnnnnnnnnnnnnnnnnnnnnnnnnnnnnnnnnnnnnnnnnnnnnnnnnnnnnnnnnnnnnnnnnnnnnnnnnnnnnnnnnnnnnnnnnnnnnnnnnnnnnnnnnnnnnnnnnnnnnnnnnnnnnnnnnnnnnnnnnnnnnnnnnnnnnnnnnnnnnnnnnnnnnnnnnnnnnnnnnnnnnnnnnnnnnnnnnnnnnnnnnnnnnnnnnnnnnnnnnnnnnnnnnnnnnnnnnnnnnnnnnnnnnnnnnnnnnnnnnnnnnnnnnnnnnnnnnnnnnnnnnnnnnnnnnnnnnnnnnnnnnnnnnnnnnnnnnnnnnnnnnnnnnnnnnnnnnnnnnnnnnnnnnnnnnnnnnnnnnnnnnnnnnnnnnnnnnnnnnnnnnnnnnnnnnnnnnnnnnnnnnnnnnnnnnnnnnnnnnnnnnnnnnnnnnnnnnnnnnnnnnnnnnnnnnnnnnnnnnnnnnnnnnnnnnnnnnnnnnnnnnnnnnnnnnnnnnnnnnnnnnnnnnnnnnnnnnnnnnnnnnnnnnnnnnnnnnnnnnnnnnnnnnnnnnnnnnnnnnnnnnnnnnnnnnnnnnnnnnnnnnnnnnnnnnnnnnnnnnnnnnnnnnnnnnnnnnnnnnnnnnnnnnnnnnnnnnnnnnnnnnnnnnnnnnnnnnnnnnnnnnnnnnnnnnnnnnnnnnnnnnnnnnnnnnnnnnnnnnnnnnnnnnnnnnnnnnnnnnnnnnnnnnnnnnnnnnnnnnnnnnnnnnnnnnnnnnnnnnnnnnnnnnnnnnnnnnnnnnnnnnnnnnnnnnnnnnnnnnnnnnnnnnnnnnnnnnnnnnnnnnnnnnnnnnnnnnnnnnnnnnnnnnnnnnnnnnnnnnnnnnnnnnnnnnnnnnnnnnnnnnnnnnnnnnnnnnnnnnnnnnnnnnnnnnnnnnnnnnnnnnnnnnnnnnnnnnnnnnnnnnnnnnnnnnnnnnnnnnnnnnnnnnnnnnnnnnnnnnnnnnnnnnnnnnnnnnnnnnnnnnnnnnnnnnnnnnnnnnnnnnnnnnnnnnnnnnnnnnnnnnnnnnnnnnnnnnnnnnnnnnnnnnnnnnnnnnnnnnnnnnnnnnnnnnnnnnnnnnnnnnnnnnnnnnnnnnnnnnnnnnnnnnnnnnnnnnnnnnnnnnnnnnnnnnnnnnnnnnnnnnnnnnnnnnnnnnnnnnnnnnnnnnnnnnnnnnnnnnnnnnnnnnnnnnnnnnnnnnnnnnnnnnnnnnnnnnnnnnnnnnnnnnnnnnnnnnnnnnnnnnnnnnnnnnnnnnnnnnnnnnnnnnnnnnnnnnnnnnnnnnnnnnnnnnnnnnnnnnnnnnnnnnnnnnnnnnnnnnnnnnnnnnnnnnnnnnnnnnnnnnnnnnnnnnnnnnnnnnnnnnnnnnnnnnnnnnnnnnnnnnnnnnnnnnnnnnnnnnnnnnnnnnnnnnnnnnnnnnnnnnnnnnnnnnnnnnnnnnnnnnnnnnnnnnnnnnnnnnnnnnnnnnnnnnnnnnnnnnnnnnnnnnnnnnnnnnnnnnnnnnnnnnnnnnnnnnnnnnnnnnnnnnnnnnnnnnnnnnnnnnnnnnnnnnnnnnnnnnnnnnnnnnnnnnnnnnnnnnnnnnnnnnnnnnnnnnnnnnnnnnnnnnnnnnnnnnnnnnnnnnnnnnnnnnnnnnnnnnnnnnnnnnnnnnnnnnnnnnnnnnnnnnnnnnnnnnnnnnnnnnnnnnnnnnnnnnnnnnnnnnnnnnnnnnnnnnnnnnnnnnnnnnnnnnnnnnnnnnnnnnnnnnnnnnnnnnnnnnnnnnnnnnnnnnnnnnnnnnnnnnnnnnnnnnnnnnnnnnnnnnnnnnnnnnnnnnnnnnnnnnnnnnnnnnnnnnnnnnnnnnnnnnnnnnnnnnnnnnnnnnnnnnnnnnnnnnnnnnnnnnnnnnnnnnnnnnnnnnnnnnnnnnnnnnnnnnnnnnnnnnnnnnnnnnnnnnnnnnnnnnnnnnnnnnnnnnnnnnnnnnnnnnnnnnnnnnnnnnnnnnnnnnnnnnnnnnnnnnnnnnnnnnnnnnnnnnnnnnnnnnnnnnnnnnnnnnnnnnnnnnnnnnnnnnnnnnnnnnnnnnnnnnnnnnnnnnnnnnnnnnnnnnnnnnnnnnnnnnnnnnnnnnnnnnnnnnnnnnnnnnnnnnnnnnnnnnnnnnnnnnnnnnnnnnnnnnnnnnnnnnnnnnnnnnnnnnnnnnnnnnnnnnnnnnnnnnnnnnnnnnnnnnnnnnnnnnnnnnnnnnnnnnnnnnnnnnnnnnnnnnnnnnnnnnnnnnnnnnnnnnnnnnnnnnnnnnnnnnnnnnnnnnnnnnnnnnnnnnnnnnnnnnnnnnnnnnnnnnnnnnnnnnnnnnnnnnnnnnnnnnnnnnnnnnnnnnnnnnnnnnnnnnnnnnnnnnnnnnnnnnnnnnnnnnnnnnnnnnnnnnnnnnnnnnnnnnnnnnnnnnnnnnnnnnnnnnnnnnnnnnnnnnnnnnnnnnnnnnnnnnnnnnnnnnnnnnnnnnnnnnnnnnnnnnnnnnnnnnnnnnnnnnnnnnnnnnnnnnnnnnnnnnnnnnnnnnnnnnnnnnnnnnnnnnnnnnnnnnnnnnnnnnnnnnnnnnnnnnnnnnnnnnnnnnnnnnnnnnnnnnnnnnnnnnnnnnnnnnnnnnnnnnnnnnnnnnnnnnnnnnnnnnnnnnnnnnnnnnnnnnnnnnnnnnnnnnnnnnnnnnnnnnnnnnnnnnnnnnnnnnnnnnnnnnnnnnnnnnnnnnnnnnnnnnnnnnnnnnnnnnnnnnnnnnnnnnnnnnnnnnnnnnnnnnnnnnnnnnnnnnnnnnnnnnnnnnnnnnnnnnnnnnnnnnnnnnnnnnnnnnnnnnnnnnnnnnnnnnnnnnnnnnnnnnnnnnnnnnnnnnnnnnnnnnnnnnnnnnnnnnnnnnnnnnnnnnnnnnnnnnnnnnnnnnnnnnnnnnnnnnnnnnnnnnnnnnnnnnnnnnnnnnnnnnnnnnnnnnnnnnnnnnnnnnnnnnnnnnnnnnnnnnnnnnnnnnnnnnnnnnnnnnnnnnnnnnnnnnnnnnnnnnnnnnnnnnnnnnnnnnnnnnnnnnnnnnnnnnnnnnnnnnnnnnnnnnnnnnnnnnnnnnnnnnnnnnnnnnnnnnnnnnnnnnnnnnnnnnnnnnnnnnnnnnnnnnnnnnnnnnnnnnnnnnnnnnnnnnnnnnnnnnnnnnnnnnnnnnnnnnnnnnnnnnnnnnnnnnnnnnnnnnnnnnnnnnnnnnnnnnnnnnnnnnnnnnnnnnnnnnnnnnnnnnnnnnnnnnnnnnnnnnnnnnnnnnnnnnnnnnnnnnnnnnnnnnnnnnnnnnnnnnnnnnnnnnnnnnnnnnnnnnnnnnnnnnnnnnnnnnnnnnnnnnnnnnnnnnnnnnnnnnnnnnnnnnnnnnnnnnnnnnnnnnnnnnnnnnnnnnnnnnnnnnnnnnnnnnnnnnnnnnnnnnnnnnnnnnnnnnnnnnnnnnnnnnnnnnnnnnnnnnnnnnnnnnnnnnnnnnnnnnnnnnnnnnnnnnnnnnnnnnnnnnnnnnnnnnnnnnnnnnnnnnnnnnnnnnnnnnnnnnnnnnnnnnnnnnnnnnnnnnnnnnnnnnnnnnnnnnnnnnnnnnnnnnnnnnnnnnnnnnnnnnnnnnnnnnnnnnnnnnnnnnnnnnnnnnnnnnnnnnnnnnnnnnnnnnnnnnnnnnnnnnnnnnnnnnnnnnnnnnnnnnnnnnnnnnnnnnnnnnnnnnnnnnnnnnnnnnnnnnnnnnnnnnnnnnnnnnnnnnnnnnnnnnnnnnnnnnnnnnnnnnnnnnnnnnnnnnnnnnnnnnnnnnnnnnnnnnnnnnnnnnnnnnnnnnnnnnnnnnnnnnnnnnnnnnnnnnnnnnnnnnnnnnnnnnnnnnnnnnnnnnnnnnnnnnnnnnnnnnnnnnnnnnnnnnnnnnnnnnnnnnnnnnnnnnnnnnnnnnnnnnnnnnnnnnnnnnnnnnnnnnnnnnnnnnnnnnnnnnnnnnnnnnnnnnnnnnnnnnnnnnnnnnnnnnnnnnnnnnnnnnnnnnnnnnnnnnnnnnnnnnnnnnnnnnnnnnnnnnnnnnnnnnnnnnnnnnnnnnnnnnnnnnnnnnnnnnnnnnnnnnnnnnnnnnnnnnnnnnnnnnnnnnnnnnnnnnnnnnnnnnnnnnnnnnnnnnnnnnnnnnnnnnnnnnnnnnnnnnnnnnnnnnnnnnnnnnnnnnnnnnnnnnnnnnnnnnnnnnnnnnnnnnnnnnnnnnnnnnnnnnnnnnnnnnnnnnnnnnnnnnnnnnnnnnnnnnnnnnnnnnnnnnnnnnnnnnnnnnnnnnnnnnnnnnnnnnnnnnnnnnnnnnnnnnnnnnnnnnnnnnnnnnnnnnnnnnnnnnnnnnnnnnnnnnnnnnnnnnnnnnnnnnnnnnnnnnnnnnnnnnnnnnnnnnnnnnnnnnnnnnnnnnnnnnnnnnnnnnnnnnnnnnnnnnnnnnnnnnnnnnnnnnnnnnnnnnnnnnnnnnnnnnnnnnnnnnnnnnnnnnnnnnnnnnnnnnnnnnnnnnnnnnnnnnnnnnnnnnnnnnnnnnnnnnnnnnnnnnnnnnnnnnnnnnnnnnnnnnnnnnnnnnnnnnnnnnnnnnnnnnnnnnnnnnnnnnnnnnnnnnnnnnnnnnnnnnnnnnnnnnnnnnnnnnnnnnnnnnnnnnnnnnnnnnnnnnnnnnnnnnnnnnnnnnnnnnnnnnnnnnnnnnnnnnnnnnnnnnnnnnnnnnnnnnnnnnnnnnnnnnnnnnnnnnnnnnnnnnnnnnnnnnnnnnnnnnnnnnnnnnnnnnnnnnnnnnnnnnnnnnnnnnnnnnnnnnnnnnnnnnnnnnnnnnnnnnnnnnnnnnnnnnnnnnnnnnnnnnnnnnnnnnnnnnnnnnnnnnnnnnnnnnnnnnnnnnnnnnnnnnnnnnnnnnnnnnnnnnnnnnnnnnnnnnnnnnnnnnnnnnnnnnnnnnnnnnnnnnnnnnnnnnnnnnnnnnnnnnnnnnnnnnnnnnnnnnnnnnnnnnnnnnnnnnnnnnnnnnnnnnnnnnnnnnnnnnnnnnnnnnnnnnnnnnnnnnnnnnnnnnnnnnnnnnnnnnnnnnnnnnnnnnnnnnnnnnnnnnnnnnnnnnnnnnnnnnnnnnnnnnnnnnnnnnnnnnnnnnnnnnnnnnnnnnnnnnnnnnnnnnnnnnnnnnnnnnnnnnnnnnnnnnnnnnnnnnnnnnnnnnnnnnnnnnnnnnnnnnnnnnnnnnnnnnnnnnnnnnnnnnnnnnnnnnnnnnnnnnnnnnnnnnnnnnnnnnnnnnnnnnnnnnnnnnnnnnnnnnnnnnnnnnnnnnnnnnnnnnnnnnnnnnnnnnnnnnnnnnnnnnnnnnnnnnnnnnnnnnnnnnnnnnnnnnnnnnnnnnnnnnnnnnnnnnnnnnnnnnnnnnnnnnnnnnnnnnnnnnnnnnnnnnnnnnnnnnnnnnnnnnnnnnnnnnnnnnnnnnnnnnnnnnnnnnnnnnnnnnnnnnnnnnnnnnnnnnnnnnnnnnnnnnnnnnnnnnnnnnnnnnnnnnnnnnnnnnnnnnnnnnnnnnnnnnnnnnnnnnnnnnnnnnnnnnnnnnnnnnnnnnnnnnnnnnnnnnnnnnnnnnnnnnnnnnnnnnnnnnnnnnnnnnnnnnnnnnnnnnnnnnnnnnnnnnnnnnnnnnnnnnnnnnnnnnnnnnnnnnnnnnnnnnnnnnnnnnnnnnnnnnnnnnnnnnnnnnnnnnnnnnnnnnnnnnnnnnnnnnnnnnnnnnnnnnnnnnnnnnnnnnnnnnnnnnnnnnnnnnnnnnnnnnnnnnnnnnnnnnnnnnnnnnnnnnnnnnnnnnnnnnnnnnnnnnnnnnnnnnnnnnnnnnnnnnnnnnnnnnnnnnnnnnnnnnnnnnnnnnnnnnnnnnnnnnnnnnnnnnnnnnnnnnnnnnnnnnnnnnnnnnnnnnnnnnnnnnnnnnnnnnnnnnnnnnnnnnnnnnnnnnnnnnnnnnnnnnnnnnnnnnnnnnnnnnnnnnnnnnnnnnnnnnnnnnnnnnnnnnnnnnnnnnnnnnnnnnnnnnnnnnnnnnnnnnnnnnnnnnnnnnnnnnnnnnnnnnnnnnnnnnnnnnnnnnnnnnnnnnnnnnnnnnnnnnnnnnnnnnnnnnnnnnnnnnnnnnnnnnnnnnnnnnnnnnnnnnnnnnnnnnnnnnnnnnnnnnnnnnnnnnnnnnnnnnnnnnnnnnnnnnnnnnnnnnnnnnnnnnnnnnnnnnnnnnnnnnnnnnnnnnnnnnnnnnnnnnnnnnnnnnnnnnnnnnnnnnnnnnnnnnnnnnnnnnnnnnnnnnnnnnnnnnnnnnnnnnnnnnnnnnnnnnnnnnnnnnnnnnnnnnnnnnnnnnnnnnnnnnnnnnnnnnnnnnnnnnnnnnnnnnnnnnnnnnnnnnnnnnnnnnnnnnnnnnnnnnnnnnnnnnnnnnnnnnnnnnnnnnnnnnnnnnnnnnnnnnnnnnnnnnnnnnnnnnnnnnnnnnnnnnnnnnnnnnnnnnnnnnnnnnnnnnnnnnnnnnnnnnnnnnnnnnnnnnnnnnnnnnnnnnnnnnnnnnnnnnnnnnnnnnnnnnnnnnnnnnnnnnnnnnnnnnnnnnnnnnnnnnnnnnnnnnnnnnnnnnnnnnnnnnnnnnnnnnnnnnnnnnnnnnnnnnnnnnnnnnnnnnnnnnnnnnnnnnnnnnnnnnnnnnnnnnnnnnnnnnnnnnnnnnnnnnnnnnnnnnnnnnnnnnnnnnnnnnnnnnnnnnnnnnnnnnnnnnnnnnnnnnnnnnnnnnnnnnnnnnnnnnnnnnnnnnnnnnnnnnnnnnnnnnnnnnnnnnnnnnnnnnnnnnnnnnnnnnnnnnnnnnnnnnnnnnnnnnnnnnnnnnnnnnnnnnnnnnnnnnnnnnnnnnnnnnnnnnnnnnnnnnnnnnnnnnnnnnnnnnnnnnnnnnnnnnnnnnnnnnnnnnnnnnnnnnnnnnnnnnnnnnnnnnnnnnnnnnnnnnnnnnnnnnnnnnnnnnnnnnnnnnnnnnnnnnnnnnnnnnnnnnnnnnnnnnnnnnnnnnnnnnnnnnnnnnnnnnnnnnnnnnnnnnnnnnnnnnnnnnnnnnnnnnnnnnnnnnnnnnnnnnnnnnnnnnnnnnnnnnnnnnnnnnnnnnnnnnnnnnnnnnnnnnnnnnnnnnnnnnnnnnnnnnnnnnnnnnnnnnnnnnnnnnnnnnnnnnnnnnnnnnnnnnnnnnnnnnnnnnnnnnnnnnnnnnnnnnnnnnnnnnnnnnnnnnnnnnnnnnnnnnnnnnnnnnnnnnnnnnnnnnnnnnnnnnnnnnnnnnnnnnnnnnnnnnnnnnnnnnnnnnnnnnnnnnnnnnnnnnnnnnnnnnnnnnnnnnnnnnnnnnnnnnnnnnnnnnnnnnnnnnnnnnnnnnnnnnnnnnnnnnnnnnnnnnnnnnnnnnnnnnnnnnnnnnnnnnnnnnnnnnnnnnnnnnnnnnnnnnnnnnnnnnnnnnnnnnnnnnnnnnnnnnnnnnnnnnnnnnnnnnnnnnnnnnnnnnnnnnnnnnnnnnnnnnnnnnnnnnnnnnnnnnnnnnnnnnnnnnnnnnnnnnnnnnnnnnnnnnnnnnnnnnnnnnnnnnnnnnnnnnnnnnnnnnnnnnnnnnnnnnnnnnnnnnnnnnnnnnnnnnnnnnnnnnnnnnnnnnnnnnnnnnnnnnnnnnnnnnnnnnnnnnnnnnnnnnnnnnnnnnnnnnnnnnnnnnnnnnnnnnnnnnnnnnnnnnnnnnnnnnnnnnnnnnnnnnnnnnnnnnnnnnnnnnnnnnnnnnnnnnnnnnnnnnnnnnnnnnnnnnnnnnnnnnnnnnnnnnnnnnnnnnnnnnnnnnnnnnnnnnnnnnnnnnnnnnnnnnnnnnnnnnnnnnnnnnnnnnnnnnnnnnnnnnnnnnnnnnnnnnnnnnnnnnnnnnnnnnnnnnnnnnnnnnnnnnnnnnnnnnnnnnnnnnnnnnnnnnnnnnnnnnnnnnnnnnnnnnnnnnnnnnnnnnnnnnnnnnnnnnnnnnnnnnnnnnnnnnnnnnnnnnnnnnnnnnnnnnnnnnnnnnnnnnnnnnnnnnnnnnnnnnnnnnnnnnnnnnnnnnnnnnnnnnnnnnnnnnnnnnnnnnnnnnnnnnnnnnnnnnnnnnnnnnnnnnnnnnnnnnnnnnnnnnnnnnnnnnnnnnnnnnnnnnnnnnnnnnnnnnnnnnnnnnnnnnnnnnnnnnnnnnnnnnnnnnnnnnnnnnnnnnnnnnnnnnnnnnnnnnnnnnnnnnnnnnnnnnnnnnnnnnnnnnnnnnnnnnnnnnnnnnnnnnnnnnnnnnnnnnnnnnnnnnnnnnnnnnnnnnnnnnnnnnnnnnnnnnnnnnnnnnnnnnnnnnnnnnnnnnnnnnnnnnnnnnnnnnnnnnnnnnnnnnnnnnnnnnnnnnnnnnnnnnnnnnnnnnnnnnnnnnnnnnnnnnnnnnnnnnnnnnnnnnnnnnnnnnnnnnnnnnnnnnnnnnnnnnnnnnnnnnnnnnnnnnnnnnnnnnnnnnnnnnnnnnnnnnnnnnnnnnnnnnnnnnnnnnnnnnnnnnnnnnnnnnnnnnnnnnnnnnnnnnnnnnnnnnnnnnnnnnnnnnnnnnnnnnnnnnnnnnnnnnnnnnnnnnnnnnnnnnnnnnnnnnnnnnnnnnnnnnnnnnnnnnnnnnnnnnnnnnnnnnnnnnnnnnnnnnnnnnnnnnnnnnnnnnnnnnnnnnnnnnnnnnnnnnnnnnnnnnnnnnnnnnnnnnnnnnnnnnnnnnnnnnnnnnnnnnnnnnnnnnnnnnnnnnnnnnnnnnnnnnnnnnnnnnnnnnnnnnnnnnnnnnnnnnnnnnnnnnnnnnnnnnnnnnnnnnnnnnnnnnnnnnnnnnnnnnnnnnnnnnnnnnnnnnnnnnnnnnnnnnnnnnnnnnnnnnnnnnnnnnnnnnnnnnnnnnnnnnnnnnnnnnnnnnnnnnnnnnnnnnnnnnnnnnnnnnnnnnnnnnnnnnnnnnnnnnnnnnnnnnnnnnnnnnnnnnnnnnnnnnnnnnnnnnnnnnnnnnnnnnnnnnnnnnnnnnnnnnnnnnnnnnnnnnnnnnnnnnnnnnnnnnnnnnnnnnnnnnnnnnnnnnnnnnnnnnnnnnnnnnnnnnnnnnnnnnnnnnnnnnnnnnnnnnnnnnnnnnnnnnnnnnnnnnnnnnnnnnnnnnnnnnnnnnnnnnnnnnnnnnnnnnnnnnnnnnnnnnnnnnnnnnnnnnnnnnnnnnnnnnnnnnnnnnnnnnnnnnnnnnnnnnnnnnnnnnnnnnnnnnnnnnnnnnnnnnnnnnnnnnnnnnnnnnnnnnnnnnnnnnnnnnnnnnnnnnnnnnnnnnnnnnnnnnnnnnnnnnnnnnnnnnnnnnnnnnnnnnnnnnnnnnnnnnnnnnnnnnnnnnnnnnnnnnnnnnnnnnnnnnnnnnnnnnnnnnnnnnnnnnnnnnnnnnnnnnnnnnnnnnnnnnnnnnnnnnnnnnnnnnnnnnnnnnnnnnnnnnnnnnnnnnnnnnnnnnnnnnnnnnnnnnnnnnnnnnnnnnnnnnnnnnnnnnnnnnnnnnnnnnnnnnnnnnnnnnnnnnnnnnnnnnnnnnnnnnnnnnnnnnnnnnnnnnnnnnnnnnnnnnnnnnnnnnnnnnnnnnnnnnnnnnnnnnnnnnnnnnnnnnnnnnnnnnnnnnnnnnnnnnnnnnnnnnnnnnnnnnnnnnnnnnnnnnnnnnnnnnnnnnnnnnnnnnnnnnnnnnnnnnnnnnnnnnnnnnnnnnnnnnnnnnnnnnnnnnnnnnnnnnnnnnnnnnnnnnnnnnnnnnnnnnnnnnnnnnnnnnnnnnnnnnnnnnnnnnnnnnnnnnnnnnnnnnnnnnnnnnnnnnnnnnnnnnnnnnnnnnnnnnnnnnnnnnnnnnnnnnnnnnnnnnnnnnnnnnnnnnnnnnnnnnnnnnnnnnnnnnnnnnnnnnnnnnnnnnnnnnnnnnnnnnnnnnnnnnnnnnnnnnnnnnnnnnnnnnnnnnnnnnnnnnnnnnnnnnnnnnnnnnnnnnnnnnnnnnnnnnnnnnnnnnnnnnnnnnnnnnnnnnnnnnnnnnnnnnnnnnnnnnnnnnnnnnnnnnnnnnnnnnnnnnnnnnnnnnnnnnnnnnnnnnnnnnnnnnnnnnnnnnnnnnnnnnnnnnnnnnnnnnnnnnnnnnnnnnnnnnnnnnnnnnnnnnnnnnnnnnnnnnnnnnnnnnnnnnnnnnnnnnnnnnnnnnnnnnnnnnnnnnnnnnnnnnnnnnnnnnnnnnnnnnnnnnnnnnnnnnnnnnnnnnnnnnnnnnnnnnnnnnnnnnnnnnnnnnnnnnnnnnnnnnnnnnnnnnnnnnnnnnnnnnnnnnnnnnnnnnnnnnnnnnnnnnnnnnnnnnnnnnnnnnnnnnnnnnnnnnnnnnnnnnnnnnnnnnnnnnnnnnnnnnnnnnnnnnnnnnnnnnnnnnnnnnnnnnnnnnnnnnnnnnnnnnnnnnnnnnnnnnnnnnnnnnnnnnnnnnnnnnnnnnnnnnnnnnnnnnnnnnnnnnnnnnnnnnnnnnnnnnnnnnnnnnnnnnnnnnnnnnnnnnnnnnnnnnnnnnnnnnnnnnnnnnnnnnnnnnnnnnnnnnnnnnnnnnnnnnnnnnnnnnnnnnnnnnnnnnnnnnnnnnnnnnnnnnnnnnnnnnnnnnnnnnnnnnnnnnnnnnnnnnnnnnnnnnnnnnnnnnnnnnnnnnnnnnnnnnnnnnnnnnnnnnnnnnnnnnnnnnnnnnnnnnnnnnnnnnnnnnnnnnnnnnnnnnnnnnnnnnnnnnnnnnnnnnnnnnnnnnnnnnnnnnnnnnnnnnnnnnnnnnnnnnnnnnnnnnnnnnnnnnnnnnnnnnnnnnnnnnnnnnnnnnnnnnnnnnnnnnnnnnnnnnnnnnnnnnnnnnnnnnnnnnnnnnnnnnnnnnnnnnnnnnnnnnnnnnnnnnnnnnnnnnnnnnnnnnnnnnnnnnnnnnnnnnnnnnnnnnnnnnnnnnnnnnnnnnnnnnnnnnnnnnnnnnnnnnnnnnnnnnnnnnnnnnnnnnnnnnnnnnnnnnnnnnnnnnnnnnnnnnnnnnnnnnnnnnnnnnnnnnnnnnnnnnnnnnnnnnnnnnnnnnnnnnnnnnnnnnnnnnnnnnnnnnnnnnnnnnnnnnnnnnnnnnnnnnnnnnnnnnnnnnnnnnnnnnnnnnnnnnnnnnnnnnnnnnnnnnnnnnnnnnnnnnnnnnnnnnnnnnnnnnnnnnnnnnnnnnnnnnnnnnnnnnnnnnnnnnnnnnnnnnnnnnnnnnnnnnnnnnnnnnnnnnnnnnnnnnnnnnnnnnnnnnnnnnnnnnnnnnnnnnnnnnnnnnnnnnnnnnnnnnnnnnnnnnnnnnnnnnnnnnnnnnnnnnnnnnnnnnnnnnnnnnnnnnnnnnnnnnnnnnnnnnnnnnnnnnnnnnnnnnnnnnnnnnnnnnnnnnnnnnnnnnnnnnnnnnnnnnnnnnnnnnnnnnnnnnnnnnnnnnnnnnnnnnnnnnnnnnnnnnnnnnnnnnnnnnnnnnnnnnnnnnnnnnnnnnnnnnnnnnnnnnnnnnnnnnnnnnnnnnnnnnnnnnnnnnnnnnnnnnnnnnnnnnnnnnnnnnnnnnnnnnnnnnnnnnnnnnnnnnnnnnnnnnnnnnnnnnnnnnnnnnnnnnnnnnnnnnnnnnnnnnnnnnnnnnnnnnnnnnnnnnnnnnnnnnnnnnnnnnnnnnnnnnnnnnnnnnnnnnnnnnnnnnnnnnnnnnnnnnnnnnnnnnnnnnnnnnnnnnnnnnnnnnnnnnnnnnnnnnnnnnnnnnnnnnnnnnnnnnnnnnnnnnnnnnnnnnnnnnnnnnnnnnnnnnnnnnnnnnnnnnnnnnnnnnnnnnnnnnnnnnnnnnnnnnnnnnnnnnnnnnnnnnnnnnnnnnnnnnnnnnnnnnnnnnnnnnnnnnnnnnnnnnnnnnnnnnnnnnnnnnnnnnnnnnnnnnnnnnnnnnnnnnnnnnnnnnnnnnnnnnnnnnnnnnnnnnnnnnnnnnnnnnnnnnnnnnnnnnnnnnnnnnnnnnnnnnnnnnnnnnnnnnnnnnnnnnnnnnnnnnnnnnnnnnnnnnnnnnnnnnnnnnnnnnnnnnnnnnnnnnnnnnnnnnnnnnnnnnnnnnnnnnnnnnnnnnnnnnnnnnnnnnnnnnnnnnnnnnnnnnnnnnnnnnnnnnnnnnnnnnnnnnnnnnnnnnnnnnnnnnnnnnnnnnnnnnnnnnnnnnnnnnnnnnnnnnnnnnnnnnnnnnnnnnnnnnnnnnnnnnnnnnnnnnnnnnnnnnnnnnnnnnnnnnnnnnnnnnnnnnnnnnnnnnnnnnnnnnnnnnnnnnnnnnnnnnnnnnnnnnnnnnnnnnnnnnnnnnnnnnnnnnnnnnnnnnnnnnnnnnnnnnnnnnnnnnnnnnnnnnnnnnnnnnnnnnnnnnnnnnnnnnnnnnnnnnnnnnnnnnnnnnnnnnnnnnnnnnnnnnnnnnnnnnnnnnnnnnnnnnnnnnnnnnnnnnnnnnnnnnnnnnnnnnnnnnnnnnnnnnnnnnnnnnnnnnnnnnnnnnnnnnnnnnnnnnnnnnnnnnnnnnnnnnnnnnnnnnnnnnnnnnnnnnnnnnnnnnnnnnnnnnnnnnnnnnnnnnnnnnnnnnnnnnnnnnnnnnnnnnnnnnnnnnnnnnnnnnnnnnnnnnnnnnnnnnnnnnnnnnnnnnnnnnnnnnnnnnnnnnnnnnnnnnnnnnnnnnnnnnnnnnnnnnnnnnnnnnnnnnnnnnnnnnnnnnnnnnnnnnnnnnnnnnnnnnnnnnnnnnnnnnnnnnnnnnnnnnnnnnnnnnnnnnnnnnnnnnnnnnnnnnnnnnnnnnnnnnnnnnnnnnnnnnnnnnnnnnnnnnnnnnnnnnnnnnnnnnnnnnnnnnnnnnnnnnnnnnnnnnnnnnnnnnnnnnnnnnnnnnnnnnnnnnnnnnnnnnnnnnnnnnnnnnnnnnnnnnnnnnnnnnnnnnnnnnnnnnnnnnnnnnnnnnnnnnnnnnnnnnnnnnnnnnnnnnnnnnnnnnnnnnnnnnnnnnnnnnnnnnnnnnnnnnnnnnnnnnnnnnnnnnnnnnnnnnnnnnnnnnnnnnnnnnnnnnnnnnnnnnnnnnnnnnnnnnnnnnnnnnnnnnnnnnnnnnnnnnnnnnnnnnnnnnnnnnnnnnnnnnnnnnnnnnnnnnnnnnnnnnnnnnnnnnnnnnnnnnnnnnnnnnnnnnnnnnnnnnnnnnnnnnnnnnnnnnnnnnnnnnnnnnnnnnnnnnnnnnnnnnnnnnnnnnnnnnnnnnnnnnnnnnnnnnnnnnnnnnnnnnnnnnnnnnnnnnnnnnnnnnnnnnnnnnnnnnnnnnnnnnnnnnnnnnnnnnnnnnnnnnnnnnnnnnnnnnnnnnnnnnnnnnnnnnnnnnnnnnnnnnnnnnnnnnnnnnnnnnnnnnnnnnnnnnnnnnnnnnnnnnnnnnnnnnnnnnnnnnnnnnnnnnnnnnnnnnnnnnnnnnnnnnnnnnnnnnnnnnnnnnnnnnnnnnnnnnnnnnnnnnnnnnnnnnnnnnnnnnnnnnnnnnnnnnnnnnnnnnnnnnnnnnnnnnnnnnnnnnnnnnnnnnnnnnnnnnnnnnnnnnnnnnnnnnnnnnnnnnnnnnnnnnnnnnnnnnnnnnnnnnnnnnnnnnnnnnnnnnnnnnnnnnnnnnnnnnnnnnnnnnnnnnnnnnnnnnnnnnnnnnnnnnnnnnnnnnnnnnnnnnnnnnnnnnnnnnnnnnnnnnnnnnnnnnnnnnnnnnnnnnnnnnnnnnnnnnnnnnnnnnnnnnnnnnnnnnnnnnnnnnnnnnnnnnnnnnnnnnnnnnnnnnnnnnnnnnnnnnnnnnnnnnnnnnnnnnnnnnnnnnnnnnnnnnnnnnnnnnnnnnnnnnnnnnnnnnnnnnnnnnnnnnnnnnnnnnnnnnnnnnnnnnnnnnnnnnnnnnnnnnnnnnnnnnnnnnnnnnnnnnnnnnnnnnnnnnnnnnnnnnnnnnnnnnnnnnnnnnnnnnnnnnnnnnnnnnnnnnnnnnnnnnnnnnnnnnnnnnnnnnnnnnnnnnnnnnnnnnnnnnnnnnnnnnnnnnnnnnnnnnnnnnnnnnnnnnnnnnnnnnnnnnnnnnnnnnnnnnnnnnnnnnnnnnnnnnnnnnnnnnnnnnnnnnnnnnnnnnnnnnnnnnnnnnnnnnnnnnnnnnnnnnnnnnnnnnnnnnnnnnnnnnnnnnnnnnnnnnnnnnnnnnnnnnnnnnnnnnnnnnnnnnnnnnnnnnnnnnnnnnnnnnnnnnnnnnnnnnnnnnnnnnnnnnnnnnnnnnnnnnnnnnnnnnnnnnnnnnnnnnnnnnnnnnnnnnnnnnnnnnnnnnnnnnnnnnnnnnnnnnnnnnnnnnnnnnnnnnnnnnnnnnnnnnnnnnnnnnnnnnnnnnnnnnnnnnnnnnnnnnnnnnnnnnnnnnnnnnnnnnnnnnnnnnnnnnnnnnnnnnnnnnnnnnnnnnnnnnnnnnnnnnnnnnnnnnnnnnnnnnnnnnnnnnnnnnnnnnnnnnnnnnnnnnnnnnnnnnnnnnnnnnnnnnnnnnnnnnnnnnnnnnnnnnnnnnnnnnnnnnnnnnnnnnnnnnnnnnnnnnnnnnnnnnnnnnnnnnnnnnnnnnnnnnnnnnnnnnnnnnnnnnnnnnnnnnnnnnnnnnnnnnnnnnnnnnnnnnnnnnnnnnnnnnnnnnnnnnnnnnnnnnnnnnnnnnnnnnnnnnnnnnnnnnnnnnnnnnnnnnnnnnnnnnnnnnnnnnnnnnnnnnnnnnnnnnnnnnnnnnnnnnnnnnnnnnnnnnnnnnnnnnnnnnnnnnnnnnnnnnnnnnnnnnnnnnnnnnnnnnnnnnnnnnnnnnnnnnnnnnnnnnnnnnnnnnnnnnnnnnnnnnnnnnnnnnnnnnnnnnnnnnnnnnnnnnnnnnnnnnnnnnnnnnnnnnnnnnnnnnnnnnnnnnnnnnnnnnnnnnnnnnnnnnnnnnnnnnnnnnnnnnnnnnnnnnnnnnnnnnnnnnnnnnnnnnnnnnnnnnnnnnnnnnnnnnnnnnnnnnnnnnnnnnnnnnnnnnnnnnnnnnnnnnnnnnnnnnnnnnnnnnnnnnnnnnnnnnnnnnnnnnnnnnnnnnnnnnnnnnnnnnnnnnnnnnnnnnnnnnnnnnnnnnnnnnnnnnnnnnnnnnnnnnnnnnnnnnnnnnnnnnnnnnnnnnnnnnnnnnnnnnnnnnnnnnnnnnnnnnnnnnnnnnnnnnnnnnnnnnnnnnnnnnnnnnnnnnnnnnnnnnnnnnnnnnnnnnnnnnnnnnnnnnnnnnnnnnnnnnnnnnnnnnnnnnnnnnnnnnnnnnnnnnnnnnnnnnnnnnnnnnnnnnnnnnnnnnnnnnnnnnnnnnnnnnnnnnnnnnnnnnnnnnnnnnnnnnnnnnnnnnnnnnnnnnnnnnnnnnnnnnnnnnnnnnnnnnnnnnnnnnnnnnnnnnnnnnnnnnnnnnnnnnnnnnnnnnnnnnnnnnnnnnnnnnnnnnnnnnnnnnnnnnnnnnnnnnnnnnnnnnnnnnnnnnnnnnnnnnnnnnnnnnnnnnnnnnnnnnnnnnnnnnnnnnnnnnnnnnnnnnnnnnnnnnnnnnnnnnnnnnnnnnnnnnnnnnnnnnnnnnnnnnnnnnnnnnnnnnnnnnnnnnnnnnnnnnnnnnnnnnnnnnnnnnnnnnnnnnnnnnnnnnnnnnnnnnnnnnnnnnnnnnnnnnnnnnnnnnnnnnnnnnnnnnnnnnnnnnnnnnnnnnnnnnnnnnnnnnnnnnnnnnnnnnnnnnnnnnnnnnnnnnnnnnnnnnnnnnnnnnnnnnnnnnnnnnnnnnnnnnnnnnnnnnnnnnnnnnnnnnnnnnnnnnnnnnnnnnnnnnnnnnnnnnnnnnnnnnnnnnnnnnnnnnnnnnnnnnnnnnnnnnnnnnnnnnnnnnnnnnnnnnnnnnnnnnnnnnnnnnnnnnnnnnnnnnnnnnnnnnnnnnnnnnnnnnnnnnnnnnnnnnnnnnnnnnnnnnnnnnnnnnnnnnnnnnnnnnnnnnnnnnnnnnnnnnnnnnnnnnnnnnnnnnnnnnnnnnnnnnnnnnnnnnnnnnnnnnnnnnnnnnnnnnnnnnnnnnnnnnnnnnnnnnnnnnnnnnnnnnnnnnnnnnnnnnnnnnnnnnnnnnnnnnnnnnnnnnnnnnnnnnnnnnnnnnnnnnnnnnnnnnnnnnnnnnnnnnnnnnnnnnnnnnnnnnnnnnnnnnnnnnnnnnnnnnnnnnnnnnnnnnnnnnnnnnnnnnnnnnnnnnnnnnnnnnnnnnnnnnnnnnnnnnnnnnnnnnnnnnnnnnnnnnnnnnnnnnnnnnnnnnnnnnnnnnnnnnnnnnnnnnnnnnnnnnnnnnnnnnnnnnnnnnnnnnnnnnnnnnnnnnnnnnnnnnnnnnnnnnnnnnnnnnnnnnnnnnnnnnnnnnnnnnnnnnnnnnnnnnnnnnnnnnnnnnnnnnnnnnnnnnnnnnnnnnnnnnnnnnnnnnnnnnnnnnnnnnnnnnnnnnnnnnnnnnnnnnnnnnnnnnnnnnnnnnnnnnnnnnnnnnnnnnnnnnnnnnnnnnnnnnnnnnnnnnnnnnnnnnnnnnnnnnnnnnnnnnnnnnnnnnnnnnnnnnnnnnnnnnnnnnnnnnnnnnnnnnnnnnnnnnnnnnnnnnnnnnnnnnnnnnnnnnnnnnnnnnnnnnnnnnnnnnnnnnnnnnnnnnnnnnnnnnnnnnnnnnnnnnnnnnnnnnnnnnnnnnnnnnnnnnnnnnnnnnnnnnnnnnnnnnnnnnnnnnnnnnnnnnnnnnnnnnnnnnnnnnnnnnnnnnnnnnnnnnnnnnnnnnnnnnnnnnnnnnnnnnnnnnnnnnnnnnnnnnnnnnnnnnnnnnnnnnnnnnnnnnnnnnnnnnnnnnnnnnnnnnnnnnnnnnnnnnnnnnnnnnnnnnnnnnnnnnnnnnnnnnnnnnnnnnnnnnnnnnnnnnnnnnnnnnnnnnnnnnnnnnnnnnnnnnnnnnnnnnnnnnnnnnnnnnnnnnnnnnnnnnnnnnnnnnnnnnnnnnnnnnnnnnnnnnnnnnnnnnnnnnnnnnnnnnnnnnnnnnnnnnnnnnnnnnnnnnnnnnnnnnnnnnnnnnnnnnnnnnnnnnnnnnnnnnnnnnnnnnnnnnnnnnnnnnnnnnnnnnnnnnnnnnnnnnnnnnnnnnnnnnnnnnnnnnnnnnnnnnnnnnnnnnnnnnnnnnnnnnnnnnnnnnnnnnnnnnnnnnnnnnnnnnnnnnnnnnnnnnnnnnnnnnnnnnnnnnnnnnnnnnnnnnnnnnnnnnnnnnnnnnnnnnnnnnnnnnnnnnnnnnnnnnnnnnnnnnnnnnnnnnnnnnnnnnnnnnnnnnnnnnnnnnnnnnnnnnnnnnnnnnnnnnnnnnnnnnnnnnnnnnnnnnnnnnnnnnnnnnnnnnnnnnnnnnnnnnnnnnnnnnnnnnnnnnnnnnnnnnnnnnnnnnnnnnnnnnnnnnnnnnnnnnnnnnnnnnnnnnnnnnnnnnnnnnnnnnnnnnnnnnnnnnnnnnnnnnnnnnnnnnnnnnnnnnnnnnnnnnnnnnnnnnnnnnnnnnnnnnnnnnnnnnnnnnnnnnnnnnnnnnnnnnnnnnnnnnnnnnnnnnnnnnnnnnnnnnnnnnnnnnnnnnnnnnnnnnnnnnnnnnnnnnnnnnnnnnnnnnnnnnnnnnnnnnnnnnnnnnnnnnnnnnnnnnnnnnnnnnnnnnnnnnnnnnnnnnnnnnnnnnnnnnnnnnnnnnnnnnnnnnnnnnnnnnnnnnnnnnnnnnnnnnnnnnnnnnnnnnnnnnnnnnnnnnnnnnnnnnnnnnnnnnnnnnnnnnnnnnnnnnnnnnnnnnnnnnnnnnnnnnnnnnnnnnnnnnnnnnnnnnnnnnnnnnnnnnnnnnnnnnnnnnnnnnnnnnnnnnnnnnnnnnnnnnnnnnnnnnnnnnnnnnnnnnnnnnnnnnnnnnnnnnnnnnnnnnnnnnnnnnnnnnnnnnnnnnnnnnnnnnnnnnnnnnnnnnnnnnnnnnnnnnnnnnnnnnnnnnnnnnnnnnnnnnnnnnnnnnnnnnnnnnnnnnnnnnnnnnnnnnnnnnnnnnnnnnnnnnnnnnnnnnnnnnnnnnnnnnnnnnnnnnnnnnnnnnnnnnnnnnnnnnnnnnnnnnnnnnnnnnnnnnnnnnnnnnnnnnnnnnnnnnnnnnnnnnnnnnnnnnnnnnnnnnnnnnnnnnnnnnnnnnnnnnnnnnnnnnnnnnnnnnnnnnnnnnnnnnnnnnnnnnnnnnnnnnnnnnnnnnnnnnnnnnnnnnnnnnnnnnnnnnnnnnnnnnnnnnnnnnnnnnnnnnnnnnnnnnnnnnnnnnnnnnnnnnnnnnnnnnnnnnnnnnnnnnnnnnnnnnnnnnnnnnnnnnnnnnnnnnnnnnnnnnnnnnnnnnnnnnnnnnnnnnnnnnnnnnnnnnnnnnnnnnnnnnnnnnnnnnnnnnnnnnnnnnnnnnnnnnnnnnnnnnnnnnnnnnnnnnnnnnnnnnnnnnnnnnnnnnnnnnnnnnnnnnnnnnnnnnnnnnnnnnnnnnnnnnnnnnnnnnnnnnnnnnnnnnnnnnnnnnnnnnnnnnnnnnnnnnnnnnnnnnnnnnnnnnnnnnnnnnnnnnnnnnnnnnnnnnnnnnnnnnnnnnnnnnnnnnnnnnnnnnnnnnnnnnnnnnnnnnnnnnnnnnnnnnnnnnnnnnnnnnnnnnnnnnnnnnnnnnnnnnnnnnnnnnnnnnnnnnnnnnnnnnnnnnnnnnnnnnnnnnnnnnnnnnnnnnnnnnnnnnnnnnnnnnnnnnnnnnnnnnnnnnnnnnnnnnnnnnnnnnnnnnnnnnnnnnnnnnnnnnnnnnnnnnnnnnnnnnnnnnnnnnnnnnnnnnnnnnnnnnnnnnnnnnnnnnnnnnnnnnnnnnnnnnnnnnnnnnnnnnnnnnnnnnnnnnnnnnnnnnnnnnnnnnnnnnnnnnnnnnnnnnnnnnnnnnnnnnnnnnnnnnnnnnnnnnnnnnnnnnnnnnnnnnnnnnnnnnnnnnnnnnnnnnnnnnnnnnnnnnnnnnnnnnnnnnnnnnnnnnnnnnnnnnnnnnnnnnnnnnnnnnnnnnnnnnnnnnnnnnnnnnnnnnnnnnnnnnnnnnnnnnnnnnnnnnnnnnnnnnnnnnnnnnnnnnnnnnnnnnnnnnnnnnnnnnnnnnnnnnnnnnnnnnnnnnnnnnnnnnnnnnnnnnnnnnnnnnnnnnnnnnnnnnnnnnnnnnnnnnnnnnnnnnnnnnnnnnnnnnnnnnnnnnnnnnnnnnnnnnnnnnnnnnnnnnnnnnnnnnnnnnnnnnnnnnnnnnnnnnnnnnnnnnnnnnnnnnnnnnnnnnnnnnnnnnnnnnnnnnnnnnnnnnnnnnnnnnnnnnnnnnnnnnnnnnnnnnnnnnnnnnnnnnnnnnnnnnnnnnnnnnnnnnnnnnnnnnnnnnnnnnnnnnnnnnnnnnnnnnnnnnnnnnnnnnnnnnnnnnnnnnnnnnnnnnnnnnnnnnnnnnnnnnnnnnnnnnnnnnnnnnnnnnnnnnnnnnnnnnnnnnnnnnnnnnnnnnnnnnnnnnnnnnnnnnnnnnnnnnnnnnnnnnnnnnnnnnnnnnnnnnnnnnnnnnnnnnnnnnnnnnnnnnnnnnnnnnnnnnnnnnnnnnnnnnnnnnnnnnnnnnnnnnnnnnnnnnnnnnnnnnnnnnnnnnnnnnnnnnnnnnnnnnnnnnnnnnnnnnnnnnnnnnnnnnnnnnnnnnnnnnnnnnnnnnnnnnnnnnnnnnnnnnnnnnnnnnnnnnnnnnnnnnnnnnnnnnnnnnnnnnnnnnnnnnnnnnnnnnnnnnnnnnnnnnnnnnnnnnnnnnnnnnnnnnnnnnnnnnnnnnnnnnnnnnnnnnnnnnnnnnnnnnnnnnnnnnnnnnnnnnnnnnnnnnnnnnnnnnnnnnnnnnnnnnnnnnnnnnnnnnnnnnnnnnnnnnnnnnnnnnnnnnnnnnnnnnnnnnnnnnnnnnnnnnnnnnnnnnnnnnnnnnnnnnnnnnnnnnnnnnnnnnnnnnnnnnnnnnnnnnnnnnnnnnnnnnnnnnnnnnnnnnnnnnnnnnnnnnnnnnnnnnnnnnnnnnnnnnnnnnnnnnnnnnnnnnnnnnnnnnnnnnnnnnnnnnnnnnnnnnnnnnnnnnnnnnnnnnnnnnnnnnnnnnnnnnnnnnnnnnnnnnnnnnnnnnnnnnnnnnnnnnnnnnnnnnnnnnnnnnnnnnnnnnnnnnnnnnnnnnnnnnnnnnnnnnnnnnnnnnnnnnnnnnnnnnnnnnnnnnnnnnnnnnnnnnnnnnnnnnnnnnnnnnnnnnnnnnnnnnnnnnnnnnnnnnnnnnnnnnnnnnnnnnnnnnnnnnnnnnnnnnnnnnnnnnnnnnnnnnnnnnnnnnnnnnnnnnnnnnnnnnnnnnnnnnnnnnnnnnnnnnnnnnnnnnnnnnnnnnnnnnnnnnnnnnnnnnnnnnnnnnnnnnnnnnnnnnnnnnnnnnnnnnnnnnnnnnnnnnnnnnnnnnnnnnnnnnnnnnnnnnnnnnnnnnnnnnnnnnnnnnnnnnnnnnnnnnnnnnnnnnnnnnnnnnnnnnnnnnnnnnnnnnnnnnnnnnnnnnnnnnnnnnnnnnnnnnnnnnnnnnnnnnnnnnnnnnnnnnnnnnnnnnnnnnnnnnnnnnnnnnnnnnnnnnnnnnnnnnnnnnnnnnnnnnnnnnnnnnnnnnnnnnnnnnnnnnnnnnnnnnnnnnnnnnnnnnnnnnnnnnnnnnnnnnnnnnnnnnnnnnnnnnnnnnnnnnnnnnnnnnnnnnnnnnnnnnnnnnnnnnnnnnnnnnnnnnnnnnnnnnnnnnnnnnnnnnnnnnnnnnnnnnnnnnnnnnnnnnnnnnnnnnnnnnnnnnnnnnnnnnnnnnnnnnnnnnnnnnnnnnnnnnnnnnnnnnnnnnnnnnnnnnnnnnnnnnnnnnnnnnnnnnnnnnnnnnnnnnnnnnnnnnnnnnnnnnnnnnnnnnnnnnnnnnnnnnnnnnnnnnnnnnnnnnnnnnnnnnnnnnnnnnnnnnnnnnnnnnnnnnnnnnnnnnnnnnnnnnnnnnnnnnnnnnnnnnnnnnnnnnnnnnnnnnnnnnnnnnnnnnnnnnnnnnnnnnnnnnnnnnnnnnnnnnnnnnnnnnnnnnnnnnnnnnnnnnnnnnnnnnnnnnnnnnnnnnnnnnnnnnnnnnnnnnnnnnnnnnnnnnnnnnnnnnnnnnnnnnnnnnnnnnnnnnnnnnnnnnnnnnnnnnnnnnnnnnnnnnnnnnnnnnnnnnnnnnnnnnnnnnnnnnnnnnnnnnnnnnnnnnnnnnnnnnnnnnnnnnnnnnnnnnnnnnnnnnnnnnnnnnnnnnnnnnnnnnnnnnnnnnnnnnnnnnnnnnnnnnnnnnnnnnnnnnnnnnnnnnnnnnnnnnnnnnnnnnnnnnnnnnnnnnnnnnnnnnnnnnnnnnnnnnnnnnnnnnnnnnnnnnnnnnnnnnnnnnnnnnnnnnnnnnnnnnnnnnnnnnnnnnnnnnnnnnnnnnnnnnnnnnnnnnnnnnnnnnnnnnnnnnnnnnnnnnnnnnnnnnnnnnnnnnnnnnnnnnnnnnnnnnnnnnnnnnnnnnnnnnnnnnnnnnnnnnnnnnnnnnnnnnnnnnnnnnnnnnnnnnnnnnnnnnnnnnnnnnnnnnnnnnnnnnnnnnnnnnnnnnnnnnnnnnnnnnnnnnnnnnnnnnnnnnnnnnnnnnnnnnnnnnnnnnnnnnnnnnnnnnnnnnnnnnnnnnnnnnnnnnnnnnnnnnnnnnnnnnnnnnnnnnnnnnnnnnnnnnnnnnnnnnnnnnnnnnnnnnnnnnnnnnnnnnnnnnnnnnnnnnnnnnnnnnnnnnnnnnnnnnnnnnnnnnnnnnnnnnnnnnnnnnnnnnnnnnnnnnnnnnnnnnnnnnnnnnnnnnnnnnnnnnnnnnnnnnnnnnnnnnnnnnnnnnnnnnnnnnnnnnnnnnnnnnnnnnnnnnnnnnnnnnnnnnnnnnnnnnnnnnnnnnnnnnnnnnnnnnnnnnnnnnnnnnnnnnnnnnnnnnnnnnnnnnnnnnnnnnnnnnnnnnnnnnnnnnnnnnnnnnnnnnnnnnnnnnnnnnnnnnnnnnnnnnnnnnnnnnnnnnnnnnnnnnnnnnnnnnnnnnnnnnnnnnnnnnnnnnnnnnnnnnnnnnnnnnnnnnnnnnnnnnnnnnnnnnnnnnnnnnnnnnnnnnnnnnnnnnnnnnnnnnnnnnnnnnnnnnnnnnnnnnnnnnnnnnnnnnnnnnnnnnnnnnnnnnnnnnnnnnnnnnnnnnnnnnnnnnnnnnnnnnnnnnnnnnnnnnnnnnnnnnnnnnnnnnnnnnnnnnnnnnnnnnnnnnnnnnnnnnnnnnnnnnnnnnnnnnnnnnnnnnnnnnnnnnnnnnnnnnnnnnnnnnnnnnnnnnnnnnnnnnnnnnnnnnnnnnnnnnnnnnnnnnnnnnnnnnnnnnnnnnnnnnnnnnnnnnnnnnnnnnnnnnnnnnnnnnnnnnnnnnnnnnnnnnnnnnnnnnnnnnnnnnnnnnnnnnnnnnnnnnnnnnnnnnnnnnnnnnnnnnnnnnnnnnnnnnnnnnnnnnnnnnnnnnnnnnnnnnnnnnnnnnnnnnnnnnnnnnnnnnnnnnnnnnnnnnnnnnnnnnnnnnnnnnnnnnnnnnnnnnnnnnnnnnnnnnnnnnnnnnnnnnnnnnnnnnnnnnnnnnnnnnnnnnnnnnnnnnnnnnnnnnnnnnnnnnnnnnnnnnnnnnnnnnnnnnnnnnnnnnnnnnnnnnnnnnnnnnnnnnnnnnnnnnnnnnnnnnnnnnnnnnnnnnnnnnnnnnnnnnnnnnnnnnnnnnnnnnnnnnnnnnnnnnnnnnnnnnnnnnnnnnnnnnnnnnnnnnnnnnnnnnnnnnnnnnnnnnnnnnnnnnnnnnnnnnnnnnnnnnnnnnnnnnnnnnnnnnnnnnnnnnnnnnnnnnnnnnnnnnnnnnnnnnnnnnnnnnnnnnnnnnnnnnnnnnnnnnnnnnnnnnnnnnnnnnnnnnnnnnnnnnnnnnnnnnnnnnnnnnnnnnnnnnnnnnnnnnnnnnnnnnnnnnnnnnnnnnnnnnnnnnnnnnnnnnnnnnnnnnnnnnnnnnnnnnnnnnnnnnnnnnnnnnnnnnnnnnnnnnnnnnnnnnnnnnnnnnnnnnnnnnnnnnnnnnnnnnnnnnnnnnnnnnnnnnnnnnnnnnnnnnnnnnnnnnnnnnnnnnnnnnnnnnnnnnnnnnnnnnnnnnnnnnnnnnnnnnnnnnnnnnnnnnnnnnnnnnnnnnnnnnnnnnnnnnnnnnnnnnnnnnnnnnnnnnnnnnnnnnnnnnnnnnnnnnnnnnnnnnnnnnnnnnnnnnnnnnnnnnnnnnnnnnnnnnnnnnnnnnnnnnnnnnnnnnnnnnnnnnnnnnnnnnnnnnnnnnnnnnnnnnnnnnnnnnnnnnnnnnnnnnnnnnnnnnnnnnnnnnnnnnnnnnnnnnnnnnnnnnnnnnnnnnnnnnnnnnnnnnnnnnnnnnnnnnnnnnnnnnnnnnnnnnnnnnnnnnnnnnnnnnnnnnnnnnnnnnnnnnnnnnnnnnnnnnnnnnnnnnnnnnnnnnnnnnnnnnnnnnnnnnnnnnnnnnnnnnnnnnnnnnnnnnnnnnnnnnnnnnnnnnnnnnnnnnnnnnnnnnnnnnnnnnnnnnnnnnnnnnnnnnnnnnnnnnnnnnnnnnnnnnnnnnnnnnnnnnnnnnnnnnnnnnnnnnnnnnnnnnnnnnnnnnnnnnnnnnnnnnnnnnnnnnnnnnnnnnnnnnnnnnnnnnnnnnnnnnnnnnnnnnnnnnnnnnnnnnnnnnnnnnnnnnnnnnnnnnnnnnnnnnnnnnnnnnnnnnnnnnnnnnnnnnnnnnnnnnnnnnnnnnnnnnnnnnnnnnnnnnnnnnnnnnnnnnnnnnnnnnnnnnnnnnnnnnnnnnnnnnnnnnnnnnnnnnnnnnnnnnnnnnnnnnnnnnnnnnnnnnnnnnnnnnnnnnnnnnnnnnnnnnnnnnnnnnnnnnnnnnnnnnnnnnnnnnnnnnnnnnnnnnnnnnnnnnnnnnnnnnnnnnnnnnnnnnnnnnnnnnnnnnnnnnnnnnnnnnnnnnnnnnnnnnnnnnnnnnnnnnnnnnnnnnnnnnnnnnnnnnnnnnnnnnnnnnnnnnnnnnnnnnnnnnnnnnnnnnnnnnnnnnnnnnnnnnnnnnnnnnnnnnnnnnnnnnnnnnnnnnnnnnnnnnnnnnnnnnnnnnnnnnnnnnnnnnnnnnnnnnnnnnnnnnnnnnnnnnnnnnnnnnnnnnnnnnnnnnnnnnnnnnnnnnnnnnnnnnnnnnnnnnnnnnnnnnnnnnnnnnnnnnnnnnnnnnnnnnnnnnnnnnnnnnnnnnnnnnnnnnnnnnnnnnnnnnnnnnnnnnnnnnnnnnnnnnnnnnnnnnnnnnnnnnnnnnnnnnnnnnnnnnnnnnnnnnnnnnnnnnnnnnnnnnnnnnnnnnnnnnnnnnnnnnnnnnnnnnnnnnnnnnnnnnnnnnnnnnnnnnnnnnnnnnnnnnnnnnnnnnnnnnnnnnnnnnnnnnnnnnnnnnnnnnnnnnnnnnnnnnnnnnnnnnnnnnnnnnnnnnnnnnnnnnnnnnnnnnnnnnnnnnnnnnnnnnnnnnnnnnnnnnnnnnnnnnnnnnnnnnnnnnnnnnnnnnnnnnnnnnnnnnnnnnnnnnnnnnnnnnnnnnnnnnnnnnnnnnnnnnnnnnnnnnnnnnnnnnnnnnnnnnnnnnnnnnnnnnnnnnnnnnnnnnnnnnnnnnnnnnnnnnnnnnnnnnnnnnnnnnnnnnnnnnnnnnnnnnnnnnnnnnnnnnnnnnnnnnnnnnnnnnnnnnnnnnnnnnnnnnnnnnnnnnnnnnnnnnnnnnnnnnnnnnnnnnnnnnnnnnnnnnnnnnnnnnnnnnnnnnnnnnnnnnnnnnnnnnnnnnnnnnnnnnnnnnnnnnnnnnnnnnnnnnnnnnnnnnnnnnnnnnnnnnnnnnnnnnnnnnnnnnnnnnnnnnnnnnnnnnnnnnnnnnnnnnnnnnnnnnnnnnnnnnnnnnnnnnnnnnnnnnnnnnnnnnnnnnnnnnnnnnnnnnnnnnnnnnnnnnnnnnnnnnnnnnnnnnnnnnnnnnnnnnnnnnnnnnnnnnnnnnnnnnnnnnnnnnnnnnnnnnnnnnnnnnnnnnnnnnnnnnnnnnnnnnnnnnnnnnnnnnnnnnnnnnnnnnnnnnnnnnnnnnnnnnnnnnnnnnnnnnnnnnnnnnnnnnnnnnnnnnnnnnnnnnnnnnnnnnnnnnnnnnnnnnnnnnnnnnnnnnnnnnnnnnnnnnnnnnnnnnnnnnnnnnnnnnnnnnnnnnnnnnnnnnnnnnnnnnnnnnnnnnnnnnnnnnnnnnnnnnnnnnnnnnnnnnnnnnnnnnnnnnnnnnnnnnnnnnnnnnnnnnnnnnnnnnnnnnnnnnnnnnnnnnnnnnnnnnnnnnnnnnnnnnnnnnnnnnnnnnnnnnnnnnnnnnnnnnnnnnnnnnnnnnnnnnnnnnnnnnnnnnnnnnnnnnnnnnnnnnnnnnnnnnnnnnnnnnnnnnnnnnnnnnnnnnnnnnnnnnnnnnnnnnnnnnnnnnnnnnnnnnnnnnnnnnnnnnnnnnnnnnnnnnnnnnnnnnnnnnnnnnnnnnnnnnnnnnnnnnnnnnnnnnnnnnnnnnnnnnnnnnnnnnnnnnnnnnnnnnnnnnnnnnnnnnnnnnnnnnnnnnnnnnnnnnnnnnnnnnnnnnnnnnnnnnnnnnnnnnnnnnnnnnnnnnnnnnnnnnnnnnnnnnnnnnnnnnnnnnnnnnnnnnnnnnnnnnnnnnnnnnnnnnnnnnnnnnnnnnnnnnnnnnnnnnnnnnnnnnnnnnnnnnnnnnnnnnnnnnnnnnnnnnnnnnnnnnnnnnnnnnnnnnnnnnnnnnnnnnnnnnnnnnnnnnnnnnnnnnnnnnnnnnnnnnnnnnnnnnnnnnnnnnnnnnnnnnnnnnnnnnnnnnnnnnnnnnnnnnnnnnnnnnnnnnnnnnnnnnnnnnnnnnnnnnnnnnnnnnnnnnnnnnnnnnnnnnnnnnnnnnnnnnnnnnnnnnnnnnnnnnnnnnnnnnnnnnnnnnnnnnnnnnnnnnnnnnnnnnnnnnnnnnnnnnnnnnnnnnnnnnnnnnnnnnnnnnnnnnnnnnnnnnnnnnnnnnnnnnnnnnnnnnnnnnnnnnnnnnnnnnnnnnnnnnnnnnnnnnnnnnnnnnnnnnnnnnnnnnnnnnnnnnnnnnnnnnnnnnnnnnnnnnnnnnnnnnnnnnnnnnnnnnnnnnnnnnnnnnnnnnnnnnnnnnnnnnnnnnnnnnnnnnnnnnnnnnnnnnnnnnnnnnnnnnnnnnnnnnnnnnnnnnnnnnnnnnnnnnnnnnnnnnnnnnnnnnnnnnnnnnnnnnnnnnnnnnnnnnnnnnnnnnnnnnnnnnnnnnnnnnnnnnnnnnnnnnnnnnnnnnnnnnnnnnnnnnnnnnnnnnnnnnnnnnnnnnnnnnnnnnnnnnnnnnnnnnnnnnnnnnnnnnnnnnnnnnnnnnnnnnnnnnnnnnnnnnnnnnnnnnnnnnnnnnnnnnnnnnnnnnnnnnnnnnnnnnnnnnnnnnnnnnnnnnnnnnnnnnnnnnnnnnnnnnnnnnnnnnnnnnnnnnnnnnnnnnnnnnnnnnnnnnnnnnnnnnnnnnnnnnnnnnnnnnnnnnnnnnnnnnnnnnnnnnnnnnnnnnnnnnnnnnnnnnnnnnnnnnnnnnnnnnnnnnnnnnnnnnnnnnnnnnnnnnnnnnnnnnnnnnnnnnnnnnnnnnnnnnnnnnnnnnnnnnnnnnnnnnnnnnnnnnnnnnnnnnnnnnnnnnnnnnnnnnnnnnnnnnnnnnnnnnnnnnnnnnnnnnnnnnnnnnnnnnnnnnnnnnnnnnnnnnnnnnnnnnnnnnnnnnnnnnnnnnnnnnnnnnnnnnnnnnnnnnnnnnnnnnnnnnnnnnnnnnnnnnnnnnnnnnnnnnnnnnnnnnnnnnnnnnnnnnnnnnnnnnnnnnnnnnnnnnnnnnnnnnnnnnnnnnnnnnnnnnnnnnnnnnnnnnnnnnnnnnnnnnnnnnnnnnnnnnnnnnnnnnnnnnnnnnnnnnnnnnnnnnnnnnnnnnnnnnnnnnnnnnnnnnnnnnnnnnnnnnnnnnnnnnnnnnnnnnnnnnnnnnnnnnnnnnnnnnnnnnnnnnnnnnnnnnnnnnnnnnnnnnnnnnnnnnnnnnnnnnnnnnnnnnnnnnnnnnnnnnnnnnnnnnnnnnnnnnnnnnnnnnnnnnnnnnnnnnnnnnnnnnnnnnnnnnnnnnnnnnnnnnnnnnnnnnnnnnnnnnnnnnnnnnnnnnnnnnnnnnnnnnnnnnnnnnnnnnnnnnnnnnnnnnnnnnnnnnnnnnnnnnnnnnnnnnnnnnnnnnnnnnnnnnnnnnnnnnnnnnnnnnnnnnnnnnnnnnnnnnnnnnnnnnnnnnnnnnnnnnnnnnnnnnnnnnnnnnnnnnnnnnnnnnnnnnnnnnnnnnnnnnnnnnnnnnnnnnnnnnnnnnnnnnnnnnnnnnnnnnnnnnnnnnnnnnnnnnnnnnnnnnnnnnnnnnnnnnnnnnnnnnnnnnnnnnnnnnnnnnnnnnnnnnnnnnnnnnnnnnnnnnnnnnnnnnnnnnnnnnnnnnnnnnnnnnnnnnnnnnnnnnnnnnnnnnnnnnnnnnnnnnnnnnnnnnnnnnnnnnnnnnnnnnnnnnnnnnnnnnnnnnnnnnnnnnnnnnnnnnnnnnnnnnnnnnnnnnnnnnnnnnnnnnnnnnnnnnnnnnnnnnnnnnnnnnnnnnnnnnnnnnnnnnnnnnnnnnnnnnnnnnnnnnnnnnnnnnnnnnnnnnnnnnnnnnnnnnnnnnnnnnnnnnnnnnnnnnnnnnnnnnnnnnnnnnnnnnnnnnnnnnnnnnnnnnnnnnnnnnnnnnnnnnnnnnnnnnnnnnnnnnnnnnnnnnnnnnnnnnnnnnnnnnnnnnnnnnnnnnnnnnnnnnnnnnnnnnnnnnnnnnnnnnnnnnnnnnnnnnnnnnnnnnnnnnnnnnnnnnnnnnnnnnnnnnnnnnnnnnnnnnnnnnnnnnnnnnnnnnnnnnnnnnnnnnnnnnnnnnnnnnnnnnnnnnnnnnnnnnnnnnnnnnnnnnnnnnnnnnnnnnnnnnnnnnnnnnnnnnnnnnnnnnnnnnnnnnnnnnnnnnnnnnnnnnnnnnnnnnnnnnnnnnnnnnnnnnnnnnnnnnnnnnnnnnnnnnnnnnnnnnnnnnnnnnnnnnnnnnnnnnnnnnnnnnnnnnnnnnnnnnnnnnnnnnnnnnnnnnnnnnnnnnnnnnnnnnnnnnnnnnnnnnnnnnnnnnnnnnnnnnnnnnnnnnnnnnnnnnnnnnnnnnnnnnnnnnnnnnnnnnnnnnnnnnnnnnnnnnnnnnnnnnnnnnnnnnnnnnnnnnnnnnnnnnnnnnnnnnnnnnnnnnnnnnnnnnnnnnnnnnnnnnnnnnnnnnnnnnnnnnnnnnnnnnnnnnnnnnnnnnnnnnnnnnnnnnnnnnnnnnnnnnnnnnnnnnnnnnnnnnnnnnnnnnnnnnnnnnnnnnnnnnnnnnnnnnnnnnnnnnnnnnnnnnnnnnnnnnnnnnnnnnnnnnnnnnnnnnnnnnnnnnnnnnnnnnnnnnnnnnnnnnnnnnnnnnnnnnnnnnnnnnnnnnnnnnnnnnnnnnnnnnnnnnnnnnnnnnnnnnnnnnnnnnnnnnnnnnnnnnnnnnnnnnnnnnnnnnnnnnnnnnnnnnnnnnnnnnnnnnnnnnnnnnnnnnnnnnnnnnnnnnnnnnnnnnnnnnnnnnnnnnnnnnnnnnnnnnnnnnnnnnnnnnnnnnnnnnnnnnnnnnnnnnnnnnnnnnnnnnnnnnnnnnnnnnnnnnnnnnnnnnnnnnnnnnnnnnnnnnnnnnnnnnnnnnnnnnnnnnnnnnnnnnnnnnnnnnnnnnnnnnnnnnnnnnnnnnnnnnnnnnnnnnnnnnnnnnnnnnnnnnnnnnnnnnnnnnnnnnnnnnnnnnnnnnnnnnnnnnnnnnnnnnnnnnnnnnnnnnnnnnnnnnnnnnnnnnnnnnnnnnnnnnnnnnnnnnnnnnnnnnnnnnnnnnnnnnnnnnnnnnnnnnnnnnnnnnnnnnnnnnnnnnnnnnnnnnnnnnnnnnnnnnnnnnnnnnnnnnnnnnnnnnnnnnnnnnnnnnnnnnnnnnnnnnnnnnnnnnnnnnnnnnnnnnnnnnnnnnnnnnnnnnnnnnnnnnnnnnnnnnnnnnnnnnnnnnnnnnnnnnnnnnnnnnnnnnnnnnnnnnnnnnnnnnnnnnnnnnnnnnnnnnnnnnnnnnnnnnnnnnnnnnnnnnnnnnnnnnnnnnnnnnnnnnnnnnnnnnnnnnnnnnnnnnnnnnnnnnnnnnnnnnnnnnnnnnnnnnnnnnnnnnnnnnnnnnnnnnnnnnnnnnnnnnnnnnnnnnnnnnnnnnnnnnnnnnnnnnnnnnnnnnnnnnnnnnnnnnnnnnnnnnnnnnnnnnnnnnnnnnnnnnnnnnnnnnnnnnnnnnnnnnnnnnnnnnnnnnnnnnnnnnnnnnnnnnnnnnnnnnnnnnnnnnnnnnnnnnnnnnnnnnnnnnnnnnnnnnnnnnnnnnnnnnnnnnnnnnnnnnnnnnnnnnnnnnnnnnnnnnnnnnnnnnnnnnnnnnnnnnnnnnnnnnnnnnnnnnnnnnnnnnnnnnnnnnnnnnnnnnnnnnnnnnnnnnnnnnnnnnnnnnnnnnnnnnnnnnnnnnnnnnnnnnnnnnnnnnnnnnnnnnnnnnnnnnnnnnnnnnnnnnnnnnnnnnnnnnnnnnnnnnnnnnnnnnnnnnnnnnnnnnnnnnnnnnnnnnnnnnnnnnnnnnnnnnnnnnnnnnnnnnnnnnnnnnnnnnnnnnnnnnnnnnnnnnnnnnnnnnnnnnnnnnnnnnnnnnnnnnnnnnnnnnnnnnnnnnnnnnnnnnnnnnnnnnnnnnnnnnnnnnnnnnnnnnnnnnnnnnnnnnnnnnnnnnnnnnnnnnnnnnnnnnnnnnnnnnnnnnnnnnnnnnnnnnnnnnnnnnnnnnnnnnnnnnnnnnnnnnnnnnnnnnnnnnnnnnnnnnnnnnnnnnnnnnnnnnnnnnnnnnnnnnnnnnnnnnnnnnnnnnnnnnnnnnnnnnnnnnnnnnnnnnnnnnnnnnnnnnnnnnnnnnnnnnnnnnnnnnnnnnnnnnnnnnnnnnnnnnnnnnnnnnnnnnnnnnnnnnnnnnnnnnnnnnnnnnnnnnnnnnnnnnnnnnnnnnnnnnnnnnnnnnnnnnnnnnnnnnnnnnnnnnnnnnnnnnnnnnnnnnnnnnnnnnnnnnnnnnnnnnnnnnnnnnnnnnnnnnnnnnnnnnnnnnnnnnnnnnnnnnnnnnnnnnnnnnnnnnnnnnnnnnnnnnnnnnnnnnnnnnnnnnnnnnnnnnnnnnnnnnnnnnnnnnnnnnnnnnnnnnnnnnnnnnnnnnnnnnnnnnnnnnnnnnnnnnnnnnnnnnnnnnnnnnnnnnnnnnnnnnnnnnnnnnnnnnnnnnnnnnnnnnnnnnnnnnnnnnnnnnnnnnnnnnnnnnnnnnnnnnnnnnnnnnnnnnnnnnnnnnnnnnnnnnnnnnnnnnnnnnnnnnnnnnnnnnnnnnnnnnnnnnnnnnnnnnnnnnnnnnnnnnnnnnnnnnnnnnnnnnnnnnnnnnnnnnnnnnnnnnnnnnnnnnnnnnnnnnnnnnnnnnnnnnnnnnnnnnnnnnnnnnnnnnnnnnnnnnnnnnnnnnnnnnnnnnnnnnnnnnnnnnnnnnnnnnnnnnnnnnnnnnnnnnnnnnnnnnnnnnnnnnnnnnnnnnnnnnnnnnnnnnnnnnnnnnnnnnnnnnnnnnnnnnnnnnnnnnnnnnnnnnnnnnnnnnnnnnnnnnnnnnnnnnnnnnnnnnnnnnnnnnnnnnnnnnnnnnnnnnnnnnnnnnnnnnnnnnnnnnnnnnnnnnnnnnnnnnnnnnnnnnnnnnnnnnnnnnnnnnnnnnnnnnnnnnnnnnnnnnnnnnnnnnnnnnnnnnnnnnnnnnnnnnnnnnnnnnnnnnnnnnnnnnnnnnnnnnnnnnnnnnnnnnnnnnnnnnnnnnnnnnnnnnnnnnnnnnnnnnnnnnnnnnnnnnnnnnnnnnnnnnnnnnnnnnnnnnnnnnnnnnnnnnnnnnnnnnnnnnnnnnnnnnnnnnnnnnnnnnnnnnnnnnnnnnnnnnnnnnnnnnnnnnnnnnnnnnnnnnnnnnnnnnnnnnnnnnnnnnnnnnnnnnnnnnnnnnnnnnnnnnnnnnnnnnnnnnnnnnnnnnnnnnnnnnnnnnnnnnnnnnnnnnnnnnnnnnnnnnnnnnnnnnnnnnnnnnnnnnnnnnnnnnnnnnnnnnnnnnnnnnnnnnnnnnnnnnnnnnnnnnnnnnnnnnnnnnnnnnnnnnnnnnnnnnnnnnnnnnnnnnnnnnnnnnnnnnnnnnnnnnnnnnnnnnnnnnnnnnnnnnnnnnnnnnnnnnnnnnnnnnnnnnnnnnnnnnnnnnnnnnnnnnnnnnnnnnnnnnnnnnnnnnnnnnnnnnnnnnnnnnnnnnnnnnnnnnnnnnnnnnnnnnnnnnnnnnnnnnnnnnnnnnnnnnnnnnnnnnnnnnnnnnnnnnnnnnnnnnnnnnnnnnnnnnnnnnnnnnnnnnnnnnnnnnnnnnnnnnnnnnnnnnnnnnnnnnnnnnnnnnnnnnnnnnnnnnnnnnnnnnnnnnnnnnnnnnnnnnnnnnnnnnnnnnnnnnnnnnnnnnnnnnnnnnnnnnnnnnnnnnnnnnnnnnnnnnnnnnnnnnnnnnnnnnnnnnnnnnnnnnnnnnnnnnnnnnnnnnnnnnnnnnnnnnnnnnnnnnnnnnnnnnnnnnnnnnnnnnnnnnnnnnnnnnnnnnnnnnnnnnnnnnnnnnnnnnnnnnnnnnnnnnnnnnnnnnnnnnnnnnnnnnnnnnnnnnnnnnnnnnnnnnnnnnnnnnnnnnnnnnnnnnnnnnnnnnnnnnnnnnnnnnnnnnnnnnnnnnnnnnnnnnnnnnnnnnnnnnnnnnnnnnnnnnnnnnnnnnnnnnnnnnnnnnnnnnnnnnnnnnnnnnnnnnnnnnnnnnnnnnnnnnnnnnnnnnnnnnnnnnnnnnnnnnnnnnnnnnnnnnnnnnnnnnnnnnnnnnnnnnnnnnnnnnnnnnnnnnnnnnnnnnnnnnnnnnnnnnnnnnnnnnnnnnnnnnnnnnnnnnnnnnnnnnnnnnnnnnnnnnnnnnnnnnnnnnnnnnnnnnnnnnnnnnnnnnnnnnnnnnnnnnnnnnnnnnnnnnnnnnnnnnnnnnnnnnnnnnnnnnnnnnnnnnnnnnnnnnnnnnnnnnnnnnnnnnnnnnnnnnnnnnnnnnnnnnnnnnnnnnnnnnnnnnnnnnnnnnnnnnnnnnnnnnnnnnnnnnnnnnnnnnnnnnnnnnnnnnnnnnnnnnnnnnnnnnnnnnnnnnnnnnnnnnnnnnnnnnnnnnnnnnnnnnnnnnnnnnnnnnnnnnnnnnnnnnnnnnnnnnnnnnnnnnnnnnnnnnnnnnnnnnnnnnnnnnnnnnnnnnnnnnnnnnnnnnnnnnnnnnnnnnnnnnnnnnnnnnnnnnnnnnnnnnnnnnnnnnnnnnnnnnnnnnnnnnnnnnnnnnnnnnnnnnnnnnnnnnnnnnnnnnnnnnnnnnnnnnnnnnnnnnnnnnnnnnnnnnnnnnnnnnnnnnnnnnnnnnnnnnnnnnnnnnnnnnnnnnnnnnnnnnnnnnnnnnnnnnnnnnnnnnnnnnnnnnnnnnnnnnnnnnnnnnnnnnnnnnnnnnnnnnnnnnnnnnnnnnnnnnnnnnnnnnnnnnnnnnnnnnnnnnnnnnnnnnnnnnnnnnnnnnnnnnnnnnnnnnnnnnnnnnnnnnnnnnnnnnnnnnnnnnnnnnnnnnnnnnnnnnnnnnnnnnnnnnnnnnnnnnnnnnnnnnnnnnnnnnnnnnnnnnnnnnnnnnnnnnnnnnnnnnnnnnnnnnnnnnnnnnnnnnnnnnnnnnnnnnnnnnnnnnnnnnnnnnnnnnnnnnnnnnnnnnnnnnnnnnnnnnnnnnnnnnnnnnnnnnnnnnnnnnnnnnnnnnnnnnnnnnnnnnnnnnnnnnnnnnnnnnnnnnnnnnnnnnnnnnnnnnnnnnnnnnnnnnnnnnnnnnnnnnnnnnnnnnnnnnnnnnnnnnnnnnnnnnnnnnnnnnnnnnnnnnnnnnnnnnnnnnnnnnnnnnnnnnnnnnnnnnnnnnnnnnnnnnnnnnnnnnnnnnnnnnnnnnnnnnnnnnnnnnnnnnnnnnnnnnnnnnnnnnnnnnnnnnnnnnnnnnnnnnnnnnnnnnnnnnnnnnnnnnnnnnnnnnnnnnnnnnnnnnnnnnnnnnnnnnnnnnnnnnnnnnnnnnnnnnnnnnnnnnnnnnnnnnnnnnnnnnnnnnnnnnnnnnnnnnnnnnnnnnnnnnnnnnnnnnnnnnnnnnnnnnnnnnnnnnnnnnnnnnnnnnnnnnnnnnnnnnnnnnnnnnnnnnnnnnnnnnnnnnnnnnnnnnnnnnnnnnnnnnnnnnnnnnnnnnnnnnnnnnnnnnnnnnnnnnnnnnnnnnnnnnnnnnnnnnnnnnnnnnnnnnnnnnnnnnnnnnnnnnnnnnnnnnnnnnnnnnnnnnnnnnnnnnnnnnnnnnnnnnnnnnnnnnnnnnnnnnnnnnnnnnnnnnnnnnnnnnnnnnnnnnnnnnnnnnnnnnnnnnnnnnnnnnnnnnnnnnnnnnnnnnnnnnnnnnnnnnnnnnnnnnnnnnnnnnnnnnnnnnnnnnnnnnnnnnnnnnnnnnnnnnnnnnnnnnnnnnnnnnnnnnnnnnnnnnnnnnnnnnnnnnnnnnnnnnnnnnnnnnnnnnnnnnnnnnnnnnnnnnnnnnnnnnnnnnnnnnnnnnnnnnnnnnnnnnnnnnnnnnnnnnnnnnnnnnnnnnnnnnnnnnnnnnnnnnnnnnnnnnnnnnnnnnnnnnnnnnnnnnnnnnnnnnnnnnnnnnnnnnnnnnnnnnnnnnnnnnnnnnnnnnnnnnnnnnnnnnnnnnnnnnnnnnnnnnnnnnnnnnnnnnnnnnnnnnnnnnnnnnnnnnnnnnnnnnnnnnnnnnnnnnnnnnnnnnnnnnnnnnnnnnnnnnnnnnnnnnnnnnnnnnnnnnnnnnnnnnnnnnnnnnnnnnnnnnnnnnnnnnnnnnnnnnnnnnnnnnnnnnnnnnnnnnnnnnnnnnnnnnnnnnnnnnnnnnnnnnnnnnnnnnnnnnnnnnnnnnnnnnnnnnnnnnnnnnnnnnnnnnnnnnnnnnnnnnnnnnnnnnnnnnnnnnnnnnnnnnnnnnnnnnnnnnnnnnnnnnnnnnnnnnnnnnnnnnnnnnnnnnnnnnnnnnnnnnnnnnnnnnnnnnnnnnnnnnnnnnnnnnnnnnnnnnnnnnnnnnnnnnnnnnnnnnnnnnnnnnnnnnnnnnnnnnnnnnnnnnnnnnnnnnnnnnnnnnnnnnnnnnnnnnnnnnnnnnnnnnnnnnnnnnnnnnnnnnnnnnnnnnnnnnnnnnnnnnnnnnnnnnnnnnnnnnnnnnnnnnnnnnnnnnnnnnnnnnnnnnnnnnnnnnnnnnnnnnnnnnnnnnnnnnnnnnnnnnnnnnnnnnnnnnnnnnnnnnnnnnnnnnnnnnnnnnnnnnnnnnnnnnnnnnnnnnnnnnnnnnnnnnnnnnnnnnnnnnnnnnnnnnnnnnnnnnnnnnnnnnnnnnnnnnnnnnnnnnnnnnnnnnnnnnnnnnnnnnnnnnnnnnnnnnnnnnnnnnnnnnnnnnnnnnnnnnnnnnnnnnnnnnnnnnnnnnnnnnnnnnnnnnnnnnnnnnnnnnnnnnnnnnnnnnnnnnnnnnnnnnnnnnnnnnnnnnnnnnnnnnnnnnnnnnnnnnnnnnnnnnnnnnnnnnnnnnnnnnnnnnnnnnnnnnnnnnnnnnnnnnnnnnnnnnnnnnnnnnnnnnnnnnnnnnnnnnnnnnnnnnnnnnnnnnnnnnnnnnnnnnnnnnnnnnnnnnnnnnnnnnnnnnnnnnnnnnnnnnnnnnnnnnnnnnnnnnnnnnnnnnnnnnnnnnnnnnnnnnnnnnnnnnnnnnnnnnnnnnnnnnnnnnnnnnnnnnnnnnnnnnnnnnnnnnnnnnnnnnnnnnnnnnnnnnnnnnnnnnnnnnnnnnnnnnnnnnnnnnnnnnnnnnnnnnnnnnnnnnnnnnnnnnnnnnnnnnnnnnnnnnnnnnnnnnnnnnnnnnnnnnnnnnnnnnnnnnnnnnnnnnnnnnnnnnnnnnnnnnnnnnnnnnnnnnnnnnnnnnnnnnnnnnnnnnnnnnnnnnnnnnnnnnnnnnnnnnnnnnnnnnnnnnnnnnnnnnnnnnnnnnnnnnnnnnnnnnnnnnnnnnnnnnnnnnnnnnnnnnnnnnnnnnnnnnnnnnnnnnnnnnnnnnnnnnnnnnnnnnnnnnnnnnnnnnnnnnnnnnnnnnnnnnnnnnnnnnnnnnnnnnnnnnnnnnnnnnnnnnnnnnnnnnnnnnnnnnnnnnnnnnnnnnnnnnnnnnnnnnnnnnnnnnnnnnnnnnnnnnnnnnnnnnnnnnnnnnnnnnnnnnnnnnnnnnnnnnnnnnnnnnnnnnnnnnnnnnnnnnnnnnnnnnnnnnnnnnnnnnnnnnnnnnnnnnnnnnnnnnnnnnnnnnnnnnnnnnnnnnnnnnnnnnnnnnnnnnnnnnnnnnnnnnnnnnnnnnnnnnnnnnnnnnnnnnnnnnnnnnnnnnnnnnnnnnnnnnnnnnnnnnnnnnnnnnnnnnnnnnnnnnnnnnnnnnnnnnnnnnnnnnnnnnnnnnnnnnnnnnnnnnnnnnnnnnnnnnnnnnnnnnnnnnnnnnnnnnnnnnnnnnnnnnnnnnnnnnnnnnnnnnnnnnnnnnnnnnnnnnnnnnnnnnnnnnnnnnnnnnnnnnnnnnnnnnnnnnnnnnnnnnnnnnnnnnnnnnnnnnnnnnnnnnnnnnnnnnnnnnnnnnnnnnnnnnnnnnnnnnnnnnnnnnnnnnnnnnnnnnnnnnnnnnnnnnnnnnnnnnnnnnnnnnnnnnnnnnnnnnnnnnnnnnnnnnnnnnnnnnnnnnnnnnnnnnnnnnnnnnnnnnnnnnnnnnnnnnnnnnnnnnnnnnnnnnnnnnnnnnnnnnnnnnnnnnnnnnnnnnnnnnnnnnnnnnnnnnnnnnnnnnnnnnnnnnnnnnnnnnnnnnnnnnnnnnnnnnnnnnnnnnnnnnnnnnnnnnnnnnnnnnnnnnnnnnnnnnnnnnnnnnnnnnnnnnnnnnnnnnnnnnnnnnnnnnnnnnnnnnnnnnnnnnnnnnnnnnnnnnnnnnnnnnnnnnnnnnnnnnnnnnnnnnnnnnnnnnnnnnnnnnnnnnnnnnnnnnnnnnnnnnnnnnnnnnnnnnnnnnnnnnnnnnnnnnnnnnnnnnnnnnnnnnnnnnnnnnnnnnnnnnnnnnnnnnnnnnnnnnnnnnnnnnnnnnnnnnnnnnnnnnnnnnnnnnnnnnnnnnnnnnnnnnnnnnnnnnnnnnnnnnnnnnnnnnnnnnnnnnnnnnnnnnnnnnnnnnnnnnnnnnnnnnnnnnnnnnnnnnnnnnnnnnnnnnnnnnnnnnnnnnnnnnnnnnnnnnnnnnnnnnnnnnnnnnnnnnnnnnnnnnnnnnnnnnnnnnnnnnnnnnnnnnnnnnnnnnnnnnnnnnnnnnnnnnnnnnnnnnnnnnnnnnnnnnnnnnnnnnnnnnnnnnnnnnnnnnnnnnnnnnnnnnnnnnnnnnnnnnnnnnnnnnnnnnnnnnnnnnnnnnnnnnnnnnnnnnnnnnnnnnnnnnnnnnnnnnnnnnnnnnnnnnnnnnnnnnnnnnnnnnnnnnnnnnnnnnnnnnnnnnnnnnnnnnnnnnnnnnnnnnnnnnnnnnnnnnnnnnnnnnnnnnnnnnnnnnnnnnnnnnnnnnnnnnnnnnnnnnnnnnnnnnnnnnnnnnnnnnnnnnnnnnnnnnnnnnnnnnnnnnnnnnnnnnnnnnnnnnnnnnnnnnnnnnnnnnnnnnnnnnnnnnnnnnnnnnnnnnnnnnnnnnnnnnnnnnnnnnnnnnnnnnnnnnnnnnnnnnnnnnnnnnnnnnnnnnnnnnnnnnnnnnnnnnnnnnnnnnnnnnnnnnnnnnnnnnnnnnnnnnnnnnnnnnnnnnnnnnnnnnnnnnnnnnnnnnnnnnnnnnnnnnnnnnnnnnnnnnnnnnnnnnnnnnnnnnnnnnnnnnnnnnnnnnnnnnnnnnnnnnnnnnnnnnnnnnnnnnnnnnnnnnnnnnnnnnnnnnnnnnnnnnnnnnnnnnnnnnnnnnnnnnnnnnnnnnnnnnnnnnnnnnnnnnnnnnnnnnnnnnnnnnnnnnnnnnnnnnnnnnnnnnnnnnnnnnnnnnnnnnnnnnnnnnnnnnnnnnnnnnnnnnnnnnnnnnnnnnnnnnnnnnnnnnnnnnnnnnnnnnnnnnnnnnnnnnnnnnnnnnnnnnnnnnnnnnnnnnnnnnnnnnnnnnnnnnnnnnnnnnnnnnnnnnnnnnnnnnnnnnnnnnnnnnnnnnnnnnnnnnnnnnnnnnnnnnnnnnnnnnnnnnnnnnnnnnnnnnnnnnnnnnnnnnnnnnnnnnnnnnnnnnnnnnnnnnnnnnnnnnnnnnnnnnnnnnnnnnnnnnnnnnnnnnnnnnnnnnnnnnnnnnnnnnnnnnnnnnnnnnnnnnnnnnnnnnnnnnnnnnnnnnnnnnnnnnnnnnnnnnnnnnnnnnnnnnnnnnnnnnnnnnnnnnnnnnnnnnnnnnnnnnnnnnnnnnnnnnnnnnnnnnnnnnnnnnnnnnnnnnnnnnnnnnnnnnnnnnnnnnnnnnnnnnnnnnnnnnnnnnnnnnnnnnnnnnnnnnnnnnnnnnnnnnnnnnnnnnnnnnnnnnnnnnnnnnnnnnnnnnnnnnnnnnnnnnnnnnnnnnnnnnnnnnnnnnnnnnnnnnnnnnnnnnnnnnnnnnnnnnnnnnnnnnnnnnnnnnnnnnnnnnnnnnnnnnnnnnnnnnnnnnnnnnnnnnnnnnnnnnnnnnnnnnnnnnnnnnnnnnnnnnnnnnnnnnnnnnnnnnnnnnnnnnnnnnnnnnnnnnnnnnnnnnnnnnnnnnnnnnnnnnnnnnnnnnnnnnnnnnnnnnnnnnnnnnnnnnnnnnnnnnnnnnnnnnnnnnnnnnnnnnnnnnnnnnnnnnnnnnnnnnnnnnnnnnnnnnnnnnnnnnnnnnnnnnnnnnnnnnnnnnnnnnnnnnnnnnnnnnnnnnnnnnnnnnnnnnnnnnnnnnnnnnnnnnnnnnnnnnnnnnnnnnnnnnnnnnnnnnnnnnnnnnnnnnnnnnnnnnnnnnnnnnnnnnnnnnnnnnnnnnnnnnnnnnnnnnnnnnnnnnnnnnnnnnnnnnnnnnnnnnnnnnnnnnnnnnnnnnnnnnnnnnnnnnnnnnnnnnnnnnnnnnnnnnnnnnnnnnnnnnnnnnnnnnnnnnnnnnnnnnnnnnnnnnnnnnnnnnnnnnnnnnnnnnnnnnnnnnnnnnnnnnnnnnnnnnnnnnnnnnnnnnnnnnnnnnnnnnnnnnnnnnnnnnnnnnnnnnnnnnnnnnnnnnnnnnnnnnnnnnnnnnnnnnnnnnnnnnnnnnnnnnnnnnnnnnnnnnnnnnnnnnnnnnnnnnnnnnnnnnnnnnnnnnnnnnnnnnnnnnnnnnnnnnnnnnnnnnnnnnnnnnnnnnnnnnnnnnnnnnnnnnnnnnnnnnnnnnnnnnnnnnnnnnnnnnnnnnnnnnnnnnnnnnnnnnnnnnnnnnnnnnnnnnnnnnnnnnnnnnnnnnnnnnnnnnnnnnnnnnnnnnnnnnnnnnnnnnnnnnnnnnnnnnnnnnnnnnnnnnnnnnnnnnnnnnnnnnnnnnnnnnnnnnnnnnnnnnnnnnnnnnnnnnnnnnnnnnnnnnnnnnnnnnnnnnnnnnnnnnnnnnnnnnnnnnnnnnnnnnnnnnnnnnnnnnnnnnnnnnnnnnnnnnnnnnnnnnnnnnnnnnnnnnnnnnnnnnnnnnnnnnnnnnnnnnnnnnnnnnnnnnnnnnnnnnnnnnnnnnnnnnnnnnnnnnnnnnnnnnnnnnnnnnnnnnnnnnnnnnnnnnnnnnnnnnnnnnnnnnnnnnnnnnnnnnnnnnnnnnnnnnnnnnnnnnnnnnnnnnnnnnnnnnnnnnnnnnnnnnnnnnnnnnnnnnnnnnnnnnnnnnnnnnnnnnnnnnnnnnnnnnnnnnnnnnnnnnnnnnnnnnnnnnnnnnnnnnnnnnnnnnnnnnnnnnnnnnnnnnnnnnnnnnnnnnnnnnnnnnnnnnnnnnnnnnnnnnnnnnnnnnnnnnnnnnnnnnnnnnnnnnnnnnnnnnnnnnnnnnnnnnnnnnnnnnnnnnnnnnnnnnnnnnnnnnnnnnnnnnnnnnnnnnnnnnnnnnnnnnnnnnnnnnnnnnnnnnnnnnnnnnnnnnnnnnnnnnnnnnnnnnnnnnnnnnnnnnnnnnnnnnnnnnnnnnnnnnnnnnnnnnnnnnnnnnnnnnnnnnnnnnnnnnnnnnnnnnnnnnnnnnnnnnnnnnnnnnnnnnnnnnnnnnnnnnnnnnnnnnnnnnnnnnnnnnnnnnnnnnnnnnnnnnnnnnnnnnnnnnnnnnnnnnnnnnnnnnnnnnnnnnnnnnnnnnnnnnnnnnnnnnnnnnnnnnnnnnnnnnnnnnnnnnnnnnnnnnnnnnnnnnnnnnnnnnnnnnnnnnnnnnnnnnnnnnnnnnnnnnnnnnnnnnnnnnnnnnnnnnnnnnnnnnnnnnnnnnnnnnnnnnnnnnnnnnnnnnnnnnnnnnnnnnnnnnnnnnnnnnnnnnnnnnnnnnnnnnnnnnnnnnnnnnnnnnnnnnnnnnnnnnnnnnnnnnnnnnnnnnnnnnnnnnnnnnnnnnnnnnnnnnnnnnnnnnnnnnnnnnnnnnnnnnnnnnnnnnnnnnnnnnnnnnnnnnnnnnnnnnnnnnnnnnnnnnnnnnnnnnnnnnnnnnnnnnnnnnnnnnnnnnnnnnnnnnnnnnnnnnnnnnnnnnnnnnnnnnnnnnnnnnnnnnnnnnnnnnnnnnnnnnnnnnnnnnnnnnnnnnnnnnnnnnnnnnnnnnnnnnnnnnnnnnnnnnnnnnnnnnnnnnnnnnnnnnnnnnnnnnnnnnnnnnnnnnnnnnnnnnnnnnnnnnnnnnnnnnnnnnnnnnnnnnnnnnnnnnnnnnnnnnnnnnnnnnnnnnnnnnnnnnnnnnnnnnnnnnnnnnnnnnnnnnnnnnnnnnnnnnnnnnnnnnnnnnnnnnnnnnnnnnnnnnnnnnnnnnnnnnnnnnnnnnnnnnnnnnnnnnnnnnnnnnnnnnnnnnnnnnnnnnnnnnnnnnnnnnnnnnnnnnnnnnnnnnnnnnnnnnnnnnnnnnnnnnnnnnnnnnnnnnnnnnnnnnnnnnnnnnnnnnnnnnnnnnnnnnnnnnnnnnnnnnnnnnnnnnnnnnnnnnnnnnnnnnnnnnnnnnnnnnnnnnnnnnnnnnnnnnnnnnnnnnnnnnnnnnnnnnnnnnnnnnnnnnnnnnnnnnnnnnnnnnnnnnnnnnnnnnnnnnnnnnnnnnnnnnnnnnnnnnnnnnnnnnnnnnnnnnnnnnnnnnnnnnnnnnnnnnnnnnnnnnnnnnnnnnnnnnnnnnnnnnnnnnnnnnnnnnnnnnnnnnnnnnnnnnnnnnnnnnnnnnnnnnnnnnnnnnnnnnnnnnnnnnnnnnnnnnnnnnnnnnnnnnnnnnnnnnnnnnnnnnnnnnnnnnnnnnnnnnnnnnnnnnnnnnnnnnnnnnnnnnnnnnnnnnnnnnnnnnnnnnnnnnnnnnnnnnnnnnnnnnnnnnnnnnnnnnnnnnnnnnnnnnnnnnnnnnnnnnnnnnnnnnnnnnnnnnnnnnnnnnnnnnnnnnnnnnnnnnnnnnnnnnnnnnnnnnnnnnnnnnnnnnnnnnnnnnnnnnnnnnnnnnnnnnnnnnnnnnnnnnnnnnnnnnnnnnnnnnnnnnnnnnnnnnnnnnnnnnnnnnnnnnnnnnnnnnnnnnnnnnnnnnnnnnnnnnnnnnnnnnnnnnnnnnnnnnnnnnnnnnnnnnnnnnnnnnnnnnnnnnnnnnnnnnnnnnnnnnnnnnnnnnnnnnnnnnnnnnnnnnnnnnnnnnnnnnnnnnnnnnnnnnnnnnnnnnnnnnnnnnnnnnnnnnnnnnnnnnnnnnnnnnnnnnnnnnnnnnnnnnnnnnnnnnnnnnnnnnnnnnnnnnnnnnnnnnnnnnnnnnnnnnnnnnnnnnnnnnnnnnnnnnnnnnnnnnnnnnnnnnnnnnnnnnnnnnnnnnnnnnnnnnnnnnnnnnnnnnnnnnnnnnnnnnnnnnnnnnnnnnnnnnnnnnnnnnnnnnnnnnnnnnnnnnnnnnnnnnnnnnnnnnnnnnnnnnnnnnnnnnnnnnnnnnnnnnnnnnnnnnnnnnnnnnnnnnnnnnnnnnnnnnnnnnnnnnnnnnnnnnnnnnnnnnnnnnnnnnnnnnnnnnnnnnnnnnnnnnnnnnnnnnnnnnnnnnnnnnnnnnnnnnnnnnnnnnnnnnnnnnnnnnnnnnnnnnnnnnnnnnnnnnnnnnnnnnnnnnnnnnnnnnnnnnnnnnnnnnnnnnnnnnnnnnnnnnnnnnnnnnnnnnnnnnnnnnnnnnnnnnnnnnnnnnnnnnnnnnnnnnnnnnnnnnnnnnnnnnnnnnnnnnnnnnnnnnnnnnnnnnnnnnnnnnnnnnnnnnnnnnnnnnnnnnnnnnnnnnnnnnnnnnnnnnnnnnnnnnnnnnnnnnnnnnnnnnnnnnnnnnnnnnnnnnnnnnnnnnnnnnnnnnnnnnnnnnnnnnnnnnnnnnnnnnnnnnnnnnnnnnnnnnnnnnnnnnnnnnnnnnnnnnnnnnnnnnnnnnnnnnnnnnnnnnnnnnnnnnnnnnnnnnnnnnnnnnnnnnnnnnnnnnnnnnnnnnnnnnnnnnnnnnnnnnnnnnnnnnnnnnnnnnnnnnnnnnnnnnnnnnnnnnnnnnnnnnnnnnnnnnnnnnnnnnnnnnnnnnnnnnnnnnnnnnnnnnnnnnnnnnnnnnnnnnnnnnnnnnnnnnnnnnnnnnnnnnnnnnnnnnnnnnnnnnnnnnnnnnnnnnnnnnnnnnnnnnnnnnnnnnnnnnnnnnnnnnnnnnnnnnnnnnnnnnnnnnnnnnnnnnnnnnnnnnnnnnnnnnnnnnnnnnnnnnnnnnnnnnnnnnnnnnnnnnnnnnnnnnnnnnnnnnnnnnnnnnnnnnnnnnnnnnnnnnnnnnnnnnnnnnnnnnnnnnnnnnnnnnnnnnnnnnnnnnnnnnnnnnnnnnnnnnnnnnnnnnnnnnnnnnnnnnnnnnnnnnnnnnnnnnnnnnnnnnnnnnnnnnnnnnnnnnnnnnnnnnnnnnnnnnnnnnnnnnnnnnnnnnnnnnnnnnnnnnnnnnnnnnnnnnnnnnnnnnnnnnnnnnnnnnnnnnnnnnnnnnnnnnnnnnnnnnnnnnnnnnnnnnnnnnnnnnnnnnnnnnnnnnnnnnnnnnnnnnnnnnnnnnnnnnnnnnnnnnnnnnnnnnnnnnnnnnnnnnnnnnnnnnnnnnnnnnnnnnnnnnnnnnnnnnnnnnnnnnnnnnnnnnnnnnnnnnnnnnnnnnnnnnnnnnnnnnnnnnnnnnnnnnnnnnnnnnnnnnnnnnnnnnnnnnnnnnnnnnnnnnnnnnnnnnnnnnnnnnnnnnnnnnnnnnnnnnnnnnnnnnnnnnnnnnnnnnnnnnnnnnnnnnnnnnnnnnnnnnnnnnnnnnnnnnnnnnnnnnnnnnnnnnnnnnnnnnnnnnnnnnnnnnnnnnnnnnnnnnnnnnnnnnnnnnnnnnnnnnnnnnnnnnnnnnnnnnnnnnnnnnnnnnnnnnnnnnnnnnnnnnnnnnnnnnnnnnnnnnnnnnnnnnnnnnnnnnnnnnnnnnnnnnnnnnnnnnnnnnnnnnnnnnnnnnnnnnnnnnnnnnnnnnnnnnnnnnnnnnnnnnnnnnnnnnnnnnnnnnnnnnnnnnnnnnnnnnnnnnnnnnnnnnnnnnnnnnnnnnnnnnnnnnnnnnnnnnnnnnnnnnnnnnnnnnnnnnnnnnnnnnnnnnnnnnnnnnnnnnnnnnnnnnnnnnnnnnnnnnnnnnnnnnnnnnnnnnnnnnnnnnnnnnnnnnnnnnnnnnnnnnnnnnnnnnnnnnnnnnnnnnnnnnnnnnnnnnnnnnnnnnnnnnnnnnnnnnnnnnnnnnnnnnnnnnnnnnnnnnnnnnnnnnnnnnnnnnnnnnnnnnnnnnnnnnnnnnnnnnnnnnnnnnnnnnnnnnnnnnnnnnnnnnnnnnnnnnnnnnnnnnnnnnnnnnnnnnnnnnnnnnnnnnnnnnnnnnnnnnnnnnnnnnnnnnnnnnnnnnnnnnnnnnnnnnnnnnnnnnnnnnnnnnnnnnnnnnnnnnnnnnnnnnnnnnnnnnnnnnnnnnnnnnnnnnnnnnnnnnnnnnnnnnnnnnnnnnnnnnnnnnnnnnnnnnnnnnnnnnnnnnnnnnnnnnnnnnnnnnnnnnnnnnnnnnnnnnnnnnnnnnnnnnnnnnnnnnnnnnnnnnnnnnnnnnnnnnnnnnnnnnnnnnnnnnnnnnnnnnnnnnnnnnnnnnnnnnnnnnnnnnnnnnnnnnnnnnnnnnnnnnnnnnnnnnnnnnnnnnnnnnnnnnnnnnnnnnnnnnnnnnnnnnnnnnnnnnnnnnnnnnnnnnnnnnnnnnnnnnnnnnnnnnnnnnnnnnnnnnnnnnnnnnnnnnnnnnnnnnnnnnnnnnnnnnnnnnnnnnnnnnnnnnnnnnnnnnnnnnnnnnnnnnnnnnnnnnnnnnnnnnnnnnnnnnnnnnnnnnnnnnnnnnnnnnnnnnnnnnnnnnnnnnnnnnnnnnnnnnnnnnnnnnnnnnnnnnnnnnnnnnnnnnnnnnnnnnnnnnnnnnnnnnnnnnnnnnnnnnnnnnnnnnnnnnnnnnnnnnnnnnnnnnnnnnnnnnnnnnnnnnnnnnnnnnnnnnnnnnnnnnnnnnnnnnnnnnnnnnnnnnnnnnnnnnnnnnnnnnnnnnnnnnnnnnnnnnnnnnnnnnnnnnnnnnnnnnnnnnnnnnnnnnnnnnnnnnnnnnnnnnnnnnnnnnnnnnnnnnnnnnnnnnnnnnnnnnnnnnnnnnnnnnnnnnnnnnnnnnnnnnnnnnnnnnnnnnnnnnnnnnnnnnnnnnnnnnnnnnnnnnnnnnnnnnnnnnnnnnnnnnnnnnnnnnnnnnnnnnnnnnnnnnnnnnnnnnnnnnnnnnnnnnnnnnnnnnnnnnnnnnnnnnnnnnnnnnnnnnnnnnnnnnnnnnnnnnnnnnnnnnnnnnnnnnnnnnnnnnnnnnnnnnnnnnnnnnnnnnnnnnnnnnnnnnnnnnnnnnnnnnnnnnnnnnnnnnnnnnnnnnnnnnnnnnnnnnnnnnnnnnnnnnnnnnnnnnnnnnnnnnnnnnnnnnnnnnnnnnnnnnnnnnnnnnnnnnnnnnnnnnnnnnnnnnnnnnnnnnnnnnnnnnnnnnnnnnnnnnnnnnnnnnnnnnnnnnnnnnnnnnnnnnnnnnnnnnnnnnnnnnnnnnnnnnnnnnnnnnnnnnnnnnnnnnnnnnnnnnnnnnnnnnnnnnnnnnnnnnnnnnnnnnnnnnnnnnnnnnnnnnnnnnnnnnnnnnnnnnnnnnnnnnnnnnnnnnnnnnnnnnnnnnnnnnnnnnnnnnnnnnnnnnnnnnnnnnnnnnnnnnnnnnnnnnnnnnnnnnnnnnnnnnnnnnnnnnnnnnnnnnnnnnnnnnnnnnnnnnnnnnnnnnnnnnnnnnnnnnnnnnnnnnnnnnnnnnnnnnnnnnnnnnnnnnnnnnnnnnnnnnnnnnnnnnnnnnnnnnnnnnnnnnnnnnnnnnnnnnnnnnnnnnnnnnnnnnnnnnnnnnnnnnnnnnnnnnnnnnnnnnnnnnnnnnnnnnnnnnnnnnnnnnnnnnnnnnnnnnnnnnnnnnnnnnnnnnnnnnnnnnnnnnnnnnnnnnnnnnnnnnnnnnnnnnnnnnnnnnnnnnnnnnnnnnnnnnnnnnnnnnnnnnnnnnnnnnnnnnnnnnnnnnnnnnnnnnnnnnnnnnnnnnnnnnnnnnnnnnnnnnnnnnnnnnnnnnnnnnnnnnnnnnnnnnnnnnnnnnnnnnnnnnnnnnnnnnnnnnnnnnnnnnnnnnnnnnnnnnnnnnnnnnnnnnnnnnnnnnnnnnnnnnnnnnnnnnnnnnnnnnnnnnnnnnnnnnnnnnnnnnnnnnnnnnnnnnnnnnnnnnnnnnnnnnnnnnnnnnnnnnnnnnnnnnnnnnnnnnnnnnnnnnnnnnnnnnnnnnnnnnnnnnnnnnnnnnnnnnnnnnnnnnnnnnnnnnnnnnnnnnnnnnnnnnnnnnnnnnnnnnnnnnnnnnnnnnnnnnnnnnnnnnnnnnnnnnnnnnnnnnnnnnnnnnnnnnnnnnnnnnnnnnnnnnnnnnnnnnnnnnnnnnnnnnnnnnnnnnnnnnnnnnnnnnnnnnnnnnnnnnnnnnnnnnnnnnnnnnnnnnnnnnnnnnnnnnnnnnnnnnnnnnnnnnnnnnnnnnnnnnnnnnnnnnnnnnnnnnnnnnnnnnnnnnnnnnnnnnnnnnnnnnnnnnnnnnnnnnnnnnnnnnnnnnnnnnnnnnnnnnnnnnnnnnnnnnnnnnnnnnnnnnnnnnnnnnnnnnnnnnnnnnnnnnnnnnnnnnnnnnnnnnnnnnnnnnnnnnnnnnnnnnnnnnnnnnnnnnnnnnnnnnnnnnnnnnnnnnnnnnnnnnnnnnnnnnnnnnnnnnnnnnnnnnnnnnnnnnnnnnnnnnnnnnnnnnnnnnnnnnnnnnnnnnnnnnnnnnnnnnnnnnnnnnnnnnnnnnnnnnnnnnnnnnnnnnnnnnnnnnnnnnnnnnnnnnnnnnnnnnnnnnnnnnnnnnnnnnnnnnnnnnnnnnnnnnnnnnnnnnnnnnnnnnnnnnnnnnnnnnnnnnnnnnnnnnnnnnnnnnnnnnnnnnnnnnnnnnnnnnnnnnnnnnnnnnnnnnnnnnnnnnnnnnnnnnnnnnnnnnnnnnnnnnnnnnnnnnnnnnnnnnnnnnnnnnnnnnnnnnnnnnnnnnnnnnnnnnnnnnnnnnnnnnnnnnnnnnnnnnnnnnnnnnnnnnnnnnnnnnnnnnnnnnnnnnnnnnnnnnnnnnnnnnnnnnnnnnnnnnnnnnnnnnnnnnnnnnnnnnnnnnnnnnnnnnnnnnnnnnnnnnnnnnnnnnnnnnnnnnnnnnnnnnnnnnnnnnnnnnnnnnnnnnnnnnnnnnnnnnnnnnnnnnnnnnnnnnnnnnnnnnnnnnnnnnnnnnnnnnnnnnnnnnnnnnnnnnnnnnnnnnnnnnnnnnnnnnnnnnnnnnnnnnnnnnnnnnnnnnnnnnnnnnnnnnnnnnnnnnnnnnnnnnnnnnnnnnnnnnnnnnnnnnnnnnnnnnnnnnnnnnnnnnnnnnnnnnnnnnnnnnnnnnnnnnnnnnnnnnnnnnnnnnnnnnnnnnnnnnnnnnnnnnnnnnnnnnnnnnnnnnnnnnnnnnnnnnnnnnnnnnnnnnnnnnnnnnnnnnnnnnnnnnnnnnnnnnnnnnnnnnnnnnnnnnnnnnnnnnnnnnnnnnnnnnnnnnnnnnnnnnnnnnnnnnnnnnnnnnnnnnnnnnnnnnnnnnnnnnnnnnnnnnnnnnnnnnnnnnnnnnnnnnnnnnnnnnnnnnnnnnnnnnnnnnnnnnnnnnnnnnnnnnnnnnnnnnnnnnnnnnnnnnnnnnnnnnnnnnnnnnnnnnnnnnnnnnnnnnnnnnnnnnnnnnnnnnnnnnnnnnnnnnnnnnnnnnnnnnnnnnnnnnnnnnnnnnnnnnnnnnnnnnnnnnnnnnnnnnnnnnnnnnnnnnnnnnnnnnnnnnnnnnnnnnnnnnnnnnnnnnnnnnnnnnnnnnnnnnnnnnnnnnnnnnnnnnnnnnnnnnnnnnnnnnnnnnnnnnnnnnnnnnnnnnnnnnnnnnnnnnnnnnnnnnnnnnnnnnnnnnnnnnnnnnnnnnnnnnnnnnnnnnnnnnnnnnnnnnnnnnnnnnnnnnnnnnnnnnnnnnnnnnnnnnnnnnnnnnnnnnnnnnnnnnnnnnnnnnnnnnnnnnnnnnnnnnnnnnnnnnnnnnnnnnnnnnnnnnnnnnnnnnnnnnnnnnnnnnnnnnnnnnnnnnnnnnnnnnnnnnnnnnnnnnnnnnnnnnnnnnnnnnnnnnnnnnnnnnnnnnnnnnnnnnnnnnnnnnnnnnnnnnnnnnnnnnnnnnnnnnnnnnnnnnnnnnnnnnnnnnnnnnnnnnnnnnnnnnnnnnnnnnnnnnnnnnnnnnnnnnnnnnnnnnnnnnnnnnnnnnnnnnnnnnnnnnnnnnnnnnnnnnnnnnnnnnnnnnnnnnnnnnnnnnnnnnnnnnnnnnnnnnnnnnnnnnnnnnnnnnnnnnnnnnnnnnnnnnnnnnnnnnnnnnnnnnnnnnnnnnnnnnnnnnnnnnnnnnnnnnnnnnnnnnnnnnnnnnnnnnnnnnnnnnnnnnnnnnnnnnnnnnnnnnnnnnnnnnnnnnnnnnnnnnnnnnnnnnnnnnnnnnnnnnnnnnnnnnnnnnnnnnnnnnnnnnnnnnnnnnnnnnnnnnnnnnnnnnnnnnnnnnnnnnnnnnnnnnnnnnnnnnnnnnnnnnnnnnnnnnnnnnnnnnnnnnnnnnnnnnnnnnnnnnnnnnnnnnnnnnnnnnnnnnnnnnnnnnnnnnnnnnnnnnnnnnnnnnnnnnnnnnnnnnnnnnnnnnnnnnnnnnnnnnnnnnnnnnnnnnnnnnnnnnnnnnnnnnnnnnnnnnnnnnnnnnnnnnnnnnnnnnnnnnnnnnnnnnnnnnnnnnnnnnnnnnnnnnnnnnnnnnnnnnnnnnnnnnnnnnnnnnnnnnnnnnnnnnnnnnnnnnnnnnnnnnnnnnnnnnnnnnnnnnnnnnnnnnnnnnnnnnnnnnnnnnnnnnnnnnnnnnnnnnnnnnnnnnnnnnnnnnnnnnnnnnnnnnnnnnnnnnnnnnnnnnnnnnnnnnnnnnnnnnnnnnnnnnnnnnnnnnnnnnnnnnnnnnnnnnnnnnnnnnnnnnnnnnnnnnnnnnnnnnnnnnnnnnnnnnnnnnnnnnnnnnnnnnnnnnnnnnnnnnnnnnnnnnnnnnnnnnnnnnnnnnnnnnnnnnnnnnnnnnnnnnnnnnnnnnnnnnnnnnnnnnnnnnnnnnnnnnnnnnnnnnnnnnnnnnnnnnnnnnnnnnnnnnnnnnnnnnnnnnnnnnnnnnnnnnnnnnnnnnnnnnnnnnnnnnnnnnnnnnnnnnnnnnnnnnnnnnnnnnnnnnnnnnnnnnnnnnnnnnnnnnnnnnnnnnnnnnnnnnnnnnnnnnnnnnnnnnnnnnnnnnnnnnnnnnnnnnnnnnnnnnnnnnnnnnnnnnnnnnnnnnnnnnnnnnnnnnnnnnnnnnnnnnnnnnnnnnnnnnnnnnnnnnnnnnnnnnnnnnnnnnnnnnnnnnnnnnnnnnnnnnnnnnnnnnnnnnnnnnnnnnnnnnnnnnnnnnnnnnnnnnnnnnnnnnnnnnnnnnnnnnnnnnnnnnnnnnnnnnnnnnnnnnnnnnnnnnnnnnnnnnnnnnnnnnnnnnnnnnnnnnnnnnnnnnnnnnnnnnnnnnnnnnnnnnnnnnnnnnnnnnnnnnnnnnnnnnnnnnnnnnnnnnnnnnnnnnnnnnnnnnnnnnnnnnnnnnnnnnnnnnnnnnnnnnnnnnnnnnnnnnnnnnnnnnnnnnnnnnnnnnnnnnnnnnnnnnnnnnnnnnnnnnnnnnnnnnnnnnnnnnnnnnnnnnnnnnnnnnnnnnnnnnnnnnnnnnnnnnnnnnnnnnnnnnnnnnnnnnnnnnnnnnnnnnnnnnnnnnnnnnnnnnnnnnnnnnnnnnnnnnnnnnnnnnnnnnnnnnnnnnnnnnnnnnnnnnnnnnnnnnnnnnnnnnnnnnnnnnnnnnnnnnnnnnnnnnnnnnnnnnnnnnnnnnnnnnnnnnnnnnnnnnnnnnnnnnnnnnnnnnnnnnnnnnnnnnnnnnnnnnnnnnnnnnnnnnnnnnnnnnnnnnnnnnnnnnnnnnnnnnnnnnnnnnnnnnnnnnnnnnnnnnnnnnnnnnnnnnnnnnnnnnnnnnnnnnnnnnnnnnnnnnnnnnnnnnnnnnnnnnnnnnnnnnnnnnnnnnnnnnnnnnnnnnnnnnnnnnnnnnnnnnnnnnnnnnnnnnnnnnnnnnnnnnnnnnnnnnnnnnnnnnnnnnnnnnnnnnnnnnnnnnnnnnnnnnnnnnnnnnnnnnnnnnnnnnnnnnnnnnnnnnnnnnnnnnnnnnnnnnnnnnnnnnnnnnnnnnnnnnnnnnnnnnnnnnnnnnnnnnnnnnnnnnnnnnnnnnnnnnnnnnnnnnnnnnnnnnnnnnnnnnnnnnnnnnnnnnnnnnnnnnnnnnnnnnnnnnnnnnnnnnnnnnnnnnnnnnnnnnnnnnnnnnnnnnnnnnnnnnnnnnnnnnnnnnnnnnnnnnnnnnnnnnnnnnnnnnnnnnnnnnnnnnnnnnnnnnnnnnnnnnnnnnnnnnnnnnnnnnnnnnnnnnnnnnnnnnnnnnnnnnnnnnnnnnnnnnnnnnnnnnnnnnnnnnnnnnnnnnnnnnnnnnnnnnnnnnnnnnnnnnnnnnnnnnnnnnnnnnnnnnnnnnnnnnnnnnnnnnnnnnnnnnnnnnnnnnnnnnnnnnnnnnnnnnnnnnnnnnnnnnnnnnnnnnnnnnnnnnnnnnnnnnnnnnnnnnnnnnnnnnnnnnnnnnnnnnnnnnnnnnnnnnnnnnnnnnnnnnnnnnnnnnnnnnnnnnnnnnnnnnnnnnnnnnnnnnnnnnnnnnnnnnnnnnnnnnnnnnnnnnnnnnnnnnnnnnnnnnnnnnnnnnnnnnnnnnnnnnnnnnnnnnnnnnnnnnnnnnnnnnnnnnnnnnnnnnnnnnnnnnnnnnnnnnnnnnnnnnnnnnnnnnnnnnnnnnnnnnnnnnnnnnnnnnnnnnnnnnnnnnnnnnnnnnnnnnnnnnnnnnnnnnnnnnnnnnnnnnnnnnnnnnnnnnnnnnnnnnnnnnnnnnnnnnnnnnnnnnnnnnnnnnnnnnnnnnnnnnnnnnnnnnnnnnnnnnnnnnnnnnnnnnnnnnnnnnnnnnnnnnnnnnnnnnnnnnnnnnnnnnnnnnnnnnnnnnnnnnnnnnnnnnnnnnnnnnnnnnnnnnnnnnnnnnnnnnnnnnnnnnnnnnnnnnnnnnnnnnnnnnnnnnnnnnnnnnnnnnnnnnnnnnnnnnnnnnnnnnnnnnnnnnnnnnnnnnnnnnnnnnnnnnnnnnnnnnnnnnnnnnnnnnnnnnnnnnnnnnnnnnnnnnnnnnnnnnnnnnnnnnnnnnnnnnnnnnnnnnnnnnnnnnnnnnnnnnnnnnnnnnnnnnnnnnnnnnnnnnnnnnnnnnnnnnnnnnnnnnnnnnnnnnnnnnnnnnnnnnnnnnnnnnnnnnnnnnnnnnnnnnnnnnnnnnnnnnnnnnnnnnnnnnnnnnnnnnnnnnnnnnnnnnnnnnnnnnnnnnnnnnnnnnnnnnnnnnnnnnnnnnnnnnnnnnnnnnnnnnnnnnnnnnnnnnnnnnnnnnnnnnnnnnnnnnnnnnnnnnnnnnnnnnnnnnnnnnnnnnnnnnnnnnnnnnnnnnnnnnnnnnnnnnnnnnnnnnnnnnnnnnnnnnnnnnnnnnnnnnnnnnnnnnnnnnnnnnnnnnnnnnnnnnnnnnnnnnnnnnnnnnnnnnnnnnnnnnnnnnnnnnnnnnnnnnnnnnnnnnnnnnnnnnnnnnnnnnnnnnnnnnnnnnnnnnnnnnnnnnnnnnnnnnnnnnnnnnnnnnnnnnnnnnnnnnnnnnnnnnnnnnnnnnnnnnnnnnnnnnnnnnnnnnnnnnnnnnnnnnnnnnnnnnnnnnnnnnnnnnnnnnnnnnnnnnnnnnnnnnnnnnnnnnnnnnnnnnnnnnnnnnnnnnnnnnnnnnnnnnnnnnnnnnnnnnnnnnnnnnnnnnnnnnnnnnnnnnnnnnnnnnnnnnnnnnnnnnnnnnnnnnnnnnnnnnnnnnnnnnnnnnnnnnnnnnnnnnnnnnnnnnnnnnnnnnnnnnnnnnnnnnnnnnnnnnnnnnnnnnnnnnnnnnnnnnnnnnnnnnnnnnnnnnnnnnnnnnnnnnnnnnnnnnnnnnnnnnnnnnnnnnnnnnnnnnnnnnnnnnnnnnnnnnnnnnnnnnnnnnnnnnnnnnnnnnnnnnnnnnnnnnnnnnnnnnnnnnnnnnnnnnnnnnnnnnnnnnnnnnnnnnnnnnnnnnnnnnnnnnnnnnnnnnnnnnnnnnnnnnnnnnnnnnnnnnnnnnnnnnnnnnnnnnnnnnnnnnnnnnnnnnnnnnnnnnnnnnnnnnnnnnnnnnnnnnnnnnnnnnnnnnnnnnnnnnnnnnnnnnnnnnnnnnnnnnnnnnnnnnnnnnnnnnnnnnnnnnnnnnnnnnnnnnnnnnnnnnnnnnnnnnnnnnnnnnnnnnnnnnnnnnnnnnnnnnnnnnnnnnnnnnnnnnnnnnnnnnnnnnnnnnnnnnnnnnnnnnnnnnnnnnnnnnnnnnnnnnnnnnnnnnnnnnnnnnnnnnnnnnnnnnnnnnnnnnnnnnnnnnnnnnnnnnnnnnnnnnnnnnnnnnnnnnnnnnnnnnnnnnnnnnnnnnnnnnnnnnnnnnnnnnnnnnnnnnnnnnnnnnnnnnnnnnnnnnnnnnnnnnnnnnnnnnnnnnnnnnnnnnnnnnnnnnnnnnnnnnnnnnnnnnnnnnnnnnnnnnnnnnnnnnnnnnnnnnnnnnnnnnnnnnnnnnnnnnnnnnnnnnnnnnnnnnnnnnnnnnnnnnnnnnnnnnnnnnnnnnnnnnnnnnnnnnnnnnnnnnnnnnnnnnnnnnnnnnnnnnnnnnnnnnnnnnnnnnnnnnnnnnnnnnnnnnnnnnnnnnnnnnnnnnnnnnnnnnnnnnnnnnnnnnnnnnnnnnnnnnnnnnnnnnnnnnnnnnnnnnnnnnnnnnnnnnnnnnnnnnnnnnnnnnnnnnnnnnnnnnnnnnnnnnnnnnnnnnnnnnnnnnnnnnnnnnnnnnnnnnnnnnnnnnnnnnnnnnnnnnnnnnnnnnnnnnnnnnnnnnnnnnnnnnnnnnnnnnnnnnnnnnnnnnnnnnnnnnnnnnnnnnnnnnnnnnnnnnnnnnnnnnnnnnnnnnnnnnnnnnnnnnnnnnnnnnnnnnnnnnnnnnnnnnnnnnnnnnnnnnnnnnnnnnnnnnnnnnnnnnnnnnnnnnnnnnnnnnnnnnnnnnnnnnnnnnnnnnnnnnnnnnnnnnnnnnnnnnnnnnnnnnnnnnnnnnnnnnnnnnnnnnnnnnnnnnnnnnnnnnnnnnnnnnnnnnnnnnnnnnnnnnnnnnnnnnnnnnnnnnnnnnnnnnnnnnnnnnnnnnnnnnnnnnnnnnnnnnnnnnnnnnnnnnnnnnnnnnnnnnnnnnnnnnnnnnnnnnnnnnnnnnnnnnnnnnnnnnnnnnnnnnnnnnnnnnnnnnnnnnnnnnnnnnnnnnnnnnnnnnnnnnnnnnnnnnnnnnnnnnnnnnnnnnnnnnnnnnnnnnnnnnnnnnnnnnnnnnnnnnnnnnnnnnnnnnnnnnnnnnnnnnnnnnnnnnnnnnnnnnnnnnnnnnnnnnnnnnnnnnnnnnnnnnnnnnnnnnnnnnnnnnnnnnnnnnnnnnnnnnnnnnnnnnnnnnnnnnnnnnnnnnnnnnnnnnnnnnnnnnnnnnnnnnnnnnnnnnnnnnnnnnnnnnnnnnnnnnnnnnnnnnnnnnnnnnnnnnnnnnnnnnnnnnnnnnnnnnnnnnnnnnnnnnnnnnnnnnnnnnnnnnnnnnnnnnnnnnnnnnnnnnnnnnnnnnnnnnnnnnnnnnnnnnnnnnnnnnnnnnnnnnnnnnnnnnnnnnnnnnnnnnnnnnnnnnnnnnnnnnnnnnnnnnnnnnnnnnnnnnnnnnnnnnnnnnnnnnnnnnnnnnnnnnnnnnnnnnnnnnnnnnnnnnnnnnnnnnnnnnnnnnnnnnnnnnnnnnnnnnnnnnnnnnnnnnnnnnnnnnnnnnnnnnnnnnnnnnnnnnnnnnnnnnnnnnnnnnnnnnnnnnnnnnnnnnnnnnnnnnnnnnnnnnnnnnnnnnnnnnnnnnnnnnnnnnnnnnnnnnnnnnnnnnnnnnnnnnnnnnnnnnnnnnnnnnnnnnnnnnnnnnnnnnnnnnnnnnnnnnnnnnnnnnnnnnnnnnnnnnnnnnnnnnnnnnnnnnnnnnnnnnnnnnnnnnnnnnnnnnnnnnnnnnnnnnnnnnnnnnnnnnnnnnnnnnnnnnnnnnnnnnnnnnnnnnnnnnnnnnnnnnnnnnnnnnnnnnnnnnnnnnnnnnnnnnnnnnnnnnnnnnnnnnnnnnnnnnnnnnnnnnnnnnnnnnnnnnnnnnnnnnnnnnnnnnnnnnnnnnnnnnnnnnnnnnnnnnnnnnnnnnnnnnnnnnnnnnnnnnnnnnnnnnnnnnnnnnnnnnnnnnnnnnnnnnnnnnnnnnnnnnnnnnnnnnnnnnnnnnnnnnnnnnnnnnnnnnnnnnnnnnnnnnnnnnnnnnnnnnnnnnnnnnnnnnnnnnnnnnnnnnnnnnnnnnnnnnnnnnnnnnnnnnnnnnnnnnnnnnnnnnnnnnnnnnnnnnnnnnnnnnnnnnnnnnnnnnnnnnnnnnnnnnnnnnnnnnnnnnnnnnnnnnnnnnnnnnnnnnnnnnnnnnnnnnnnnnnnnnnnnnnnnnnnnnnnnnnnnnnnnnnnnnnnnnnnnnnnnnnnnnnnnnnnnnnnnnnnnnnnnnnnnnnnnnnnnnnnnnnnnnnnnnnnnnnnnnnnnnnnnnnnnnnnnnnnnnnnnnnnnnnnnnnnnnnnnnnnnnnnnnnnnnnnnnnnnnnnnnnnnnnnnnnnnnnnnnnnnnnnnnnnnnnnnnnnnnnnnnnnnnnnnnnnnnnnnnnnnnnnnnnnnnnnnnnnnnnnnnnnnnnnnnnnnnnnnnnnnnnnnnnnnnnnnnnnnnnnnnnnnnnnnnnnnnnnnnnnnnnnnnnnnnnnnnnnnnnnnnnnnnnnnnnnnnnnnnnnnnnnnnnnnnnnnnnnnnnnnnnnnnnnnnnnnnnnnnnnnnnnnnnnnnnnnnnnnnnnnnnnnnnnnnnnnnnnnnnnnnnnnnnnnnnnnnnnnnnnnnnnnnnnnnnnnnnnnnnnnnnnnnnnnnnnnnnnnnnnnnnnnnnnnnnnnnnnnnnnnnnnnnnnnnnnnnnnnnnnnnnnnnnnnnnnnnnnnnnnnnnnnnnnnnnnnnnnnnnnnnnnnnnnnnnnnnnnnnnnnnnnnnnnnnnnnnnnnnnnnnnnnnnnnnnnnnnnnnnnnnnnnnnnnnnnnnnnnnnnnnnnnnnnnnnnnnnnnnnnnnnnnnnnnnnnnnnnnnnnnnnnnnnnnnnnnnnnnnnnnnnnnnnnnnnnnnnnnnnnnnnnnnnnnnnnnnnnnnnnnnnnnnnnnnnnnnnnnnnnnnnnnnnnnnnnnnnnnnnnnnnnnnnnnnnnnnnnnnnnnnnnnnnnnnnnnnnnnnnnnnnnnnnnnnnnnnnnnnnnnnnnnnnnnnnnnnnnnnnnnnnnnnnnnnnnnnnnnnnnnnnnnnnnnnnnnnnnnnnnnnnnnnnnnnnnnnnnnnnnnnnnnnnnnnnnnnnnnnnnnnnnnnnnnnnnnnnnnnnnnnnnnnnnnnnnnnnnnnnnnnnnnnnnnnnnnnnnnnnnnnnnnnnnnnnnnnnnnnnnnnnnnnnnnnnnnnnnnnnnnnnnnnnnnnnnnnnnnnnnnnnnnnnnnnnnnnnnnnnnnnnnnnnnnnnnnnnnnnnnnnnnnnnnnnnnnnnnnnnnnnnnnnnnnnnnnnnnnnnnnnnnnnnnnnnnnnnnnnnnnnnnnnnnnnnnnnnnnnnnnnnnnnnnnnnnnnnnnnnnnnnnnnnnnnnnnnnnnnnnnnnnnnnnnnnnnnnnnnnnnnnnnnnnnnnnnnnnnnnnnnnnnnnnnnnnnnnnnnnnnnnnnnnnnnnnnnnnnnnnnnnnnnnnnnnnnnnnnnnnnnnnnnnnnnnnnnnnnnnnnnnnnnnnnnnnnnnnnnnnnnnnnnnnnnnnnnnnnnnnnnnnnnnnnnnnnnnnnnnnnnnnnnnnnnnnnnnnnnnnnnnnnnnnnnnnnnnnnnnnnnnnnnnnnnnnnnnnnnnnnnnnnnnnnnnnnnnnnnnnnnnnnnnnnnnnnnnnnnnnnnnnnnnnnnnnnnnnnnnnnnnnnnnnnnnnnnnnnnnnnnnnnnnnnnnnnnnnnnnnnnnnnnnnnnnnnnnnnnnnnnnnnnnnnnnnnnnnnnnnnnnnnnnnnnnnnnnnnnnnnnnnnnnnnnnnnnnnnnnnnnnnnnnnnnnnnnnnnnnnnnnnnnnnnnnnnnnnnnnnnnnnnnnnnnnnnnnnnnnnnnnnnnnnnnnnnnnnnnnnnnnnnnnnnnnnnnnnnnnnnnnnnnnnnnnnnnnnnnnnnnnnnnnnnnnnnnnnnnnnnnnnnnnnnnnnnnnnnnnnnnnnnnnnnnnnnnnnnnnnnnnnnnnnnnnnnnnnnnnnnnnnnnnnnnnnnnnnnnnnnnnnnnnnnnnnnnnnnnnnnnnnnnnnnnnnnnnnnnnnnnnnnnnnnnnnnnnnnnnnnnnnnnnnnnnnnnnnnnnnnnnnnnnnnnnnnnnnnnnnnnnnnnnnnnnnnnnnnnnnnnnnnnnnnnnnnnnnnnnnnnnnnnnnnnnnnnnnnnnnnnnnnnnnnnnnnnnnnnnnnnnnnnnnnnnnnnnnnnnnnnnnnnnnnnnnnnnnnnnnnnnnnnnnnnnnnnnnnnnnnnnnnnnnnnnnnnnnnnnnnnnnnnnnnnnnnnnnnnnnnnnnnnnnnnnnnnnnnnnnnnnnnnnnnnnnnnnnnnnnnnnnnnnnnnnnnnnnnnnnnnnnnnnnnnnnnnnnnnnnnnnnnnnnnnnnnnnnnnnnnnnnnnnnnnnnnnnnnnnnnnnnnnnnnnnnnnnnnnnnnnnnnnnnnnnnnnnnnnnnnnnnnnnnnnnnnnnnnnnnnnnnnnnnnnnnnnnnnnnnnnnnnnnnnnnnnnnnnnnnnnnnnnnnnnnnnnnnnnnnnnnnnnnnnnnnnnnnnnnnnnnnnnnnnnnnnnnnnnnnnnnnnnnnnnnnnnnnnnnnnnnnnnnnnnnnnnnnnnnnnnnnnnnnnnnnnnnnnnnnnnnnnnnnnnnnnnnnnnnnnnnnnnnnnnnnnnnnnnnnnnnnnnnnnnnnnnnnnnnnnnnnnnnnnnnnnnnnnnnnnnnnnnnnnnnnnnnnnnnnnnnnnnnnnnnnnnnnnnnnnnnnnnnnnnnnnnnnnnnnnnnnnnnnnnnnnnnnnnnnnnnnnnnnnnnnnnnnnnnnnnnnnnnnnnnnnnnnnnnnnnnnnnnnnnnnnnnnnnnnnnnnnnnnnnnnnnnnnnnnnnnnnnnnnnnnnnnnnnnnnnnnnnnnnnnnnnnnnnnnnnnnnnnnnnnnnnnnnnnnnnnnnnnnnnnnnnnnnnnnnnnnnnnnnnnnnnnnnnnnnnnnnnnnnnnnnnnnnnnnnnnnnnnnnnnnnnnnnnnnnnnnnnnnnnnnnnnnnnnnnnnnnnnnnnnnnnnnnnnnnnnnnnnnnnnnnnnnnnnnnnnnnnnnnnnnnnnnnnnnnnnnnnnnnnnnnnnnnnnnnnnnnnnnnnnnnnnnnnnnnnnnnnnnnnnnnnnnnnnnnnnnnnnnnnnnnnnnnnnnnnnnnnnnnnnnnnnnnnnnnnnnnnnnnnnnnnnnnnnnnnnnnnnnnnnnnnnnnnnnnnnnnnnnnnnnnnnnnnnnnnnnnnnnnnnnnnnnnnnnnnnnnnnnnnnnnnnnnnnnnnnnnnnnnnnnnnnnnnnnnnnnnnnnnnnnnnnnnnnnnnnnnnnnnnnnnnnnnnnnnnnnnnnnnnnnnnnnnnnnnnnnnnnnnnnnnnnnnnnnnnnnnnnnnnnnnnnnnnnnnnnnnnnnnnnnnnnnnnnnnnnnnnnnnnnnnnnnnnnnnnnnnnnnnnnnnnnnnnnnnnnnnnnnnnnnnnnnnnnnnnnnnnnnnnnnnnnnnnnnnnnnnnnnnnnnnnnnnnnnnnnnnnnnnnnnnnnnnnnnnnnnnnnnnnnnnnnnnnnnnnnnnnnnnnnnnnnnnnnnnnnnnnnnnnnnnnnnnnnnnnnnnnnnnnnnnnnnnnnnnnnnnnnnnnnnnnnnnnnnnnnnnnnnnnnnnnnnnnnnnnnnnnnnnnnnnnnnnnnnnnnnnnnnnnnnnnnnnnnnnnnnnnnnnnnnnnnnnnnnnnnnnnnnnnnnnnnnnnnnnnnnnnnnnnnnnnnnnnnnnnnnnnnnnnnnnnnnnnnnnnnnnnnnnnnnnnnnnnnnnnnnnnnnnnnnnnnnnnnnnnnnnnnnnnnnnnnnnnnnnnnnnnnnnnnnnnnnnnnnnnnnnnnnnnnnnnnnnnnnnnnnnnnnnnnnnnnnnnnnnnnnnnnnnnnnnnnnnnnnnnnnnnnnnnnnnnnnnnnnnnnnnnnnnnnnnnnnnnnnnnnnnnnnnnnnnnnnnnnnnnnnnnnnnnnnnnnnnnnnnnnnnnnnnnnnnnnnnnnnnnnnnnnnnnnnnnnnnnnnnnnnnnnnnnnnnnnnnnnnnnnnnnnnnnnnnnnnnnnnnnnnnnnnnnnnnnnnnnnnnnnnnnnnnnnnnnnnnnnnnnnnnnnnnnnnnnnnnnnnnnnnnnnnnnnnnnnnnnnnnnnnnnnnnnnnnnnnnnnnnnnnnnnnnnnnnnnnnnnnnnnnnnnnnnnnnnnnnnnnnnnnnnnnnnnnnnnnnnnnnnnnnnnnnnnnnnnnnnnnnnnnnnnnnnnnnnnnnnnnnnnnnnnnnnnnnnnnnnnnnnnnnnnnnnnnnnnnnnnnnnnnnnnnnnnnnnnnnnnnnnnnnnnnnnnnnnnnnnnnnnnnnnnnnnnnnnnnnnnnnnnnnnnnnnnnnnnnnnnnnnnnnnnnnnnnnnnnnnnnnnnnnnnnnnnnnnnnnnnnnnnnnnnnnnnnnnnnnnnnnnnnnnnnnnnnnnnnnnnnnnnnnnnnnnnnnnnnnnnnnnnnnnnnnnnnnnnnnnnnnnnnnnnnnnnnnnnnnnnnnnnnnnnnnnnnnnnnnnnnnnnnnnnnnnnnnnnnnnnnnnnnnnnnnnnnnnnnnnnnnnnnnnnnnnnnnnnnnnnnnnnnnnnnnnnnnnnnnnnnnnnnnnnnnnnnnnnnnnnnnnnnnnnnnnnnnnnnnnnnnnnnnnnnnnnnnnnnnnnnnnnnnnnnnnnnnnnnnnnnnnnnnnnnnnnnnnnnnnnnnnnnnnnnnnnnnnnnnnnnnnnnnnnnnnnnnnnnnnnnnnnnnnnnnnnnnnnnnnnnnnnnnnnnnnnnnnnnnnnnnnnnnnnnnnnnnnnnnnnnnnnnnnnnnnnnnnnnnnnnnnnnnnnnnnnnnnnnnnnnnnnnnnnnnnnnnnnnnnnnnnnnnnnnnnnnnnnnnnnnnnnnnnnnnnnnnnnnnnnnnnnnnnnnnnnnnnnnnnnnnnnnnnnnnnnnnnnnnnnnnnnnnnnnnnnnnnnnnnnnnnnnnnnnnnnnnnnnnnnnnnnnnnnnnnnnnnnnnnnnnnnnnnnnnnnnnnnnnnnnnnnnnnnnnnnnnnnnnnnnnnnnnnnnnnnnnnnnnnnnnnnnnnnnnnnnnnnnnnnnnnnnnnnnnnnnnnnnnnnnnnnnnnnnnnnnnnnnnnnnnnnnnnnnnnnnnnnnnnnnnnnnnnnnnnnnnnnnnnnnnnnnnnnnnnnnnnnnnnnnnnnnnnnnnnnnnnnnnnnnnnnnnnnnnnnnnnnnnnnnnnnnnnnnnnnnnnnnnnnnnnnnnnnnnnnnnnnnnnnnnnnnnnnnnnnnnnnnnnnnnnnnnnnnnnnnnnnnnnnnnnnnnnnnnnnnnnnnnnnnnnnnnnnnnnnnnnnnnnnnnnnnnnnnnnnnnnnnnnnnnnnnnnnnnnnnnnnnnnnnnnnnnnnnnnnnnnnnnnnnnnnnnnnnnnnnnnnnnnnnnnnnnnnnnnnnnnnnnnnnnnnnnnnnnnnnnnnnnnnnnnnnnnnnnnnnnnnnnnnnnnnnnnnnnnnnnnnnnnnnnnnnnnnnnnnnnnnnnnnnnnnnnnnnnnnnnnnnnnnnnnnnnnnnnnnnnnnnnnnnnnnnnnnnnnnnnnnnnnnnnnnnnnnnnnnnnnnnnnnnnnnnnnnnnnnnnnnnnnnnnnnnnnnnnnnnnnnnnnnnnnnnnnnnnnnnnnnnnnnnnnnnnnnnnnnnnnnnnnnnnnnnnnnnnnnnnnnnnnnnnnnnnnnnnnnnnnnnnnnnnnnnnnnnnnnnnnnnnnnnnnnnnnnnnnnnnnnnnnnnnnnnnnnnnnnnnnnnnnnnnnnnnnnnnnnnnnnnnnnnnnnnnnnnnnnnnnnnnnnnnnnnnnnnnnnnnnnnnnnnnnnnnnnnnnnnnnnnnnnnnnnnnnnnnnnnnnnnnnnnnnnnnnnnnnnnnnnnnnnnnnnnnnnnnnnnnnnnnnnnnnnnnnnnnnnnnnnnnnnnnnnnnnnnnnnnnnnnnnnnnnnnnnnnnnnnnnnnnnnnnnnnnnnnnnnnnnnnnnnnnnnnnnnnnnnnnnnnnnnnnnnnnnnnnnnnnnnnnnnnnnnnnnnnnnnnnnnnnnnnnnnnnnnnnnnnnnnnnnnnnnnnnnnnnnnnnnnnnnnnnnnnnnnnnnnnnnnnnnnnnnnnnnnnnnnnnnnnnnnnnnnnnnnnnnnnnnnnnnnnnnnnnnnnnnnnnnnnnnnnnnnnnnnnnnnnnnnnnnnnnnnnnnnnnnnnnnnnnnnnnnnnnnnnnnnnnnnnnnnnnnnnnnnnnnnnnnnnnnnnnnnnnnnnnnnnnnnnnnnnnnnnnnnnnnnnnnnnnnnnnnnnnnnnnnnnnnnnnnnnnnnnnnnnnnnnnnnnnnnnnnnnnnnnnnnnnnnnnnnnnnnnnnnnnnnnnnnnnnnnnnnnnnnnnnnnnnnnnnnnnnnnnnnnnnnnnnnnnnnnnnnnnnnnnnnnnnnnnnnnnnnnnnnnnnnnnnnnnnnnnnnnnnnnnnnnnnnnnnnnnnnnnnnnnnnnnnnnnnnnnnnnnnnnnnnnnnnnnnnnnnnnnnnnnnnnnnnnnnnnnnnnnnnnnnnnnnnnnnnnnnnnnnnnnnnnnnnnnnnnnnnnnnnnnnnnnnnnnnnnnnnnnnnnnnnnnnnnnnnnnnnnnnnnnnnnnnnnnnnnnnnnnnnnnnnnnnnnnnnnnnnnnnnnnnnnnnnnnnnnnnnnnnnnnnnnnnnnnnnnnnnnnnnnnnnnnnnnnnnnnnnnnnnnnnnnnnnnnnnnnnnnnnnnnnnnnnnnnnnnnnnnnnnnnnnnnnnnnnnnnnnnnnnnnnnnnnnnnnnnnnnnnnnnnnnnnnnnnnnnnnnnnnnnnnnnnnnnnnnnnnnnnnnnnnnnnnnnnnnnnnnnnnnnnnnnnnnnnnnnnnnnnnnnnnnnnnnnnnnnnnnnnnnnnnnnnnnnnnnnnnnnnnnnnnnnnnnnnnnnnnnnnnnnnnnnnnnnnnnnnnnnnnnnnnnnnnnnnnnnnnnnnnnnnnnnnnnnnnnnnnnnnnnnnnnnnnnnnnnnnnnnnnnnnnnnnnnnnnnnnnnnnnnnnnnnnnnnnnnnnnnnnnnnnnnnnnnnnnnnnnnnnnnnnnnnnnnnnnnnnnnnnnnnnnnnnnnnnnnnnnnnnnnnnnnnnnnnnnnnnnnnnnnnnnnnnnnnnnnnnnnnnnnnnnnnnnnnnnnnnnnnnnnnnnnnnnnnnnnnnnnnnnnnnnnnnnnnnnnnnnnnnnnnnnnnnnnnnnnnnnnnnnnnnnnnnnnnnnnnnnnnnnnnnnnnnnnnnnnnnnnnnnnnnnnnnnnnnnnnnnnnnnnnnnnnnnnnnnnnnnnnnnnnnnnnnnnnnnnnnnnnnnnnnnnnnnnnnnnnnnnnnnnnnnnnnnnnnnnnnnnnnnnnnnnnnnnnnnnnnnnnnnnnnnnnnnnnnnnnnnnnnnnnnnnnnnnnnnnnnnnnnnnnnnnnnnnnnnnnnnnnnnnnnnnnnnnnnnnnnnnnnnnnnnnnnnnnnnnnnnnnnnnnnnnnnnnnnnnnnnnnnnnnnnnnnnnnnnnnnnnnnnnnnnnnnnnnnnnnnnnnnnnnnnnnnnnnnnnnnnnnnnnnnnnnnnnnnnnnnnnnnnnnnnnnnnnnnnnnnnnnnnnnnnnnnnnnnnnnnnnnnnnnnnnnnnnnnnnnnnnnnnnnnnnnnnnnnnnnnnnnnnnnnnnnnnnnnnnnnnnnnnnnnnnnnnnnnnnnnnnnnnnnnnnnnnnnnnnnnnnnnnnnnnnnnnnnnnnnnnnnnnnnnnnnnnnnnnnnnnnnnnnnnnnnnnnnnnnnnnnnnnnnnnnnnnnnnnnnnnnnnnnnnnnnnnnnnnnnnnnnnnnnnnnnnnnnnnnnnnnnnnnnnnnnnnnnnnnnnnnnnnnnnnnnnnnnnnnnnnnnnnnnnnnnnnnnnnnnnnnnnnnnnnnnnnnnnnnnnnnnnnnnnnnnnnnnnnnnnnnnnnnnnnnnnnnnnnnnnnnnnnnnnnnnnnnnnnnnnnnnnnnnnnnnnnnnnnnnnnnnnnnnnnnnnnnnnnnnnnnnnnnnnnnnnnnnnnnnnnnnnnnnnnnnnnnnnnnnnnnnnnnnnnnnnnnnnnnnnnnnnnnnnnnnnnnnnnnnnnnnnnnnnnnnnnnnnnnnnnnnnnnnnnnnnnnnnnnnnnnnnnnnnnnnnnnnnnnnnnnnnnnnnnnnnnnnnnnnnnnnnnnnnnnnnnnnnnnnnnnnnnnnnnnnnnnnnnnnnnnnnnnnnnnnnnnnnnnnnnnnnnnnnnnnnnnnnnnnnnnnnnnnnnnnnnnnnnnnnnnnnnnnnnnnnnnnnnnnnnnnnnnnnnnnnnnnnnnnnnnnnnnnnnnnnnnnnnnnnnnnnnnnnnnnnnnnnnnnnnnnnnnnnnnnnnnnnnnnnnnnnnnnnnnnnnnnnnnnnnnnnnnnnnnnnnnnnnnnnnnnnnnnnnnnnnnnnnnnnnnnnnnnnnnnnnnnnnnnnnnnnnnnnnnnnnnnnnnnnnnnnnnnnnnnnnnnnnnnnnnnnnnnnnnnnnnnnnnnnnnnnnnnnnnnnnnnnnnnnnnnnnnnnnnnnnnnnnnnnnnnnnnnnnnnnnnnnnnnnnnnnnnnnnnnnnnnnnnnnnnnnnnnnnnnnnnnnnnnnnnnnnnnnnnnnnnnnnnnnnnnnnnnnnnnnnnnnnnnnnnnnnnnnnnnnnnnnnnnnnnnnnnnnnnnnnnnnnnnnnnnnnnnnnnnnnnnnnnnnnnnnnnnnnnnnnnnnnnnnnnnnnnnnnnnnnnnnnnnnnnnnnnnnnnnnnnnnnnnnnnnnnnnnnnnnnnnnnnnnnnnnnnnnnnnnnnnnnnnnnnnnnnnnnnnnnnnnnnnnnnnnnnnnnnnnnnnnnnnnnnnnnnnnnnnnnnnnnnnnnnnnnnnnnnnnnnnnnnnnnnnnnnnnnnnnnnnnnnnnnnnnnnnnnnnnnnnnnnnnnnnnnnnnnnnnnnnnnnnnnnnnnnnnnnnnnnnnnnnnnnnnnnnnnnnnnnnnnnnnnnnnnnnnnnnnnnnnnnnnnnnnnnnnnnnnnnnnnnnnnnnnnnnnnnnnnnnnnnnnnnnnnnnnnnnnnnnnnnnnnnnnnnnnnnnnnnnnnnnnnnnnnnnnnnnnnnnnnnnnnnnnnnnnnnnnnnnnnnnnnnnnnnnnnnnnnnnnnnnnnnnnnnnnnnnnnnnnnnnnnnnnnnnnnnnnnnnnnnnnnnnnnnnnnnnnnnnnnnnnnnnnnnnnnnnnnnnnnnnnnnnnnnnnnnnnnnnnnnnnnnnnnnnnnnnnnnnnnnnnnnnnnnnnnnnnnnnnnnnnnnnnnnnnnnnnnnnnnnnnnnnnnnnnnnnnnnnnnnnnnnnnnnnnnnnnnnnnnnnnnnnnnnnnnnnnnnnnnnnnnnnnnnnnnnnnnnnnnnnnnnnnnnnnnnnnnnnnnnnnnnnnnnnnnnnnnnnnnnnnnnnnnnnnnnnnnnnnnnnnnnnnnnnnnnnnnnnnnnnnnnnnnnnnnnnnnnnnnnnnnnnnnnnnnnnnnnnnnnnnnnnnnnnnnnnnnnnnnnnnnnnnnnnnnnnnnnnnnnnnnnnnnnnnnnnnnnnnnnnnnnnnnnnnnnnnnnnnnnnnnnnnnnnnnnnnnnnnnnnnnnnnnnnnnnnnnnnnnnnnnnnnnnnnnnnnnnnnnnnnnnnnnnnnnnnnnnnnnnnnnnnnnnnnnnnnnnnnnnnnnnnnnnnnnnnnnnnnnnnnnnnnnnnnnnnnnnnnnnnnnnnnnnnnnnnnnnnnnnnnnnnnnnnnnnnnnnnnnnnnnnnnnnnnnnnnnnnnnnnnnnnnnnnnnnnnnnnnnnnnnnnnnnnnnnnnnnnnnnnnnnnnnnnnnnnnnnnnnnnnnnnnnnnnnnnnnnnnnnnnnnnnnnnnnnnnnnnnnnnnnnnnnnnnnnnnnnnnnnnnnnnnnnnnnnnnnnnnnnnnnnnnnnnnnnnnnnnnnnnnnnnnnnnnnnnnnnnnnnnnnnnnnnnnnnnnnnnnnnnnnnnnnnnnnnnnnnnnnnnnnnnnnnnnnnnnnnnnnnnnnnnnnnnnnnnnnnnnnnnnnnnnnnnnnnnnnnnnnnnnnnnnnnnnnnnnnnnnnnnnnnnnnnnnnnnnnnnnnnnnnnnnnnnnnnnnnnnnnnnnnnnnnnnnnnnnnnnnnnnnnnnnnnnnnnnnnnnnnnnnnnnnnnnnnnnnnnnnnnnnnnnnnnnnnnnnnnnnnnnnnnnnnnnnnnnnnnnnnnnnnnnnnnnnnnnnnnnnnnnnnnnnnnnnnnnnnnnnnnnnnnnnnnnnnnnnnnnnnnnnnnnnnnnnnnnnnnnnnnnnnnnnnnnnnnnnnnnnnnnnnnnnnnnnnnnnnnnnnnnnnnnnnnnnnnnnnnnnnnnnnnnnnnnnnnnnnnnnnnnnnnnnnnnnnnnnnnnnnnnnnnnnnnnnnnnnnnnnnnnnnnnnnnnnnnnnnnnnnnnnnnnnnnnnnnnnnnnnnnnnnnnnnnnnnnnnnnnnnnnnnnnnnnnnnnnnnnnnnnnnnnnnnnnnnnnnnnnnnnnnnnnnnnnnnnnnnnnnnnnnnnnnnnnnnnnnnnnnnnnnnnnnnnnnnnnnnnnnnnnnnnnnnnnnnnnnnnnnnnnnnnnnnnnnnnnnnnnnnnnnnnnnnnnnnnnnnnnnnnnnnnnnnnnnnnnnnnnnnnnnnnnnnnnnnnnnnnnnnnnnnnnnnnnnnnnnnnnnnnnnnnnnnnnnnnnnnnnnnnnnnnnnnnnnnnnnnnnnnnnnnnnnnnnnnnnnnnnnnnnnnnnnnnnnnnnnnnnnnnnnnnnnnnnnnnnnnnnnnnnnnnnnnnnnnnnnnnnnnnnnnnnnnnnnnnnnnnnnnnnnnnnnnnnnnnnnnnnnnnnnnnnnnnnnnnnnnnnnnnnnnnnnnnnnnnnnnnnnnnnnnnnnnnnnnnnnnnnnnnnnnnnnnnnnnnnnnnnnnnnnnnnnnnnnnnnnnnnnnnnnnnnnnnnnnnnnnnnnnnnnnnnnnnnnnnnnnnnnnnnnnnnnnnnnnnnnnnnnnnnnnnnnnnnnnnnnnnnnnnnnnnnnnnnnnnnnnnnnnnnnnnnnnnnnnnnnnnnnnnnnnnnnnnnnnnnnnnnnnnnnnnnnnnnnnnnnnnnnnnnnnnnnnnnnnnnnnnnnnnnnnnnnnnnnnnnnnnnnnnnnnnnnnnnnnnnnnnnnnnnnnnnnnnnnnnnnnnnnnnnnnnnnnnnnnnnnnnnnnnnnnnnnnnnnnnnnnnnnnnnnnnnnnnnnnnnnnnnnnnnnnnnnnnnnnnnnnnnnnnnnnnnnnnnnnnnnnnnnnnnnnnnnnnnnnnnnnnnnnnnnnnnnnnnnnnnnnnnnnnnnnnnnnnnnnnnnnnnnnnnnnnnnnnnnnnnnnnnnnnnnnnnnnnnnnnnnnnnnnnnnnnnnnnnnnnnnnnnnnnnnnnnnnnnnnnnnnnnnnnnnnnnnnnnnnnnnnnnnnnnnnnnnnnnnnnnnnnnnnnnnnnnnnnnnnnnnnnnnnnnnnnnnnnnnnnnnnnnnnnnnnnnnnnnnnnnnnnnnnnnnnnnnnnnnnnnnnnnnnnnnnnnnnnnnnnnnnnnnnnnnnnnnnnnnnnnnnnnnnnnnnnnnnnnnnnnnnnnnnnnnnnnnnnnnnnnnnnnnnnnnnnnnnnnnnnnnnnnnnnnnnnnnnnnnnnnnnnnnnnnnnnnnnnnnnnnnnnnnnnnnnnnnnnnnnnnnnnnnnnnnnnnnnnnnnnnnnnnnnnnnnnnnnnnnnnnnnnnnnnnnnnnnnnnnnnnnnnnnnnnnnnnnnnnnnnnnnnnnnnnnnnnnnnnnnnnnnnnnnnnnnnnnnnnnnnnnnnnnnnnnnnnnnnnnnnnnnnnnnnnnnnnnnnnnnnnnnnnnnnnnnnnnnnnnnnnnnnnnnnnnnnnnnnnnnnnnnnnnnnnnnnnnnnnnnnnnnnnnnnnnnnnnnnnnnnnnnnnnnnnnnnnnnnnnnnnnnnnnnnnnnnnnnnnnnnnnnnnnnnnnnnnnnnnnnnnnnnnnnnnnnnnnnnnnnnnnnnnnnnnnnnnnnnnnnnnnnnnnnnnnnnnnnnnnnnnnnnnnnnnnnnnnnnnnnnnnnnnnnnnnnnnnnnnnnnnnnnnnnnnnnnnnnnnnnnnnnnnnnnnnnnnnnnnnnnnnnnnnnnnnnnnnnnnnnnnnnnnnnnnnnnnnnnnnnnnnnnnnnnnnnnnnnnnnnnnnnnnnnnnnnnnnnnnnnnnnnnnnnnnnnnnnnnnnnnnnnnnnnnnnnnnnnnnnnnnnnnnnnnnnnnnnnnnnnnnnnnnnnnnnnnnnnnnnnnnnnnnnnnnnnnnnnnnnnnnnnnnnnnnnnnnnnnnnnnnnnnnnnnnnnnnnnnnnnnnnnnnnnnnnnnnnnnnnnnnnnnnnnnnnnnnnnnnnnnnnnnnnnnnnnnnnnnnnnnnnnnnnnnnnnnnnnnnnnnnnnnnnnnnnnnnnnnnnnnnnnnnnnnnnnnnnnnnnnnnnnnnnnnnnnnnnnnnnnnnnnnnnnnnnnnnnnnnnnnnnnnnnnnnnnnnnnnnnnnnnnnnnnnnnnnnnnnnnnnnnnnnnnnnnnnnnnnnnnnnnnnnnnnnnnnnnnnnnnnnnnnnnnnnnnnnnnnnnnnnnnnnnnnnnnnnnnnnnnnnnnnnnnnnnnnnnnnnnnnnnnnnnnnnnnnnnnnnnnnnnnnnnnnnnnnnnnnnnnnnnnnnnnnnnnnnnnnnnnnnnnnnnnnnnnnnnnnnnnnnnnnnnnnnnnnnnnnnnnnnnnnnnnnnnnnnnnnnnnnnnnnnnnnnnnnnnnnnnnnnnnnnnnnnnnnnnnnnnnnnnnnnnnnnnnnnnnnnnnnnnnnnnnnnnnnnnnnnnnnnnnnnnnnnnnnnnnnnnnnnnnnnnnnnnnnnnnnnnnnnnnnnnnnnnnnnnnnnnnnnnnnnnnnnnnnnnnnnnnnnnnnnnnnnnnnnnnnnnnnnnnnnnnnnnnnnnnnnnnnnnnnnnnnnnnnnnnnnnnnnnnnnnnnnnnnnnnnnnnnnnnnnnnnnnnnnnnnnnnnnnnnnnnnnnnnnnnnnnnnnnnnnnnnnnnnnnnnnnnnnnnnnnnnnnnnnnnnnnnnnnnnnnnnnnnnnnnnnnnnnnnnnnnnnnnnnnnnnnnnnnnnnnnnnnnnnnnnnnnnnnnnnnnnnnnnnnnnnnnnnnnnnnnnnnnnnnnnnnnnnnnnnnnnnnnnnnnnnnnnnnnnnnnnnnnnnnnnnnnnnnnnnnnnnnnnnnnnnnnnnnnnnnnnnnnnnnnnnnnnnnnnnnnnnnnnnnnnnnnnnnnnnnnnnnnnnnnnnnnnnnnnnnnnnnnnnnnnnnnnnnnnnnnnnnnnnnnnnnnnnnnnnnnnnnnnnnnnnnnnnnnnnnnnnnnnnnnnnnnnnnnnnnnnnnnnnnnnnnnnnnnnnnnnnnnnnnnnnnnnnnnnnnnnnnnnnnnnnnnnnnnnnnnnnnnnnnnnnnnnnnnnnnnnnnnnnnnnnnnnnnnnnnnnnnnnnnnnnnnnnnnnnnnnnnnnnnnnnnnnnnnnnnnnnnnnnnnnnnnnnnnnnnnnnnnnnnnnnnnnnnnnnnnnnnnnnnnnnnnnnnnnnnnnnnnnnnnnnnnnnnnnnnnnnnnnnnnnnnnnnnnnnnnnnnnnnnnnnnnnnnnnnnnnnnnnnnnnnnnnnnnnnnnnnnnnnnnnnnnnnnnnnnnnnnnnnnnnnnnnnnnnnnnnnnnnnnnnnnnnnnnnnnnnnnnnnnnnnnnnnnnnnnnnnnnnnnnnnnnnnnnnnnnnnnnnnnnnnnnnnnnnnnnnnnnnnnnnnnnnnnnnnnnnnnnnnnnnnnnnnnnnnnnnnnnnnnnnnnnnnnnnnnnnnnnnnnnnnnnnnnnnnnnnnnnnnnnnnnnnnnnnnnnnnnnnnnnnnnnnnnnnnnnnnnnnnnnnnnnnnnnnnnnnnnnnnnnnnnnnnnnnnnnnnnnnnnnnnnnnnnnnnnnnnnnnnnnnnnnnnnnnnnnnnnnnnnnnnnnnnnnnnnnnnnnnnnnnnnnnnnnnnnnnnnnnnnnnnnnnnnnnnnnnnnnnnnnnnnnnnnnnnnnnnnnnnnnnnnnnnnnnnnnnnnnnnnnnnnnnnnnnnnnnnnnnnnnnnnnnnnnnnnnnnnnnnnnnnnnnnnnnnnnnnnnnnnnnnnnnnnnnnnnnnnnnnnnnnnnnnnnnnnnnnnnnnnnnnnnnnnnnnnnnnnnnnnnnnnnnnnnnnnnnnnnnnnnnnnnnnnnnnnnnnnnnnnnnnnnnnnnnnnnnnnnnnnnnnnnnnnnnnnnnnnnnnnnnnnnnnnnnnnnnnnnnnnnnnnnnnnnnnnnnnnnnnnnnnnnnnnnnnnnnnnnnnnnnnnnnnnnnnnnnnnnnnnnnnnnnnnnnnnnnnnnnnnnnnnnnnnnnnnnnnnnnnnnnnnnnnnnnnnnnnnnnnnnnnnnnnnnnnnnnnnnnnnnnnnnnnnnnnnnnnnnnnnnnnnnnnnnnnnnnnnnnnnnnnnnnnnnnnnnnnnnnnnnnnnnnnnnnnnnnnnnnnnnnnnnnnnnnnnnnnnnnnnnnnnnnnnnnnnnnnnnnnnnnnnnnnnnnnnnnnnnnnnnnnnnnnnnnnnnnnnnnnnnnnnnnnnnnnnnnnnnnnnnnnnnnnnnnnnnnnnnnnnnnnnnnnnnnnnnnnnnnnnnnnnnnnnnnnnnnnnnnnnnnnnnnnnnnnnnnnnnnnnnnnnnnnnnnnnnnnnnnnnnnnnnnnnnnnnnnnnnnnnnnnnnnnnnnnnnnnnnnnnnnnnnnnnnnnnnnnnnnnnnnnnnnnnnnnnnnnnnnnnnnnnnnnnnnnnnnnnnnnnnnnnnnnnnnnnnnnnnnnnnnnnnnnnnnnnnnnnnnnnnnnnnnnnnnnnnnnnnnnnnnnnnnnnnnnnnnnnnnnnnnnnnnnnnnnnnnnnnnnnnnnnnnnnnnnnnnnnnnnnnnnnnnnnnnnnnnnnnnnnnnnnnnnnnnnnnnnnnnnnnnnnnnnnnnnnnnnnnnnnnnnnnnnnnnnnnnnnnnnnnnnnnnnnnnnnnnnnnnnnnnnnnnnnnnnnnnnnnnnnnnnnnnnnnnnnnnnnnnnnnnnnnnnnnnnnnnnnnnnnnnnnnnnnnnnnnnnnnnnnnnnnnnnnnnnnnnnnnnnnnnnnnnnnnnnnnnnnnnnnnnnnnnnnnnnnnnnnnnnnnnnnnnnnnnnnnnnnnnnnnnnnnnnnnnnnnnnnnnnnnnnnnnnnnnnnnnnnnnnnnnnnnnnnnnnnnnnnnnnnnnnnnnnnnnnnnnnnnnnnnnnnnnnnnnnnnnnnnnnnnnnnnnnnnnnnnnnnnnnnnnnnnnnnnnnnnnnnnnnnnnnnnnnnnnnnnnnnnnnnnnnnnnnnnnnnnnnnnnnnnnnnnnnnnnnnnnnnnnnnnnnnnnnnnnnnnnnnnnnnnnnnnnnnnnnnnnnnnnnnnnnnnnnnnnnnnnnnnnnnnnnnnnnnnnnnnnnnnnnnnnnnnnnnnnnnnnnnnnnnnnnnnnnnnnnnnnnnnnnnnnnnnnnnnnnnnnnnnnnnnnnnnnnnnnnnnnnnnnnnnnnnnnnnnnnnnnnnnnnnnnnnnnnnnnnnnnnnnnnnnnnnnnnnnnnnnnnnnnnnnnnnnnnnnnnnnnnnnnnnnnnnnnnnnnnnnnnnnnnnnnnnnnnnnnnnnnnnnnnnnnnnnnnnnnnnnnnnnnnnnnnnnnnnnnnnnnnnnnnnnnnnnnnnnnnnnnnnnnnnnnnnnnnnnnnnnnnnnnnnnnnnnnnnnnnnnnnnnnnnnnnnnnnnnnnnnnnnnnnnnnnnnnnnnnnnnnnnnnnnnnnnnnnnnnnnnnnnnnnnnnnnnnnnnnnnnnnnnnnnnnnnnnnnnnnnnnnnnnnnnnnnnnnnnnnnnnnnnnnnnnnnnnnnnnnnnnnnnnnnnnnnnnnnnnnnnnnnnnnnnnnnnnnnnnnnnnnnnnnnnnnnnnnnnnnnnnnnnnnnnnnnnnnnnnnnnnnnnnnnnnnnnnnnnnnnnnnnnnnnnnnnnnnnnnnnnnnnnnnnnnnnnnnnnnnnnnnnnnnnnnnnnnnnnnnnnnnnnnnnnnnnnnnnnnnnnnnnnnnnnnnnnnnnnnnnnnnnnnnnnnnnnnnnnnnnnnnnnnnnnnttgtcgaccggcaagccgccgaattcggcgagggctttgagttcgccggccaggaaggccgcgcgacaggcatggcgctggatcttgccgctggaggtcctgggaatcgtgccgctgcgcaccagcacgaccgcgtccagggccaagccatgttcatcgagcaccgccctgcgaaccgcagccagcacgtgcgcgaaatcgacctctcctttgcgcgcgacctcctgcaccagaaccaggcgctggcggtcgtgattgtccgcgacgaatgcggccccgtagccggctgccagtagcgggtggctaccgcgggcggtggcctcgatatcctgcggatagcggttcaggccgcggacgatgatcaggtcatccagccggccggtgacgtagagttggccctcgcgcatgaagcccagatcgccggtccgcaggaacgggcctccgcccaagtcgctcaggcgggcgtcgaaggaacggcgagtctggccgggcttgtgccagtagccctgaccgaccgacgcgccggcaacccagatttcgcccacgcggtcgggggcggcctctgcgcggctgtgccggtcgacgatcactacgcgcagaccgccgacgggcgatccgcaggccaccaggcgatgagcctgcggcgcatcattgggcacgggctcgatgcggttctcggccagcgccgaaccgtggaaggtcccgatggtcgcgccgctgtcgcgcgtcgggccgctgaccatgagcgtcgcctccgccaaaccgtagcagcaataaagggctccgggtttgaagccgcagggggcgaacgcggcggcaaagcgttcgagcgttccgggctcaatgggttcgccgccgacgaaggccaatgcccaggaggaaaggtcgagggtggcacgctgctcctcggtgattttgcgaatacaaagatcgtaggcgaagttgggcccgccggagatggtggcccggtacttgctgatggcggccagccaggtgatagggctctggaggaacgtggtcggcgagatggaaacgtttgtcacaccggcgaacaccgggaccagaacgccacccaccagccccatgtcatggtacatgggcagccagaacacgctgctgtcctcgtactgtatgccgaaagcctgatggatggtgtggatgttggccatgaggttggcgtgactgagcatgacgcccttgggccggctggtcgagccggaggtgtactggagcagggcaagcgtgtcgggggcgatggccggttcttgccagcgcttggccaaggcgtcgggaatctcgtcggtggcgagccacgagagctgggaggaagtggccgcttgaccgcttttttccgcttccattctggcctggaactgagccgcgcccaaggtgttgctcagagcgatgcgggccccggcatcggcggcgacggcctggaagcgttcgagtatgcggtggcgatgaggcgggtaggtcggcaccgctacgcaaccggcgtacaggcaaccgaagaaggccgtaatgaagtcgaggccgggcggatagaccagcagcacgcactggccggcaacgcccatgtcctgcaaacgagccgcgatggctcgggctcgccgatcgagctgggcgtaggtcagactggcgtgatcaccctggccttcgagcagatggacgaaggccggttgtcgcgggcgttcatcggcgtggcggcgcagcgcgtggatcaggtggcctggaagctgatgcagactaacgtggttttgagcgtgaacggacataataccgggtttcctggataacttcggcccacgaccggcgcgggtccaatcgtttataactccggccgagttcgttttcaaggattttgtccgcgcccggtcatggccgtgacgggaaaatccgggttgagagtagtcagagtcgccgtaaaatggggataattctggaggcacactgatgctcaaacgaccgcgtggtcatagtcccacttgaaccagccctcaagcgcaaaatatggccccgattatagcgaacaatccgtcaatgccagaactattctaattgcccatatacttcatgattctgccccggtaataagcgagcgcaaggaaaaacgacctcgccgtagtgcccgattccacgtattatggactccctgtgaccgaacccaaaaaggtcaaactcggtttcttcctcatcggcagcttcgttgttgccgccgcagccctgttatcattcggctggctggcggaagaggtgctccaatcagagacgcaggcattcgatgatgccgtgcgggcagcaatccaccgactcgcgtcgccgggaatgaccagcgcgatgcaagttttttcatttctcggttcgggaacactcctggcggcgctgagtctcctcacgattgtaatatttttatacatccatcgccctcgatcggctcatttgatgggcattaccatggcaggtgcggtcgctcttgatctgttgttgaagcacgcattccaccgtgggcgtcccgtcccctttttcgggacggccccaagctcgtatagttttccgagcggccatgctttcggatcgctttgtttctatggggcgttggcaggaattctttccgcgcacgcttcaacaccgagggcacgattctttatctggacatgcgctacactgcttgtcgggcttatcggattttcacgcatctatctgggagtacattacccgagcgatgtcttaggcggctattgcgctgcccttgtttgggtgggagcgattagtattctgaaccgtgttcttaacaaccgtgccaggtgaggtatcgaagccccggcgaacggcgctactcactcctgcgtttggacggatctggcaggtcgcccgttcccgtaatttcgaattaacctgtaccgcctttgtatgcccaggtgatttgctcgttagttcaatagtgctctgacatgtggtcgaaattgctcagacagaggggaagcctcggtttaaagtcatattggtcgtgagccctacacactttttaagagcgggaattccgatttgccgatcaagttgtattcgaatgcgttttctgcaccagacccggaccccgtgcaacaactatgatggtccgatgagcgcagatccgcgccatgagacgctcctccgggcttggacctggcgcctcgttcggtttgtattgtcggcaatgctgctttgccaggcgcactcctatgcgcaattaggaccgcagccgccatgcggtaaggaagccgttccgccctatcctggtctggatgattcggccatcgtgaagtcatggagcaagtctgatttcggccgcgactggagaccgcccgcatgcaccggttgggctgcggtgggctttacaacgttggtgaccacagtcgcgcggtttcgtcatacctcggaaactgagggcttgcttcgccacatcggggcaatttcagaactcgcgggcatgcgctactggtcgaccactcacaagcagtggcaaacactaattgtggacgcctacgctatgaccagcttgcagcctagtcaacgccgcgaagactttacgcccgatgagatgaaggaaggcacggtactctactttgaacaggtcgataacctttctggcaaagccatctaccgaatgcatattgctgaggcttcggcggaccgtctcgtcttcgatgtcgagaacgtcagcacgatgcgctatctctttataaccatcttccaaccgggtgagatgcaatcgatctactttctggatcgcgaatcggaaaacgtctggcgatgctacggcatggtgcgcacaggaaagaacgcgaaccgcctggtcctgggaaatgagtcttccacggtcaatcgggccttcgcgttctatcgcaacttggttggaattcccaccgaccaggagccgccggcggcgcgatgaaggcaggagtttgtagctcccccagctttcgcgcgtctcggtgcttcgccggactgacgagacaatggaaaaatcaaccactgcgggttgttcggtttctcaggctgttgcttcttttctgggtcactgctgtcgctatggggagaggcagctttcttgactcctttgccgactttcttgcccccttgcctacaccctcacccaaatccttgcctgccgcgatgggttcaccttgcttcatctcgtggccgattccctcgccgccccttcccacatctttgccggcggctttgaagtcgcctcgggccgactccggccccgctcccagtttgcctgccgtttgggcatcaacgtgtcccgtggccggcaggttctccgacttctgataggtcagatggggagaagggcaaatttccttggagtttacgcatggctgctgcgttggcggtggttgccgtcgtaaaaccaagctacatgagggtcccgcgggaagaaaccttctaaaccctccccctcggttccccctcaggtggcaaacgcactgaggtggatgacgcgcccacgcgctgccaaagcagcacccgtcaggccgatattggaaaggcggatatcctccccctctccgacggccgggtactgtttcgcttcgcctcctgatattctttggaggaaagcgtccacgtcatcacgtcccgcatcaggggttggattcctccccttctctccagccgagcccgcccgatccagcgcatcgagtccgtaactgcgcatgagtttcggccagagctttctcagcgtgtcagggctgtcaaagagctcgaaaccgctcacctcgccctcgatcgtgaagactgccccaacctgcccctcctctggcggcaaggaacgaacgtattcctccagccccgccgagtgttgctcgaatatatccgccatggccgacgtgcgggaagtggcattcagccggtggaatttctcgtcgatgtcctgccagaccgctctctggttcgagtatctggtccccgtggactgcagcgatgcagaaacctgcgccatcttcctagcccgaccttcggcatattgagcacgcggtgccgcagagaaatccacggaacggcgtgcccagcggccgcgctccacacaggaaaccggaattgtgacggctttcttagccgaaatgagaatactcaaattcagcgtgcggttttgcttggcgccgatcagttcttcgccctccatcaaaaaaaccgggtggtcgctgtcgttgatgaatttcaggtccggaacactgccgccttcggacacctcggcaaccttggcagacttgttggtcagagcttcgtccaaggttatgtagtcgggcgcgatgcccttgccgaatacaggaaagatcgtgagatttcgaaatgtcttgggtttgccaagcctggtactggaaatagtatcggtaatcagttgcataatgcctcctctgggtggtggcattcggttgacccgtagtgggctgagccagccatccaagaatttgtcagccctggtttctaataatgccctttcatgctgcttgcagaacttccagcagccgcaccattgccagcgtgtcctgcctgcagtaagccaggagggcctctttaagccgccttctctcttcggttcccgcctcagcatgaaccatcttttcccaggcaaggccggcgtcgttgccttcggccacttccatcccgtcgtaggacatgtcgggcacaagggcaggcaagacgctcttcaatgaaagcggctggtggacgactttacctcgattagccgccatttgttccggtgcagtctttccaggatgtcaactctggccagaatgttgtcgtgtgtgaaagtcgcctcgaagatggcgggatgttgcctgtccgctaccgcctgctcggtttgccggagggccttgtccatctcctcgcgccccgcctcgatgagcgctccgccgggaaacatcctctgggcccatcggcccacctcgtgaccctgctcgaagaccgccatggattgttcgtcaggctccgctgccagttccggctgatgaacctccaggtacaggcgcttgaggcactgccagccggcgatgaatcttgattttgagagccccatggatcctccggtttagcaagaccacgactgcctaccagaccgcaactgtacgcgggggccgcctgccaagagcatacacccaaactgtgtcagggatggtcaccgcgatggctggtgatggatacctgggcatctctaaaagcgagttatcagcagggggccgcaatactcaaccaaagatcaaaacggggccacacacttccgtttccgttactcgctcagggcacacgccggagctttcagcgggcctgcgtcattcgagtggagccgcggcttccgttcgccgctcctggcagtcctggggaatttgccgcaaccggattccgtgaaacgcgttgctgttgacccatcgcatgttgtcgcaacctgtctgaagccgacggatgacccgtcctttggaggcaccattttgcgggtttgggaagtcggcgggaagtctgggccagtggctcttagcgttcgaggttttcggagagcaattcaaaccgacctactggaacgaaacctcagggacctccgcatggaggatggggagttcaaactcgatgtgcctggctatgggtttgccgccgtccggctgctggattaacatctgaggccaggccagcgtggacctggcacgaatgcgccttcgctaagagcgggatctgagcaatcggtaggacctcgcttggccattcgctgtgcctcgcttcactccaaacaacgccactcccaagcagcccgaatcgccccttagccaaagagtccacgggatgagtccccagccgcgagctatattccgaaatgggtcctcgcacagttgtgaacagggtactcggtactttggtgcttttgacgctttgagatggggcagcgaaactagcagtgtgaacaatcccccccagaggatgggggatcgaacaatagagtgcccaccgtgctgaccgcctaaggggtggtgctcgggggcagctcagcaggatggcagaggatcggccgtatccggttgtgccgcatatgcgaaggcagtcacgactctaacttggcgggaagaaacaatgattcggatcggggtcatcggctacggctactggggtccaaatatagtcagaaacctgcactccctcgattcgacccgggttgctgccgtttgcgacagtgacccaaaaggtcaaagccgggcaaaacaagcatatccggatgtgcaggttacctccgacgcatctgaaatcttgcattcaccatccgttgatgcagtggccatcgtcactcccgtctggacgcatttcgagctggcaatggctgccctggaaaacggcaagcacgttttccttgaaaagccccttacttcgaatgcgatccaggctgagaggctgatcgaattggcagagaagagaaacctcaagattatggtggaccacacgtttctgtttaccggagcggtgaagaagatccgccaactgatcgatcaaggtgaactgggcaacatctactatttcgactccacgagggtccaactgggccttttccaacacgaccttgacgtgatttgggatctcgcgcctcatgatttgtccataatggaccacctcatccgaaaggaacccgaggctgtcgtcgcgaccggccaggctcacttgaacgtccatgccgacgtggcatttatcactgtgtatttcccgtccaacactattgctcacatcaacgttaactggttatctcccgtgaagatccgaaccacgctggtcgggggagagaaaaagatgctggtgtggaacgacttggaagccgtcgagaaaattaaggtctacgacaggggcgtgcaaatggccagcagggaaggagtctatgaattgcttgtcagctaccgctcgggagacatgtgggcgcccaagatcgagcagacagaagcactgaaggtcgaactggagtacttcttggagtgtatcgaaaccaaccaaacgccccttaacgacggtttggctggattgcgtgttgtcaaattgctggaagcggcaacagaatcactaaagctgagaggggcgtccgtttcggtatgaacatctaccacctcctcagcagtcacgattgtcttgccacaagcggggcactttagctcttcctcttcgcccacttcgatgatcgcgggaccgctcgtttgaatcgttgaggtaatacgagatcagaagaccggtgtccgcgtagaggatcatgcgggcttagtagctctcctcgtcccgcgccagcagaactaaattgggcagaattttgtcgccacaaattcgacgccgccgagcggcagcgtcgggccagcgaatcgggcgtccccgtctagccgccggccccacttccggcgccgtttccagttcgtgaacgccttcaaagaatttccggcgctcccgaggcggcaaggccttcacgtactccaatacttcattcgcgcccatcatcgaaaaatatcacgcacggggcgcgcagcgcaagttcggcgggctgccgcagggcgagcacagctctacgattcaccgtctcgccaaaacgcagagttgcactctgcgccagccagccttttttcttcgcggcacaaaggggcgctacagttctgctcccggacttgcctttcatccctcccaggtgtataccttcgtcatgtttatcctgtggtagccacctggcgggcggccgggtcgcgatcacccaacggccccaccacccgcctcttgccccgtgaaggaggaagcagtgaagtataacctgctcgaagaaaagtggattcccgttctatacaaggacgggatcagcacacgtgtgaatgtcattgaggcgtttacggaagccggccgcatccgcgaaatcgcggccagcaaccctatggaccgcttggccatcctgcgtttcctgctcgcgcttctctattggtgcaaggggaatcctccagacgaaaccgactcgatctcttcgtttccctcggattggttcaagaggctcgatgacaataaggactgtttcaacctgctgggcgatgggaggcgtttttaccaacagaagcctaagcgtcttgagaagaaactctcggccgactatctcatgcaggaggtgcccaccggcacaaacttctggcacttccggcatgggacagatttgagagacggcttatgtccggcgtgctgtgcaatgggcctgttgcgcctgccgctctttgctacctcggccgggcgcggcaagcccccgggcgtcaatcaaaaaccgccgacctacatcgtgccgatgggcgactcgctttccgaaaccctgcgtctctcgtggcggaaaagaccggagccgaacctgggcacgcccacatgggaaaagccggacataaccctccctcaacacggcaatgttcccctattaacgggattaacgtgggtgccgcgccgcgtgtggttggacgctcccgaggaaccccagtccaactgcatcgcctgcgggcgcagagaggctctgatccgtcgatgtgtctttgcgggtatcggcagcacaagaacagacgaagggagtccggcacgagtgtggaacgacccgcacaccatcagggaaggcgacgagattgtgaagcctttcagcgcgcttggcccggccgatgctgcggctgggaagtggacgaaagtcgtggctggaatcctgtgcggggaaaagccgaaggaaaaacaaaggttgtgggtcgtcagctttgcgacagtgcagaatgacaaatacctggaagcaaccgagtgggagattccgttcctgaccgcgcttgacgacatgaaggttcaggagagtatagaaagcatcggggcgtggcagagggaaggctggaagctccctggcaaaaccaaaccgcgagagatttcccaaacaaggggacaccttgaaattctctccgccgtcgccgcggttcgtccccaagccgaaagaacggtttccggaagaattgaccaattgatcgcccaaggcggcgacgcatggcaagaagccgcccaggagtatcgtccgctgatggccgcagtcgccaaatcgctttcacccggttacacaagcgcgtctctccgaagtcggcaagaaattgccgcagtaaagccggacatgcggccgaagaaaaaccacaaaaacgaagggagggacaagtgactgcaacggagcagtacgtcgaagttctgagtcggctgaaacccggtgagctcgggctcttgcgcaaccatgccggacaagggctcgacgaatcggtggagggctttgaccttttcgcaggactctggtggccactgcgggcgcaaacccagcgggcgcctcgccgtgaggtggcgtggcttgtcgccaaactctacgccttccggcccctcgagcattcacccggggagacgctcgctcgccaactcgcgcgctcccggcccggcgacaaaacagagcgaaagcgtttcgagcaacgcttcgataggatgctgacgctgccgcttgctgaaatcgaacccgccctacaatgggcaatcgacctcatcgctgccaagcaccccaaactcgactgggtacggctgacgaacgatctttccatctgggaacgcgaatccacccggctcaaatgggccacggaattcttgagctgttcaataggaggagaatcatgttgatccagattcacgccattcaaaatcacagcccggccaacctgaaccgggatgacctgggcgcgcccaagacttgcttttttggcggagtcttgcgctcccgtatttccagccagtgtctcaagcgcagcatccgcatgagtgaggagttcagccaattgcgcggcggagtgcgcacccgccagttagcgaaagagattgccgaaaaggtgacgggcaaagacgtcaggaagcgcgccgagaacattctcaaggcctgcggcctggagcctaaaaaggcaaaaaagcaggaaggagagggtgaacaagaaagtgccgagaggagcaagatgttggtttacaccacgcaaggggcgattgtacggatggccgaactcctccagaaggaagacggaaaaacggacgaggccttagcagcggagttcgggaagctgatcagtgaatccgtcgccgtgccggacatggccctgtgcggcaggatgcttgaaacgggagtactcgaaaacaccactgtcgaggcatcgcttcaggtggcccatgcgatttccacccatgaggcccgcccggaggtggactactatgtggccgctgatgatgtccccggcgaggacgcgggcgcagcttacgtggatgaagccatgtttggctcagcatgtttttacaagtatttctccattcattgggaaacgctggtcaggaacctcgagcccttcggcgcggatcacgaaaagttggcggcccataccgtcggcgagttcattcgcgcagcggcgttggtcaaccccacgggaaaacaaaacagttttgccgcgcacaatcctcctgacggaatgttggtggaagtcagaaacactccaatcagctacgccaacgccttcgccaaaccggcggctcctcagggcgaacgggacatcatctcgcagagcgtggcggagcttgcccattatgtgaacgacatggatacgggatacggcaagcccacgaagcggttctggttctctcccaatctccgctatccgttgacggctaccaccacggaaagcgaaaacggaaaacagaaacagcgtgaggtcccgcttgccgacaaagatgtcaagtctcttgacgaactgatagcggccgtactcaaccaaatcggccacgactggcaggaggtcgagaaagtggtcctgaatccggaggtgccccgtgagcccaaacacgctgttcattcggcttgaagggcctcttcaggcttggggcgatcagcaatcgaagtttgtcatccggcggacggctgaggccccgaccaaatcgggcgtaatcggcatgctgtgcgcggccttgggcgcctcccggtcagaggccgctgaggagtggcttccaaggctaagccggctgctcatgggcgtacgcatcgacgcgcccggagtccgctggtgggattatcacaccgtgggcgccggcatgccgatgcgcactgccgagggtggaagcaagcccggggccatgctcacccgccgcgagtacctttgcgatgcgtcgttcttggttgcactccagggtgaaccgggcctgatcgctgaaattgacgccgcggtcaagtcgccccgatggactctgtacctcggcagaaagtgctgcccgccctcgcgccctttgctggagcatccgccaggggaattttccgatttgctctccgccctcgaatcggtaccttggcgcaaacggctggagggagacccacagccccaaacgctggaatgtctgctcgactggcacccaaccgcagaccagccggacgctcccgatgattcgctcgtttggtacgacgtgcctcggagtctcgacccgccctcgcacgaagctcgattcgtcattcgcaagcaattacgcgtcggggctgaaggcggcgtgaccgttgcacctctgcccgcacagagcgccacgccggcgcctccccgcccaagggcggattacaccaataccgagtacaaaaaccggcgcaaagagcggctcgacgatgaccatcacttatgcgttttttgcaagtctcccgccaccaccgtgcagcacatcacctaccgtcgcgcgggtggcggcgagttgaaggacgatttgcgctccctctgccgcctctgccacgacgccgtgaccatgcttgaatacggcctgggcatgggactcgaccgcatcaatcccgaggacccgcaatggcgtgaccggattatcgacaagcgggacgagatcgtcaggttccgctcggaggaaacccgcaggcgattgctcgccgaggaggtggaataggatgtacatttcctgtctcctaatcaacgtcggtgacaaccccgaccgtccccgccccgggcggctctggctgcgcaacctttatcacgttcatcagcgcctctgcatggcctttccctcccatccccaaaaagatccccacttcctcgcgcccttcaagcccgcggactttgacgggaagcaagtccatgtggagcgcggtgcggattccggctttctctttcgcatcgacccgcaactgggcggccgggccatgattgtggtgcagtccgccaccaaacccgattgggactatgcctttcaaaatgcgggccatcttctggtgaattccttcgccgctccccctcaggtaaaagaactcgatccctgtttcagcgccggtcagcagcttcgctttcgaatccgcgtcaacctgagcaaaaagataaagaccagcacagcgggcatcgatcttaccaggccgcgagtggggacggatccccagggccgaccgaaggcccaaagcaaacgcgtggcgctcacctgggataaggaccaggacccgcaggacgccatacgggagtggttcgctaaaaaggcccagaacggcggcttcaagctgggagccttgcgcgctctgcacatcggctggggcgctggaaatgacccggactccacgcctgccgtccaggacagccgctcgggggacaggcgcatgaaattccgctccgccttgctcgaaggaacgctcacggttgaggaccctgctaaatttcgtgaagccgtcgttcacggcatcgggcccggcaaggccttcggtttcggcctgctttcagtagcccccgaagcccgctcagcgggcggcgacgtgtagcccacggcgcaagccagacccgtggtggtgacatgcgaactcaagatctgcatattctaccgaagttcagcgacggatggagttacctgtacgtcgagcgctgcaaggtggatcaggaagaccgggccattgccctgcacaatgaagcggggaagacgcccgtgccttgcgcaaatctggccttgctcatgctgggaccgggcgtctccatcactcacgccgccatttccgtgctggcggaccatgggtgcctagtggcgtggtgcggagaagagggggtccgcttctacgccacgggcatgggcgagacgcgcaacgccgccaattttctccatcaggcgcgcctgtgggcgcacgagggttttcgcatgcaggtggtgcgccgcctctatcagttgcgttttgccgagaagttcgaccccgccttgaccctgcaacagatacgtggcatggagggcgtacgggttcgagacgcctacgcgaaggccgccaaggaggccggcatcgcctgggaaggccgaaactatcagcgccaggagtggagccaggcggaccccgctaaccgggccttgtccgccgccaattcctgcctttacggtatctgccatgcggccgtcgtctcggctgggttttcccccgccctcgggtttatccatacgggcaagatgctctcctttgtgtacgatgtggccgacttgtacaaaactgaaatcaccgttccgatggcctttcgcgccgccgccgaagcgcaagatcaactcgagcggcgggtgcgcatcacctgccgcgacaggtttgtatccacacggcttttggaaaggatcatcccggatatccaatctgccctgatgctgtcaaaagcggcggcgcccgactctgaatttgaccttgatgccgccgcccccggctccctctgggacgatttgcagggcgccgtggaaggcggccacttgcacgccgtagaagaggaagaaacggagcccaaccatggtggttctgattcttgagcgcgtcccgccagcattgcgaggcgagctcactcggtggtttctcgaacctcaggcaggggtgtttgtgggacgcgtctccgctctggttcgcgatcggttatgggaaaaggcttgcgcccaagccaaaggaggcggatgcctgattctccactcaagcgataatgagcagggattccgtgtccgaacatggggcagaacagcgcgctgcatcgatgacttcgagggcctttttctcgtgcgtatgccgcagaatcaatagcttgggaagtgttgtccccacgcgcgtgggggtgaaccggatgagtttccagggccgctcattgcagacgagttgtccccacgcgcgtgggggtgaaccgtgggatgcgtcctggctcgaggtgggtggcccgttgtccccacgcgcgtgggggtgaaccggctcaaggcgcttgccgccgagggcaagaccggttgtccccacgcgcgtgggggtgaaccggtgggatacacatcggccgggctgatcgcgatgttgtccccacgcgcgtgggggtgaaccgccctgctgaaacgacacgatctggcctaccaggttgtccccacgcgcgtgggggtgaaccggaggacccctacattcaggagcagatcaagatgttgtccccacgcgcgtgggggtgaaccgacggcagccgacattgcatttctctatcacgggttgtccccacgcgcgtgggggtgaaccgtttcttgatccagtcgatcacggaagaagtccgttgtccccacgcgcgtgggggtgaaccgtctattgcccgacacgcgcgccttgccgcggagttgtccccacgcgcgtgggggtgaaccgcgtttgcccggtagcggcgaatgccgagcccagttgtccccacgcgcgtgggggtgaaccggcgacccgatctttaccaagtccgccgacagcgttgtccccacgcgcgtgggggtgaaccgtgatcgagacgctcaccgaaagcgccatcatcgttgtccccacgcgcgtgggggtgaaccgtttgggagtgggcgaaaattgacctgtaccgcgttgtccccacgcgcgtgggggtgaaccgcaagggttttatacctccatgcggcaatgggggttgtccccacgcgcgtgggggtgaaccggtgtacaaatcctgcttcttgatgtcgagcgagttgtccccacgcgcgtgggggtgaaccgctgccgcccatcacgccgcgctcgagaaggtcgttgtccccacgcgcgtgggggtgaaccgatttcgacatagaccagggcggcgcctccgcagttgtccccacgcgcgtgggggtgaaccgttgtggctcggagttccggagccggcctcggggttgtccccacgcgcgtgggggtgaaccgctgagctgcgcaagcgcggtgcgcgtgaacgtgttgtccccacgcgcgtgggggtgaaccgtgggccgcgagaaattgcagcatatagcggtcgttgtccccacgcgcgtgggggtgaaccggtctcggcaaggtgcaaatggacgcggcggttgttgtccccacgcgcgtgggggcgaaccgcaggctggcggagagcgccgctctgtgtttcagcagtgcactgctccctcatgccagtgtccagacgccatgtcgcacccggccagttggagtttaccgcctctagtgtagtgcgccataaatgtccttactttcccccgcccccgtgacccgacccctgacgcctggtacctgcctttttgtcccctgcacttttctcttgacaaacgggacgacataggctacagttgttccgtggggttgggcagggggttgagccctgccggataggttatgcgtcctcttttgttttcgcgttcctgcctgtggtttctgcctccaagtgcagtcaagaagtcgaggagtcaaagagtcgaggagttgggaagccaaccgccgaccccatctttcgggtcgcagcttggggagacggcgggccgttcctggactttccgactcgccaatttctctacccgggaacctggcaagcgagcggggaggcacgactccgaaaaaacacaaaataatacgaacgaagccagtatgttattgaaaacacaaggagcgtttggaaaacagactcaaaacgaactgaaaaacgaacccaatttagggcattgatatacttgactgacagtgtaccgaaaggtctttccaataacctgcgattctatcggcaagtttagcgacttccgccctcttaaatggggttaatattatggatttgtttgagggttctccaaaacaagaatctcagcatcgagttttttccctagtgcttgaatttcttcaagtgttcgaacgtcgtcaagctcttttagaagaacttgtatccttgataaacgagtctgttctaaaggctgacgttcccacagagccgcaaacgctgcccgtgagaactccagtatgttctcctgccgagtaatcaccgtcttcatacaccggcaaacgaatagcagggtgttttccgttttatcccccataggattcctctatccattttttgaaagtacttaattttataaaaaatcaggaagcgaattccttgcatatcttgtagaaagcatagggcgacgttaacacggccgcaaaaattccgcctgcggggccgagcatgaggcttacgactatggccaggaagaccgtgagaaacagcgtcccgccaagcgccatgaggaactgggtcggggtgatatgcttataccactccttttttcttttttgctgctcctgctcccacctcttcatctccgcttgttccttcgctcttctttcgtcttgcttccttccccatgcatcctccgcccggtcgatctcttcccattctgcgcttccttctttcgggccacagattcttgcttctatgccgtcaacaaatcgccgttcttcttcggaaaggaccttgctgctgtcgcagaattcgtggtagtaccggctgccggagtttggggattccctgcacaggtccagcacgtagccgcttatccaatcagcacgtgcaaagaagagttctttcaatggcaaggtcttggggtcgggcaggtcgggcaattgctttcttttttccatctgctttatgctaaccacgctgtggcccgtccttctcagccattcccgctttaggcatccggggcggtcctccagggaattcggatacatctcgtcatatgtgaattcttcgtccgtttgccctttgtcggtctcgctgcctttgctcactttcacctccggaatgctctcctgtggggcggattctagcacaaatttcgccgccacaggtggtatttagtctatgtgaggatgtatggcctagtcttgtttctgatgtcggcgctggccggttcggttgtccggggcagcgagtcaattcctatttcggcgctgactgggacaacaaactgcttggcttattcaacggttaaagacagaatagggggtgcgctgtgattgaattgcgtcaacatactcgccgatggctgggggagaatgtgcatattgtgtaccttgatgactctaaacaagaagaaaccaagcagcgtttccaattgataggtgctgtcattgtcaacgatgcagtgtttaataagttggagcagcatctagcttactacctttatgaattggtggagccggatgtaggagaaaaaatcgaagaattccattcatctgacattcttgcaggcaggaagccgtttgagaaggtcacgagggagcgggcaatgcaaatactctcgaccgccattgcggctgtggatgaattccacatcccggtgatttatggggcggtggatttggcaaagctatgtgccactgattatgccactgccagtccagttgacatggcctttcggcgctgcgtaagactggtcgaagagtggtttcaagagatttctcccgaggacttgggattgctgatttgcgatgacggtgataagtccgtgaagtctgccatgcagaaggctttccatttgttccgtaaacgggatataggtagccccccggtcaggggaatattagagcatctgcacgatgatatgtacttcggggattccaagtattctaggggcattcaattggccgatatttgcacctttctgataggaagacatctggccgggtattctgacaccgaggacctttatcaacaattaagcgcaaacattgtaaaatactcatgtgaaccatcataagggtcaattgaaccgtgggttttggcatacttcaagaaacacccgatgttgatacgtgaatgaggggaaacaggggaaattggtaggtcagttcaagccacttgtcactgaacttctagatgaataatgggggcgtgatgaagcgtcaaatggagatggtcgaaggtcccgaggcatggaaaaggttcgaggtcacgatgaaaaatgtcttggcggttccccattccgaggtccagaaacgaatcgaggaacgccgcaaggaagccgcaagcaacccgaatcggcgggggccgaaacggacaggcaagccgtctgcatcccccagcgcctagcctgccgcctctgccgtctttccggtcaactccctgtaggtcagacgccttcccacggcctgcctcattgcagccgtgaacctgccgctatcgtccgtctccttgcggttgttgtagcggaacgcctgctcgtcaagatagcgaaacaggtggaagggctcaacgctaacgtaggttccccttatcccacgtttcaacaatgaccagaagttctccagaccgttggtatggacattcccctggacataagcttcggcgtggtcaatgacttggtgcgcaaactcatttagtccttcgtaggacttcagggcgtcggtatagacgctcgacccaacctcaacgttctccctcactagctgctgcaatgccttcttgcggcggttctccattacggtcgcccggaccttccccccacgctgtaggagagccgccacgatggccttgcccgaaggacctgtccctgtgattgcctcggctcgcctatccttgtgcatgttgcgggacaggccgccgatgaaggtttcgtcaacctcgacctcgccgcccagcttcccgcccgccatgccgtcctgcatggcgagcctcgcccgctggagcatgaaccatgccgtcttttgcgttaccccgatggcacggtggacttcccacgaggaaacgccgttcttgcagttggccagcatccacaccaccgggagccacttgtccaggccgatgggcgagtcctcgaagatggtcccgaccttcagggagaacttctggcagggatgcttctggaaacacttgaaaacacgggcgttaggcagatacttgacatcggttgagccgcactgggggcaggttatcctgccgtccggccagcggagattggccatgaaggcgtggcagttgtcggggttggagaagaaaacaatagcttcctggagggtagttggtatggttattgtatccacacttataatatacctaaaagatatggatttctacgaaaaaagtggggttttccacaggttttttgagtcgggcgggagtataatccgggcgcagaaagtacgcctacacatgaaggaggacacagacaatggacaatgcaacgagcaaaatcctaattcagcttgccagtctgacagccgggttagctcgtgaaattaaacattatcgcaagcactttggggacattgcccctgttcctgaagttgtttctcaagctgagcaatttcagcttccacttcgtcaactcgaaatagctgttggtcaggaggaaaacacgacggaccagcaaatttccgaagcgctacacaaatttttaaccacaataaataaacttctggagacataaaacacctctgaaaaagaagctgaaagtcggaaaagcgagtcaagcggacaatctgctatgagacaagcgaagcctgcatatatgattgcggtcggctgtctggccctgtcggtattgggatgcgtagcctgcggccagcacgaaaaacggcaaaggatgctggaggaacaagccaagaaagtgcaggctggccaagccgggcaagccgagaagaccggacaggccgaggaaacgatggaggcgacagcaaaggaatcgggagatgaaatcaatgctgatgttggatacataagcctagcctcagattccctcattcaattcaacgagtacaaaatccagaatcccaggatattcatcaatcgcaataccggcctattaaccatcattttcgactgcgagttcaatggaggccgctcgtccttgaccaggatgctggtgcgcctctttgacgcaaacggggagtacatcacccatttcgtcacgaaggaatggtttatggcccccaattgcctatggtttgactacaggccaaacggctgccagtgggaggctcaggtgaactcgttcacgctcattccactcaaacagcattccaatgttttgcaatataggattaacctgcgtgatgcggcatatgtccaaaatgcggagtttggacggtacactgggcctgcaaactgatttcggggaggatttcgtggatgacaagccagaggatgtgccttgcttttccggcggccatgtgtatcattgggctggaattgactccgcgattcttagtttggacgttctgttgcaggtaagtttagcccatggagctgtgtagtgggactcggggcatttcttctgttcatgaccgcttgttatatcatttctcggttcgaggatgggctagagttagacgtagagttcaaaggcatcgggagaattctatgtataatcggttcaatcatttccgggtttaccctgtttctgagccttctcttcttcttgaaaaacggcgattcgggatcatttacgtgggcttttatatccggtgtcgttctcgcctttttcgttttgggtgctaagcgaaatggggcatctcgttaatccgaagccgggagctactcggtttgtttccttatgtcagtcaagtatatcaatgcccaatttagggtgtctatggcgggaaccgaattcagaagttgcgaggctcgacgggaagaaacccctcacctggctcgctactctcgcgaccctcctcggggaagagggtgctgaagaggtttggtcggctaccccgaagcaagcaatgcgagaaaatacaaaaatcgggggaacaaagcgagaatgtctatgaaaacaaaggacaagtacaaaaagtcgctgagtcgtacagtgccaggccaaacgccgacgaccgtccaccggctgcgggctggcaggcccgcccaagccggtgactcatttcacttccgacaaaatcttctggttcggctggtcccgcgatcgacgcttggccctctaccgtggcacggacccgactgacgcggtgttgattgaggatttccgctgatgcgcaagaccatttcgccctaacgaatactggagaaggtgggccgcgctggcatgggcgtggtctagcgggccgagcaatttcgtgcttgcagagggcgaaaccagcccctgcagagcccaagcgcggattctgcccgatagacgccctgctcgtcccgtaccatttcatccggctgatcatggactagcggataaggagaccgctagccatgatgagcaaacgccctaaaaagaagcgggcccgtccaaaacgaatccttcgccttcccgatttggaccacgccaaggtagccgtcctgaatactctgggctcgcccgattctcaacgctcctaccggttcgcaatcgacgatttcatcgcgtggtattgttccgagcccagactggctttaaacaagaccgtcgtcctgcgctacaaactgcaattggaagcccgtcacttggcgtcgtccacaatcaacctgcgactggccgccgtaagaagactggcctatgaggccgccgataccggcctgctgagcccggagttggcggcgggaattcgccgcgtgaagggagcaaagaaactcggggtgcggctgggcaattggctcagttccgatgaggccaaagcgctgctagactccggcgacctccaaacggtccgtggcaaacgcagccgaggcatcctcgcggtctgcctcgggtgcggccttcgccgatcggagttggcgcatcttaccgtcgagcacctgcaaagaagggaggattactgggccattgtcgacctaataggaaagggagggcatattcgcacagtgcccgtgccgaattcggtcaaatctgctctggacttatggatggaggctgccaatatatccagtgggcgagtctttcgcgtccaaaacttgtattgacatgagcacttgaatcccagagtgatttccatctgggctagatccggccagaacgggcaccatttcgacacatttcgcgaaggcgttatcttgtggcctctcaccgccaaacgtaacgaagtgcactcgtgaatggcaaaagcgggcaggaaccataagccacccatcaagcggctacctttgcggcgatcctcctgctggagatagctcgacacttcatggacccctttcgaacgcgagcggccccgtgcccggttcggtgactggatgtccacacaaggtgagccggttccgcaggtcggcaacaatgtgcagtcagtgaagggtgatttcgcgcgggccgcaacctcatttacgtcgctgctgcgaagacggggctaaagcgcggtccttagtcaaattgcttctttgtggggaagtacttaaattatagcgagttataggaaattgtagaacaaaagcagccaattcgatagagggtgatttcgctcagagggcgatctcgcgcagttgtcgccgaaagtggtcggcacttgatcctatacacagtgccgcttcgaaggtcccatgcttgtctgcgcttgatgcaaaatgcagcacgctcccaagaatgccaagtacaacatgtccgtttttaggatcgcaggagagcaagaatctgcactcgggctataacatcccggaagtgcggttatggccgatctcgtgccagtgaagtaatgtttgaagttacgtgtaaacgcacctcccacactctcggctggttggggttcttcagagagatgcctgcttgcgacaacaattccttgcccactcgatgctgtaacgccatctcatgttggaatgggattcgggctgaaaagggttcctcgattcgcagggcttgagaaagtgggaaagggcggcgcggtgacaggcaaagcacccgcctgagagaactagaggatagtcatagacggtcgaaggagttccgccatgggcacacttcaggtccctccgattccggacaaacctaatgtcctttttcctgaaattgcgagcgctgaagacaagttccgcgcttgccttcaatgcggcgtttgcagcgcttcttgccccatgggaaaagccatggactttccaccccgcaaggcggtgaagatgctgatggagggaaggtttaacgaggtagtggaaagcaacactccatggctttgcgtttcttgtcacacctgtgcaacacgctgtcccagccagttgcaggtttccgaccgccttttccccgctctgcgcgccgcggtaatggctggagggaagccgctgccctcggacctgcaaaaagctttgcagaacacttacctctacgggaaccccatgggtgagtctccgcgcaagcgcgccgactgggcgaaaaccgcgggcgtgcgggtcccactcatttcacaactgcgtcggccggtggatgtgctctggatcgtggagtgttccccctcgttcgagccgcgaaaccaggaggtcacgcgaaagctagcgcgcatcctcaacgccctgggcgtggacttcgccattttgggccacgaagagcgctgcatcggcgattgcgaatggctggcgggtgagcacggtctcttcgagatgcacatcgaacgaaacatcgatatcttcaataagtaccgtttcaaagaaattctcctcaccgacccgcatgcttaccgtgcgttgcgcaatatctatccaagcatgggcggggtctttgaggtgcagcactatacccaattccttgcggagcgactggaccaactcaaaccgcttctcaaacaaaaactgaacgcgaccgtcacgtatcacgactcgtgctgcctgggccggaaaatgtctgaatacgacggaccgcgtgcgctgctccaggctctgccggggctaaaattggtggaaatgatccagaaccgggaatccagcctctgctgcggcgggggctcggtcacggtttacctcgaccgtttcatccaggaacgggtaaaggaacggttggccgaccagcgcgtggagcaggcggcagccaccaaggctgagattctggcggtggcttgtccctacgagccttcccgttttgaggatgccgtgaagatcaccggtcacgaggggaaactcatggtctgcgacatcatcgaaatgttggccaattccatgggactcgcctgagggagggaaaaaccatgaacattgctgtccttgccaagcaggtgccggacttggtggagggtttggaaatcgacccgaacggcaaggccttggacgtcaattacctccgctacatcctcagtgagtccgacgatcatgcgctggaacaagcgctcctgctcaaagagaaagtgggcgggcgcgtcgaagtttttgccctcaatcagggcgaagccagggattctttggtcgcggctatcgccaagggcgccgaccgcgccgttctggtggacgcggggctcgattcaccccttaacaaccacgcggcggcgcagatcttcgcggggttgcttggtggcgggctgtttgacttgatcctgaccggcgtgcgcgccatcgacgacttggatggctcactgggtggcctcgtggctggctctctcgaccttccttatgctgccctgattcggaaagcagaagccgacggagatgggaaaacggtgatagtgcagaaggagtacccaggcggctatgccgcagagctggtagtgcgcctgccggccgtcctcggcattcaggctgccgaacagccgccgcgctatgttccgatcagccgtctgcgccaagtgatgaagacggcaacggtcgaggaagtttccgtcgcaccaccgagtcagcagccccttgacgtcacacgcctgttcaagcccgaggagggcgcaggagcggtgatgatttcgggtgatgcccaggaagccgcccgacaaatcacgagccttctttccgaacgtcgtctactgaggtgaagtgtgcgcaacgacatcctagttttcgccgagcatttccgggggacactcaacgatataacgtacgaactcttgggtaaaggccgcgaactcgcccagagcttggacagcagactgttagttactgtcttcggccatgaagtgggtgggttggtcgaaaagttaggggtcgccgaccaagtctgcctggtggaccgaccggagctgaaggagttcgcttccgactctaccaaagcagttctggaggccatactcgaagatgttcaaccgcgcttggtgctgctaggcagtacgtcgattggcctggagttgctgggtcttatttcggcgcgcaaaggtgtcccatgccttgacaactgcactcggcttgagtccagagacgggcagttggtcgcaacctgccagatctatggtggcaaagtctttgtggaggtggcgctgcctgaggccacaaccctggtcgccgtggttccaggatcgtttcccaaggagcctggagaagttgctaccaagcctgaacttcgcaacatcgctttgcccgccatgctccccgaagcgcggacgacgtttcggaaattgttggagccgcccccaggagatgtggatattaccaaagcacccattctcgtgggcgtaggacggggcatccagaacgccgacaatatgtctttggcggaggagctcgcggcagccttgagcggagtagtttgcgcctcgcggcccgtaatcgaccagggctggctgccgctcacccgacaggttgggaagtccggcatgaccgtcaaacctaagctgtacttggcatttgggatcagtggtgcgccggagcatctggaagggatgaaacaatctgagctgattgtggctgtcaacacagacccgaacgcgcccattttcagcgtcgcccactacggcgcggtacttgacgcgctggaactcttgccgttattgacggaagaggtcagcaaccaagccacgaagaaggcaagcacatgatacctacaacggcaaaactagggttcatacccggctgggccgtcctctggttgtttttcctggcggccgtgggaatctttgcgcggcgtgttgtcttccttattcgtttgcttaagttgggccgagcagagaatcgctttgacaatatcccggaacggttgaagcgagtgcttatttacgtcttcggccagcggcggctgttggatgagcccctggtgggcattccccacgtgctcatattctacgggtttctcgtcttcttgatgtccaccagcggcatgctcttgcaggggctcttcccttttttgcacctgcccggcatggagagcaaccggtacttggctccggtggtggatgtctttgcattgctggtactcgcgggtttggcggtctcctccttccggcgcttcgtccttcgccccgcaggattgcagctaacgtgggacgcgaccctggtgaatatcttgattgcgtcactcatgctcaccttcctactggtcgaggccttccgccggatgtcgtcatcgctagcgggtggggtttgggtccctgtgggcaactggcttgcggggctaatgggaagttcggccgtgctgcgggcaaatgcagcccttttccatagtttgttctggtgggcgcacgttctgattgtgctcttctttctcgcctatcttccttcttccaagcaccttcatctgttggccgctcccttcagcgcgttcttcagccgactcgagccgaccgggcgtctggcggcaccgatggaccagcaagtacgcttgggagccgaacgcctggaggaattcacctggcgccaattgctttcggcctttgcctgtgcggagtgcggacgttgcgagcgtgcctgccccagccgtcaagtcggtgaaccatgttccccacgccagttggttcacaacctgaaggaacagctcttgcgttacggccccgatctgctcggccacgcgcgggtggcagcggatggtggagaaccgaccatgatcgggggcctgatctccgccggggagctctggggttgcaccacctgtctgtcttgctccgagcgctgtcccgttctgaatgagcacatgtccattatggtggatttgcgccggcgtctggtggagcggggagaggttgacaaacacctcgaagaagcgcttcgcaacttggcgcgctacggcaattctttcggccagtccgaacgaaagcgtgccgtgtggacccaggccctggatttcaaacccaaggacgcccgtaaagagccggtggaatggctgtggtacttgggcgaatacgcctgctaccatcctgcgctccagcacatcacgcagtcgttggctcgattgcttcacgctgccggcaccaacttcgggattgtatatgaagcggaacggaactccggaaatgacatacggcgagtgggcgaagagggtttgtttgagctgctgcgggaaaagaacatggcgacctttaagaaagcccagttcaataacctcttcacgaccgacccccacgtctataacacctttaagaatgaatacccggatctcaaccatgggcagcactccgtgtatcactacagcgaactgattcgagacttactccagcacgggcagttgaaagtcactcgcagcttgccttatcgagtgacttatcacgatccctgttaccttggccggtataacggagtgtacgacgcgccgcggacggttctgcgtgcgttgggagtggatttgaaggagatgccgcgttcgcgtcggaatagcctttgctgcggtggaggcgggggtcgcgtctggatggaggagattggcgaggtccatgcccgtccgagtgaaagtcgcgtgcgagaagcagcggcgctggaaggcgttcaattcttggtggtggcttgcccgaaagactatgtgatgttcacggacgctctgaagacaacgggcctcgaggcgcggttggctgttaaggatttgaccgagctcgtggcggaagcggcaagcgtcgtgtcgacaacctgactgcggtgtgggccgagattgggctcgcttcccggtcgtgatccaaggtgagaggacactgtcatgagaggtaatgggaacaatggtgtaagggtaggcgtttacgtttgccactgcgggacgaacatcgccggcaaggtggatataaaagcggcggtcgagagcgcttccaaactgcccggggtcgtgattgcgcgtgactacaaatacatgtgctcggacccagggcaggacctgattggccaggatgcaaaggaattcgggctcaaccgtgttgtggttgcttcttgctcccctcacctgcatgagctgacctttcggaaggctacggccaatgccggccaaaacccctacctgttccacatggtgaacattcgcgagcacgtcgcttgggttaccgatgacccggtgatggcaaccattaaggcccaagcgctgatcagggcggctgtgcaacgcgccatctggcatcagaaactggaacgccggcggtttccggtcaacccgaatgtgctgatcgtcggggggggcattgccggtatccaggcagcgctgacgctggcggacgcggagaagcaggtttaccttgtggagcgcgaaccgtcgataggcgggcacatggcgcaatttgataagacctttcccaccctcgattgcgccgcctgtatcttgacgcccaagatgacggcggtgaaacagcaccccaatatccacctcatgacctactcagaggtcagcgccgtgagcgggtttgtgggaaatttcaagg

SEQ ID NO: 983 - DNA, 125690 bp, Artificial Sequence
  Synthetic Oligonucleotide
  misc_feature (1)..(96749): n is a, c, g, or t
nnnnnnnnnnnnnnnnnnnnnnnnnnnnnnnnnnnnnnnnnnnnnnnnnnnnnnnnnnnnnnnnnnnnnnnnnnnnnnnnnnnnnnnnnnnnnnnnnnnnnnnnnnnnnnnnnnnnnnnnnnnnnnnnnnnnnnnnnnnnnnnnnnnnnnnnnnnnnnnnnnnnnnnnnnnnnnnnnnnnnnnnnnnnnnnnnnnnnnnnnnnnnnnnnnnnnnnnnnnnnnnnnnnnnnnnnnnnnnnnnnnnnnnnnnnnnnnnnnnnnnnnnnnnnnnnnnnnnnnnnnnnnnnnnnnnnnnnnnnnnnnnnnnnnnnnnnnnnnnnnnnnnnnnnnnnnnnnnnnnnnnnnnnnnnnnnnnnnnnnnnnnnnnnnnnnnnnnnnnnnnnnnnnnnnnnnnnnnnnnnnnnnnnnnnnnnnnnnnnnnnnnnnnnnnnnnnnnnnnnnnnnnnnnnnnnnnnnnnnnnnnnnnnnnnnnnnnnnnnnnnnnnnnnnnnnnnnnnnnnnnnnnnnnnnnnnnnnnnnnnnnnnnnnnnnnnnnnnnnnnnnnnnnnnnnnnnnnnnnnnnnnnnnnnnnnnnnnnnnnnnnnnnnnnnnnnnnnnnnnnnnnnnnnnnnnnnnnnnnnnnnnnnnnnnnnnnnnnnnnnnnnnnnnnnnnnnnnnnnnnnnnnnnnnnnnnnnnnnnnnnnnnnnnnnnnnnnnnnnnnnnnnnnnnnnnnnnnnnnnnnnnnnnnnnnnnnnnnnnnnnnnnnnnnnnnnnnnnnnnnnnnnnnnnnnnnnnnnnnnnnnnnnnnnnnnnnnnnnnnnnnnnnnnnnnnnnnnnnnnnnnnnnnnnnnnnnnnnnnnnnnnnnnnnnnnnnnnnnnnnnnnnnnnnnnnnnnnnnnnnnnnnnnnnnnnnnnnnnnnnnnnnnnnnnnnnnnnnnnnnnnnnnnnnnnnnnnnnnnnnnnnnnnnnnnnnnnnnnnnnnnnnnnnnnnnnnnnnnnnnnnnnnnnnnnnnnnnnnnnnnnnnnnnnnnnnnnnnnnnnnnnnnnnnnnnnnnnnnnnnnnnnnnnnnnnnnnnnnnnnnnnnnnnnnnnnnnnnnnnnnnnnnnnnnnnnnnnnnnnnnnnnnnnnnnnnnnnnnnnnnnnnnnnnnnnnnnnnnnnnnnnnnnnnnnnnnnnnnnnnnnnnnnnnnnnnnnnnnnnnnnnnnnnnnnnnnnnnnnnnnnnnnnnnnnnnnnnnnnnnnnnnnnnnnnnnnnnnnnnnnnnnnnnnnnnnnnnnnnnnnnnnnnnnnnnnnnnnnnnnnnnnnnnnnnnnnnnnnnnnnnnnnnnnnnnnnnnnnnnnnnnnnnnnnnnnnnnnnnnnnnnnnnnnnnnnnnnnnnnnnnnnnnnnnnnnnnnnnnnnnnnnnnnnnnnnnnnnnnnnnnnnnnnnnnnnnnnnnnnnnnnnnnnnnnnnnnnnnnnnnnnnnnnnnnnnnnnnnnnnnnnnnnnnnnnnnnnnnnnnnnnnnnnnnnnnnnnnnnnnnnnnnnnnnnnnnnnnnnnnnnnnnnnnnnnnnnnnnnnnnnnnnnnnnnnnnnnnnnnnnnnnnnnnnnnnnnnnnnnnnnnnnnnnnnnnnnnnnnnnnnnnnnnnnnnnnnnnnnnnnnnnnnnnnnnnnnnnnnnnnnnnnnnnnnnnnnnnnnnnnnnnnnnnnnnnnnnnnnnnnnnnnnnnnnnnnnnnnnnnnnnnnnnnnnnnnnnnnnnnnnnnnnnnnnnnnnnnnnnnnnnnnnnnnnnnnnnnnnnnnnnnnnnnnnnnnnnnnnnnnnnnnnnnnnnnnnnnnnnnnnnnnnnnnnnnnnnnnnnnnnnnnnnnnnnnnnnnnnnnnnnnnnnnnnnnnnnnnnnnnnnnnnnnnnnnnnnnnnnnnnnnnnnnnnnnnnnnnnnnnnnnnnnnnnnnnnnnnnnnnnnnnnnnnnnnnnnnnnnnnnnnnnnnnnnnnnnnnnnnnnnnnnnnnnnnnnnnnnnnnnnnnnnnnnnnnnnnnnnnnnnnnnnnnnnnnnnnnnnnnnnnnnnnnnnnnnnnnnnnnnnnnnnnnnnnnnnnnnnnnnnnnnnnnnnnnnnnnnnnnnnnnnnnnnnnnnnnnnnnnnnnnnnnnnnnnnnnnnnnnnnnnnnnnnnnnnnnnnnnnnnnnnnnnnnnnnnnnnnnnnnnnnnnnnnnnnnnnnnnnnnnnnnnnnnnnnnnnnnnnnnnnnnnnnnnnnnnnnnnnnnnnnnnnnnnnnnnnnnnnnnnnnnnnnnnnnnnnnnnnnnnnnnnnnnnnnnnnnnnnnnnnnnnnnnnnnnnnnnnnnnnnnnnnnnnnnnnnnnnnnnnnnnnnnnnnnnnnnnnnnnnnnnnnnnnnnnnnnnnnnnnnnnnnnnnnnnnnnnnnnnnnnnnnnnnnnnnnnnnnnnnnnnnnnnnnnnnnnnnnnnnnnnnnnnnnnnnnnnnnnnnnnnnnnnnnnnnnnnnnnnnnnnnnnnnnnnnnnnnnnnnnnnnnnnnnnnnnnnnnnnnnnnnnnnnnnnnnnnnnnnnnnnnnnnnnnnnnnnnnnnnnnnnnnnnnnnnnnnnnnnnnnnnnnnnnnnnnnnnnnnnnnnnnnnnnnnnnnnnnnnnnnnnnnnnnnnnnnnnnnnnnnnnnnnnnnnnnnnnnnnnnnnnnnnnnnnnnnnnnnnnnnnnnnnnnnnnnnnnnnnnnnnnnnnnnnnnnnnnnnnnnnnnnnnnnnnnnnnnnnnnnnnnnnnnnnnnnnnnnnnnnnnnnnnnnnnnnnnnnnnnnnnnnnnnnnnnnnnnnnnnnnnnnnnnnnnnnnnnnnnnnnnnnnnnnnnnnnnnnnnnnnnnnnnnnnnnnnnnnnnnnnnnnnnnnnnnnnnnnnnnnnnnnnnnnnnnnnnnnnnnnnnnnnnnnnnnnnnnnnnnnnnnnnnnnnnnnnnnnnnnnnnnnnnnnnnnnnnnnnnnnnnnnnnnnnnnnnnnnnnnnnnnnnnnnnnnnnnnnnnnnnnnnnnnnnnnnnnnnnnnnnnnnnnnnnnnnnnnnnnnnnnnnnnnnnnnnnnnnnnnnnnnnnnnnnnnnnnnnnnnnnnnnnnnnnnnnnnnnnnnnnnnnnnnnnnnnnnnnnnnnnnnnnnnnnnnnnnnnnnnnnnnnnnnnnnnnnnnnnnnnnnnnnnnnnnnnnnnnnnnnnnnnnnnnnnnnnnnnnnnnnnnnnnnnnnnnnnnnnnnnnnnnnnnnnnnnnnnnnnnnnnnnnnnnnnnnnnnnnnnnnnnnnnnnnnnnnnnnnnnnnnnnnnnnnnnnnnnnnnnnnnnnnnnnnnnnnnnnnnnnnnnnnnnnnnnnnnnnnnnnnnnnnnnnnnnnnnnnnnnnnnnnnnnnnnnnnnnnnnnnnnnnnnnnnnnnnnnnnnnnnnnnnnnnnnnnnnnnnnnnnnnnnnnnnnnnnnnnnnnnnnnnnnnnnnnnnnnnnnnnnnnnnnnnnnnnnnnnnnnnnnnnnnnnnnnnnnnnnnnnnnnnnnnnnnnnnnnnnnnnnnnnnnnnnnnnnnnnnnnnnnnnnnnnnnnnnnnnnnnnnnnnnnnnnnnnnnnnnnnnnnnnnnnnnnnnnnnnnnnnnnnnnnnnnnnnnnnnnnnnnnnnnnnnnnnnnnnnnnnnnnnnnnnnnnnnnnnnnnnnnnnnnnnnnnnnnnnnnnnnnnnnnnnnnnnnnnnnnnnnnnnnnnnnnnnnnnnnnnnnnnnnnnnnnnnnnnnnnnnnnnnnnnnnnnnnnnnnnnnnnnnnnnnnnnnnnnnnnnnnnnnnnnnnnnnnnnnnnnnnnnnnnnnnnnnnnnnnnnnnnnnnnnnnnnnnnnnnnnnnnnnnnnnnnnnnnnnnnnnnnnnnnnnnnnnnnnnnnnnnnnnnnnnnnnnnnnnnnnnnnnnnnnnnnnnnnnnnnnnnnnnnnnnnnnnnnnnnnnnnnnnnnnnnnnnnnnnnnnnnnnnnnnnnnnnnnnnnnnnnnnnnnnnnnnnnnnnnnnnnnnnnnnnnnnnnnnnnnnnnnnnnnnnnnnnnnnnnnnnnnnnnnnnnnnnnnnnnnnnnnnnnnnnnnnnnnnnnnnnnnnnnnnnnnnnnnnnnnnnnnnnnnnnnnnnnnnnnnnnnnnnnnnnnnnnnnnnnnnnnnnnnnnnnnnnnnnnnnnnnnnnnnnnnnnnnnnnnnnnnnnnnnnnnnnnnnnnnnnnnnnnnnnnnnnnnnnnnnnnnnnnnnnnnnnnnnnnnnnnnnnnnnnnnnnnnnnnnnnnnnnnnnnnnnnnnnnnnnnnnnnnnnnnnnnnnnnnnnnnnnnnnnnnnnnnnnnnnnnnnnnnnnnnnnnnnnnnnnnnnnnnnnnnnnnnnnnnnnnnnnnnnnnnnnnnnnnnnnnnnnnnnnnnnnnnnnnnnnnnnnnnnnnnnnnnnnnnnnnnnnnnnnnnnnnnnnnnnnnnnnnnnnnnnnnnnnnnnnnnnnnnnnnnnnnnnnnnnnnnnnnnnnnnnnnnnnnnnnnnnnnnnnnnnnnnnnnnnnnnnnnnnnnnnnnnnnnnnnnnnnnnnnnnnnnnnnnnnnnnnnnnnnnnnnnnnnnnnnnnnnnnnnnnnnnnnnnnnnnnnnnnnnnnnnnnnnnnnnnnnnnnnnnnnnnnnnnnnnnnnnnnnnnnnnnnnnnnnnnnnnnnnnnnnnnnnnnnnnnnnnnnnnnnnnnnnnnnnnnnnnnnnnnnnnnnnnnnnnnnnnnnnnnnnnnnnnnnnnnnnnnnnnnnnnnnnnnnnnnnnnnnnnnnnnnnnnnnnnnnnnnnnnnnnnnnnnnnnnnnnnnnnnnnnnnnnnnnnnnnnnnnnnnnnnnnnnnnnnnnnnnnnnnnnnnnnnnnnnnnnnnnnnnnnnnnnnnnnnnnnnnnnnnnnnnnnnnnnnnnnnnnnnnnnnnnnnnnnnnnnnnnnnnnnnnnnnnnnnnnnnnnnnnnnnnnnnnnnnnnnnnnnnnnnnnnnnnnnnnnnnnnnnnnnnnnnnnnnnnnnnnnnnnnnnnnnnnnnnnnnnnnnnnnnnnnnnnnnnnnnnnnnnnnnnnnnnnnnnnnnnnnnnnnnnnnnnnnnnnnnnnnnnnnnnnnnnnnnnnnnnnnnnnnnnnnnnnnnnnnnnnnnnnnnnnnnnnnnnnnnnnnnnnnnnnnnnnnnnnnnnnnnnnnnnnnnnnnnnnnnnnnnnnnnnnnnnnnnnnnnnnnnnnnnnnnnnnnnnnnnnnnnnnnnnnnnnnnnnnnnnnnnnnnnnnnnnnnnnnnnnnnnnnnnnnnnnnnnnnnnnnnnnnnnnnnnnnnnnnnnnnnnnnnnnnnnnnnnnnnnnnnnnnnnnnnnnnnnnnnnnnnnnnnnnnnnnnnnnnnnnnnnnnnnnnnnnnnnnnnnnnnnnnnnnnnnnnnnnnnnnnnnnnnnnnnnnnnnnnnnnnnnnnnnnnnnnnnnnnnnnnnnnnnnnnnnnnnnnnnnnnnnnnnnnnnnnnnnnnnnnnnnnnnnnnnnnnnnnnnnnnnnnnnnnnnnnnnnnnnnnnnnnnnnnnnnnnnnnnnnnnnnnnnnnnnnnnnnnnnnnnnnnnnnnnnnnnnnnnnnnnnnnnnnnnnnnnnnnnnnnnnnnnnnnnnnnnnnnnnnnnnnnnnnnnnnnnnnnnnnnnnnnnnnnnnnnnnnnnnnnnnnnnnnnnnnnnnnnnnnnnnnnnnnnnnnnnnnnnnnnnnnnnnnnnnnnnnnnnnnnnnnnnnnnnnnnnnnnnnnnnnnnnnnnnnnnnnnnnnnnnnnnnnnnnnnnnnnnnnnnnnnnnnnnnnnnnnnnnnnnnnnnnnnnnnnnnnnnnnnnnnnnnnnnnnnnnnnnnnnnnnnnnnnnnnnnnnnnnnnnnnnnnnnnnnnnnnnnnnnnnnnnnnnnnnnnnnnnnnnnnnnnnnnnnnnnnnnnnnnnnnnnnnnnnnnnnnnnnnnnnnnnnnnnnnnnnnnnnnnnnnnnnnnnnnnnnnnnnnnnnnnnnnnnnnnnnnnnnnnnnnnnnnnnnnnnnnnnnnnnnnnnnnnnnnnnnnnnnnnnnnnnnnnnnnnnnnnnnnnnnnnnnnnnnnnnnnnnnnnnnnnnnnnnnnnnnnnnnnnnnnnnnnnnnnnnnnnnnnnnnnnnnnnnnnnnnnnnnnnnnnnnnnnnnnnnnnnnnnnnnnnnnnnnnnnnnnnnnnnnnnnnnnnnnnnnnnnnnnnnnnnnnnnnnnnnnnnnnnnnnnnnnnnnnnnnnnnnnnnnnnnnnnnnnnnnnnnnnnnnnnnnnnnnnnnnnnnnnnnnnnnnnnnnnnnnnnnnnnnnnnnnnnnnnnnnnnnnnnnnnnnnnnnnnnnnnnnnnnnnnnnnnnnnnnnnnnnnnnnnnnnnnnnnnnnnnnnnnnnnnnnnnnnnnnnnnnnnnnnnnnnnnnnnnnnnnnnnnnnnnnnnnnnnnnnnnnnnnnnnnnnnnnnnnnnnnnnnnnnnnnnnnnnnnnnnnnnnnnnnnnnnnnnnnnnnnnnnnnnnnnnnnnnnnnnnnnnnnnnnnnnnnnnnnnnnnnnnnnnnnnnnnnnnnnnnnnnnnnnnnnnnnnnnnnnnnnnnnnnnnnnnnnnnnnnnnnnnnnnnnnnnnnnnnnnnnnnnnnnnnnnnnnnnnnnnnnnnnnnnnnnnnnnnnnnnnnnnnnnnnnnnnnnnnnnnnnnnnnnnnnnnnnnnnnnnnnnnnnnnnnnnnnnnnnnnnnnnnnnnnnnnnnnnnnnnnnnnnnnnnnnnnnnnnnnnnnnnnnnnnnnnnnnnnnnnnnnnnnnnnnnnnnnnnnnnnnnnnnnnnnnnnnnnnnnnnnnnnnnnnnnnnnnnnnnnnnnnnnnnnnnnnnnnnnnnnnnnnnnnnnnnnnnnnnnnnnnnnnnnnnnnnnnnnnnnnnnnnnnnnnnnnnnnnnnnnnnnnnnnnnnnnnnnnnnnnnnnnnnnnnnnnnnnnnnnnnnnnnnnnnnnnnnnnnnnnnnnnnnnnnnnnnnnnnnnnnnnnnnnnnnnnnnnnnnnnnnnnnnnnnnnnnnnnnnnnnnnnnnnnnnnnnnnnnnnnnnnnnnnnnnnnnnnnnnnnnnnnnnnnnnnnnnnnnnnnnnnnnnnnnnnnnnnnnnnnnnnnnnnnnnnnnnnnnnnnnnnnnnnnnnnnnnnnnnnnnnnnnnnnnnnnnnnnnnnnnnnnnnnnnnnnnnnnnnnnnnnnnnnnnnnnnnnnnnnnnnnnnnnnnnnnnnnnnnnnnnnnnnnnnnnnnnnnnnnnnnnnnnnnnnnnnnnnnnnnnnnnnnnnnnnnnnnnnnnnnnnnnnnnnnnnnnnnnnnnnnnnnnnnnnnnnnnnnnnnnnnnnnnnnnnnnnnnnnnnnnnnnnnnnnnnnnnnnnnnnnnnnnnnnnnnnnnnnnnnnnnnnnnnnnnnnnnnnnnnnnnnnnnnnnnnnnnnnnnnnnnnnnnnnnnnnnnnnnnnnnnnnnnnnnnnnnnnnnnnnnnnnnnnnnnnnnnnnnnnnnnnnnnnnnnnnnnnnnnnnnnnnnnnnnnnnnnnnnnnnnnnnnnnnnnnnnnnnnnnnnnnnnnnnnnnnnnnnnnnnnnnnnnnnnnnnnnnnnnnnnnnnnnnnnnnnnnnnnnnnnnnnnnnnnnnnnnnnnnnnnnnnnnnnnnnnnnnnnnnnnnnnnnnnnnnnnnnnnnnnnnnnnnnnnnnnnnnnnnnnnnnnnnnnnnnnnnnnnnnnnnnnnnnnnnnnnnnnnnnnnnnnnnnnnnnnnnnnnnnnnnnnnnnnnnnnnnnnnnnnnnnnnnnnnnnnnnnnnnnnnnnnnnnnnnnnnnnnnnnnnnnnnnnnnnnnnnnnnnnnnnnnnnnnnnnnnnnnnnnnnnnnnnnnnnnnnnnnnnnnnnnnnnnnnnnnnnnnnnnnnnnnnnnnnnnnnnnnnnnnnnnnnnnnnnnnnnnnnnnnnnnnnnnnnnnnnnnnnnnnnnnnnnnnnnnnnnnnnnnnnnnnnnnnnnnnnnnnnnnnnnnnnnnnnnnnnnnnnnnnnnnnnnnnnnnnnnnnnnnnnnnnnnnnnnnnnnnnnnnnnnnnnnnnnnnnnnnnnnnnnnnnnnnnnnnnnnnnnnnnnnnnnnnnnnnnnnnnnnnnnnnnnnnnnnnnnnnnnnnnnnnnnnnnnnnnnnnnnnnnnnnnnnnnnnnnnnnnnnnnnnnnnnnnnnnnnnnnnnnnnnnnnnnnnnnnnnnnnnnnnnnnnnnnnnnnnnnnnnnnnnnnnnnnnnnnnnnnnnnnnnnnnnnnnnnnnnnnnnnnnnnnnnnnnnnnnnnnnnnnnnnnnnnnnnnnnnnnnnnnnnnnnnnnnnnnnnnnnnnnnnnnnnnnnnnnnnnnnnnnnnnnnnnnnnnnnnnnnnnnnnnnnnnnnnnnnnnnnnnnnnnnnnnnnnnnnnnnnnnnnnnnnnnnnnnnnnnnnnnnnnnnnnnnnnnnnnnnnnnnnnnnnnnnnnnnnnnnnnnnnnnnnnnnnnnnnnnnnnnnnnnnnnnnnnnnnnnnnnnnnnnnnnnnnnnnnnnnnnnnnnnnnnnnnnnnnnnnnnnnnnnnnnnnnnnnnnnnnnnnnnnnnnnnnnnnnnnnnnnnnnnnnnnnnnnnnnnnnnnnnnnnnnnnnnnnnnnnnnnnnnnnnnnnnnnnnnnnnnnnnnnnnnnnnnnnnnnnnnnnnnnnnnnnnnnnnnnnnnnnnnnnnnnnnnnnnnnnnnnnnnnnnnnnnnnnnnnnnnnnnnnnnnnnnnnnnnnnnnnnnnnnnnnnnnnnnnnnnnnnnnnnnnnnnnnnnnnnnnnnnnnnnnnnnnnnnnnnnnnnnnnnnnnnnnnnnnnnnnnnnnnnnnnnnnnnnnnnnnnnnnnnnnnnnnnnnnnnnnnnnnnnnnnnnnnnnnnnnnnnnnnnnnnnnnnnnnnnnnnnnnnnnnnnnnnnnnnnnnnnnnnnnnnnnnnnnnnnnnnnnnnnnnnnnnnnnnnnnnnnnnnnnnnnnnnnnnnnnnnnnnnnnnnnnnnnnnnnnnnnnnnnnnnnnnnnnnnnnnnnnnnnnnnnnnnnnnnnnnnnnnnnnnnnnnnnnnnnnnnnnnnnnnnnnnnnnnnnnnnnnnnnnnnnnnnnnnnnnnnnnnnnnnnnnnnnnnnnnnnnnnnnnnnnnnnnnnnnnnnnnnnnnnnnnnnnnnnnnnnnnnnnnnnnnnnnnnnnnnnnnnnnnnnnnnnnnnnnnnnnnnnnnnnnnnnnnnnnnnnnnnnnnnnnnnnnnnnnnnnnnnnnnnnnnnnnnnnnnnnnnnnnnnnnnnnnnnnnnnnnnnnnnnnnnnnnnnnnnnnnnnnnnnnnnnnnnnnnnnnnnnnnnnnnnnnnnnnnnnnnnnnnnnnnnnnnnnnnnnnnnnnnnnnnnnnnnnnnnnnnnnnnnnnnnnnnnnnnnnnnnnnnnnnnnnnnnnnnnnnnnnnnnnnnnnnnnnnnnnnnnnnnnnnnnnnnnnnnnnnnnnnnnnnnnnnnnnnnnnnnnnnnnnnnnnnnnnnnnnnnnnnnnnnnnnnnnnnnnnnnnnnnnnnnnnnnnnnnnnnnnnnnnnnnnnnnnnnnnnnnnnnnnnnnnnnnnnnnnnnnnnnnnnnnnnnnnnnnnnnnnnnnnnnnnnnnnnnnnnnnnnnnnnnnnnnnnnnnnnnnnnnnnnnnnnnnnnnnnnnnnnnnnnnnnnnnnnnnnnnnnnnnnnnnnnnnnnnnnnnnnnnnnnnnnnnnnnnnnnnnnnnnnnnnnnnnnnnnnnnnnnnnnnnnnnnnnnnnnnnnnnnnnnnnnnnnnnnnnnnnnnnnnnnnnnnnnnnnnnnnnnnnnnnnnnnnnnnnnnnnnnnnnnnnnnnnnnnnnnnnnnnnnnnnnnnnnnnnnnnnnnnnnnnnnnnnnnnnnnnnnnnnnnnnnnnnnnnnnnnnnnnnnnnnnnnnnnnnnnnnnnnnnnnnnnnnnnnnnnnnnnnnnnnnnnnnnnnnnnnnnnnnnnnnnnnnnnnnnnnnnnnnnnnnnnnnnnnnnnnnnnnnnnnnnnnnnnnnnnnnnnnnnnnnnnnnnnnnnnnnnnnnnnnnnnnnnnnnnnnnnnnnnnnnnnnnnnnnnnnnnnnnnnnnnnnnnnnnnnnnnnnnnnnnnnnnnnnnnnnnnnnnnnnnnnnnnnnnnnnnnnnnnnnnnnnnnnnnnnnnnnnnnnnnnnnnnnnnnnnnnnnnnnnnnnnnnnnnnnnnnnnnnnnnnnnnnnnnnnnnnnnnnnnnnnnnnnnnnnnnnnnnnnnnnnnnnnnnnnnnnnnnnnnnnnnnnnnnnnnnnnnnnnnnnnnnnnnnnnnnnnnnnnnnnnnnnnnnnnnnnnnnnnnnnnnnnnnnnnnnnnnnnnnnnnnnnnnnnnnnnnnnnnnnnnnnnnnnnnnnnnnnnnnnnnnnnnnnnnnnnnnnnnnnnnnnnnnnnnnnnnnnnnnnnnnnnnnnnnnnnnnnnnnnnnnnnnnnnnnnnnnnnnnnnnnnnnnnnnnnnnnnnnnnnnnnnnnnnnnnnnnnnnnnnnnnnnnnnnnnnnnnnnnnnnnnnnnnnnnnnnnnnnnnnnnnnnnnnnnnnnnnnnnnnnnnnnnnnnnnnnnnnnnnnnnnnnnnnnnnnnnnnnnnnnnnnnnnnnnnnnnnnnnnnnnnnnnnnnnnnnnnnnnnnnnnnnnnnnnnnnnnnnnnnnnnnnnnnnnnnnnnnnnnnnnnnnnnnnnnnnnnnnnnnnnnnnnnnnnnnnnnnnnnnnnnnnnnnnnnnnnnnnnnnnnnnnnnnnnnnnnnnnnnnnnnnnnnnnnnnnnnnnnnnnnnnnnnnnnnnnnnnnnnnnnnnnnnnnnnnnnnnnnnnnnnnnnnnnnnnnnnnnnnnnnnnnnnnnnnnnnnnnnnnnnnnnnnnnnnnnnnnnnnnnnnnnnnnnnnnnnnnnnnnnnnnnnnnnnnnnnnnnnnnnnnnnnnnnnnnnnnnnnnnnnnnnnnnnnnnnnnnnnnnnnnnnnnnnnnnnnnnnnnnnnnnnnnnnnnnnnnnnnnnnnnnnnnnnnnnnnnnnnnnnnnnnnnnnnnnnnnnnnnnnnnnnnnnnnnnnnnnnnnnnnnnnnnnnnnnnnnnnnnnnnnnnnnnnnnnnnnnnnnnnnnnnnnnnnnnnnnnnnnnnnnnnnnnnnnnnnnnnnnnnnnnnnnnnnnnnnnnnnnnnnnnnnnnnnnnnnnnnnnnnnnnnnnnnnnnnnnnnnnnnnnnnnnnnnnnnnnnnnnnnnnnnnnnnnnnnnnnnnnnnnnnnnnnnnnnnnnnnnnnnnnnnnnnnnnnnnnnnnnnnnnnnnnnnnnnnnnnnnnnnnnnnnnnnnnnnnnnnnnnnnnnnnnnnnnnnnnnnnnnnnnnnnnnnnnnnnnnnnnnnnnnnnnnnnnnnnnnnnnnnnnnnnnnnnnnnnnnnnnnnnnnnnnnnnnnnnnnnnnnnnnnnnnnnnnnnnnnnnnnnnnnnnnnnnnnnnnnnnnnnnnnnnnnnnnnnnnnnnnnnnnnnnnnnnnnnnnnnnnnnnnnnnnnnnnnnnnnnnnnnnnnnnnnnnnnnnnnnnnnnnnnnnnnnnnnnnnnnnnnnnnnnnnnnnnnnnnnnnnnnnnnnnnnnnnnnnnnnnnnnnnnnnnnnnnnnnnnnnnnnnnnnnnnnnnnnnnnnnnnnnnnnnnnnnnnnnnnnnnnnnnnnnnnnnnnnnnnnnnnnnnnnnnnnnnnnnnnnnnnnnnnnnnnnnnnnnnnnnnnnnnnnnnnnnnnnnnnnnnnnnnnnnnnnnnnnnnnnnnnnnnnnnnnnnnnnnnnnnnnnnnnnnnnnnnnnnnnnnnnnnnnnnnnnnnnnnnnnnnnnnnnnnnnnnnnnnnnnnnnnnnnnnnnnnnnnnnnnnnnnnnnnnnnnnnnnnnnnnnnnnnnnnnnnnnnnnnnnnnnnnnnnnnnnnnnnnnnnnnnnnnnnnnnnnnnnnnnnnnnnnnnnnnnnnnnnnnnnnnnnnnnnnnnnnnnnnnnnnnnnnnnnnnnnnnnnnnnnnnnnnnnnnnnnnnnnnnnnnnnnnnnnnnnnnnnnnnnnnnnnnnnnnnnnnnnnnnnnnnnnnnnnnnnnnnnnnnnnnnnnnnnnnnnnnnnnnnnnnnnnnnnnnnnnnnnnnnnnnnnnnnnnnnnnnnnnnnnnnnnnnnnnnnnnnnnnnnnnnnnnnnnnnnnnnnnnnnnnnnnnnnnnnnnnnnnnnnnnnnnnnnnnnnnnnnnnnnnnnnnnnnnnnnnnnnnnnnnnnnnnnnnnnnnnnnnnnnnnnnnnnnnnnnnnnnnnnnnnnnnnnnnnnnnnnnnnnnnnnnnnnnnnnnnnnnnnnnnnnnnnnnnnnnnnnnnnnnnnnnnnnnnnnnnnnnnnnnnnnnnnnnnnnnnnnnnnnnnnnnnnnnnnnnnnnnnnnnnnnnnnnnnnnnnnnnnnnnnnnnnnnnnnnnnnnnnnnnnnnnnnnnnnnnnnnnnnnnnnnnnnnnnnnnnnnnnnnnnnnnnnnnnnnnnnnnnnnnnnnnnnnnnnnnnnnnnnnnnnnnnnnnnnnnnnnnnnnnnnnnnnnnnnnnnnnnnnnnnnnnnnnnnnnnnnnnnnnnnnnnnnnnnnnnnnnnnnnnnnnnnnnnnnnnnnnnnnnnnnnnnnnnnnnnnnnnnnnnnnnnnnnnnnnnnnnnnnnnnnnnnnnnnnnnnnnnnnnnnnnnnnnnnnnnnnnnnnnnnnnnnnnnnnnnnnnnnnnnnnnnnnnnnnnnnnnnnnnnnnnnnnnnnnnnnnnnnnnnnnnnnnnnnnnnnnnnnnnnnnnnnnnnnnnnnnnnnnnnnnnnnnnnnnnnnnnnnnnnnnnnnnnnnnnnnnnnnnnnnnnnnnnnnnnnnnnnnnnnnnnnnnnnnnnnnnnnnnnnnnnnnnnnnnnnnnnnnnnnnnnnnnnnnnnnnnnnnnnnnnnnnnnnnnnnnnnnnnnnnnnnnnnnnnnnnnnnnnnnnnnnnnnnnnnnnnnnnnnnnnnnnnnnnnnnnnnnnnnnnnnnnnnnnnnnnnnnnnnnnnnnnnnnnnnnnnnnnnnnnnnnnnnnnnnnnnnnnnnnnnnnnnnnnnnnnnnnnnnnnnnnnnnnnnnnnnnnnnnnnnnnnnnnnnnnnnnnnnnnnnnnnnnnnnnnnnnnnnnnnnnnnnnnnnnnnnnnnnnnnnnnnnnnnnnnnnnnnnnnnnnnnnnnnnnnnnnnnnnnnnnnnnnnnnnnnnnnnnnnnnnnnnnnnnnnnnnnnnnnnnnnnnnnnnnnnnnnnnnnnnnnnnnnnnnnnnnnnnnnnnnnnnnnnnnnnnnnnnnnnnnnnnnnnnnnnnnnnnnnnnnnnnnnnnnnnnnnnnnnnnnnnnnnnnnnnnnnnnnnnnnnnnnnnnnnnnnnnnnnnnnnnnnnnnnnnnnnnnnnnnnnnnnnnnnnnnnnnnnnnnnnnnnnnnnnnnnnnnnnnnnnnnnnnnnnnnnnnnnnnnnnnnnnnnnnnnnnnnnnnnnnnnnnnnnnnnnnnnnnnnnnnnnnnnnnnnnnnnnnnnnnnnnnnnnnnnnnnnnnnnnnnnnnnnnnnnnnnnnnnnnnnnnnnnnnnnnnnnnnnnnnnnnnnnnnnnnnnnnnnnnnnnnnnnnnnnnnnnnnnnnnnnnnnnnnnnnnnnnnnnnnnnnnnnnnnnnnnnnnnnnnnnnnnnnnnnnnnnnnnnnnnnnnnnnnnnnnnnnnnnnnnnnnnnnnnnnnnnnnnnnnnnnnnnnnnnnnnnnnnnnnnnnnnnnnnnnnnnnnnnnnnnnnnnnnnnnnnnnnnnnnnnnnnnnnnnnnnnnnnnnnnnnnnnnnnnnnnnnnnnnnnnnnnnnnnnnnnnnnnnnnnnnnnnnnnnnnnnnnnnnnnnnnnnnnnnnnnnnnnnnnnnnnnnnnnnnnnnnnnnnnnnnnnnnnnnnnnnnnnnnnnnnnnnnnnnnnnnnnnnnnnnnnnnnnnnnnnnnnnnnnnnnnnnnnnnnnnnnnnnnnnnnnnnnnnnnnnnnnnnnnnnnnnnnnnnnnnnnnnnnnnnnnnnnnnnnnnnnnnnnnnnnnnnnnnnnnnnnnnnnnnnnnnnnnnnnnnnnnnnnnnnnnnnnnnnnnnnnnnnnnnnnnnnnnnnnnnnnnnnnnnnnnnnnnnnnnnnnnnnnnnnnnnnnnnnnnnnnnnnnnnnnnnnnnnnnnnnnnnnnnnnnnnnnnnnnnnnnnnnnnnnnnnnnnnnnnnnnnnnnnnnnnnnnnnnnnnnnnnnnnnnnnnnnnnnnnnnnnnnnnnnnnnnnnnnnnnnnnnnnnnnnnnnnnnnnnnnnnnnnnnnnnnnnnnnnnnnnnnnnnnnnnnnnnnnnnnnnnnnnnnnnnnnnnnnnnnnnnnnnnnnnnnnnnnnnnnnnnnnnnnnnnnnnnnnnnnnnnnnnnnnnnnnnnnnnnnnnnnnnnnnnnnnnnnnnnnnnnnnnnnnnnnnnnnnnnnnnnnnnnnnnnnnnnnnnnnnnnnnnnnnnnnnnnnnnnnnnnnnnnnnnnnnnnnnnnnnnnnnnnnnnnnnnnnnnnnnnnnnnnnnnnnnnnnnnnnnnnnnnnnnnnnnnnnnnnnnnnnnnnnnnnnnnnnnnnnnnnnnnnnnnnnnnnnnnnnnnnnnnnnnnnnnnnnnnnnnnnnnnnnnnnnnnnnnnnnnnnnnnnnnnnnnnnnnnnnnnnnnnnnnnnnnnnnnnnnnnnnnnnnnnnnnnnnnnnnnnnnnnnnnnnnnnnnnnnnnnnnnnnnnnnnnnnnnnnnnnnnnnnnnnnnnnnnnnnnnnnnnnnnnnnnnnnnnnnnnnnnnnnnnnnnnnnnnnnnnnnnnnnnnnnnnnnnnnnnnnnnnnnnnnnnnnnnnnnnnnnnnnnnnnnnnnnnnnnnnnnnnnnnnnnnnnnnnnnnnnnnnnnnnnnnnnnnnnnnnnnnnnnnnnnnnnnnnnnnnnnnnnnnnnnnnnnnnnnnnnnnnnnnnnnnnnnnnnnnnnnnnnnnnnnnnnnnnnnnnnnnnnnnnnnnnnnnnnnnnnnnnnnnnnnnnnnnnnnnnnnnnnnnnnnnnnnnnnnnnnnnnnnnnnnnnnnnnnnnnnnnnnnnnnnnnnnnnnnnnnnnnnnnnnnnnnnnnnnnnnnnnnnnnnnnnnnnnnnnnnnnnnnnnnnnnnnnnnnnnnnnnnnnnnnnnnnnnnnnnnnnnnnnnnnnnnnnnnnnnnnnnnnnnnnnnnnnnnnnnnnnnnnnnnnnnnnnnnnnnnnnnnnnnnnnnnnnnnnnnnnnnnnnnnnnnnnnnnnnnnnnnnnnnnnnnnnnnnnnnnnnnnnnnnnnnnnnnnnnnnnnnnnnnnnnnnnnnnnnnnnnnnnnnnnnnnnnnnnnnnnnnnnnnnnnnnnnnnnnnnnnnnnnnnnnnnnnnnnnnnnnnnnnnnnnnnnnnnnnnnnnnnnnnnnnnnnnnnnnnnnnnnnnnnnnnnnnnnnnnnnnnnnnnnnnnnnnnnnnnnnnnnnnnnnnnnnnnnnnnnnnnnnnnnnnnnnnnnnnnnnnnnnnnnnnnnnnnnnnnnnnnnnnnnnnnnnnnnnnnnnnnnnnnnnnnnnnnnnnnnnnnnnnnnnnnnnnnnnnnnnnnnnnnnnnnnnnnnnnnnnnnnnnnnnnnnnnnnnnnnnnnnnnnnnnnnnnnnnnnnnnnnnnnnnnnnnnnnnnnnnnnnnnnnnnnnnnnnnnnnnnnnnnnnnnnnnnnnnnnnnnnnnnnnnnnnnnnnnnnnnnnnnnnnnnnnnnnnnnnnnnnnnnnnnnnnnnnnnnnnnnnnnnnnnnnnnnnnnnnnnnnnnnnnnnnnnnnnnnnnnnnnnnnnnnnnnnnnnnnnnnnnnnnnnnnnnnnnnnnnnnnnnnnnnnnnnnnnnnnnnnnnnnnnnnnnnnnnnnnnnnnnnnnnnnnnnnnnnnnnnnnnnnnnnnnnnnnnnnnnnnnnnnnnnnnnnnnnnnnnnnnnnnnnnnnnnnnnnnnnnnnnnnnnnnnnnnnnnnnnnnnnnnnnnnnnnnnnnnnnnnnnnnnnnnnnnnnnnnnnnnnnnnnnnnnnnnnnnnnnnnnnnnnnnnnnnnnnnnnnnnnnnnnnnnnnnnnnnnnnnnnnnnnnnnnnnnnnnnnnnnnnnnnnnnnnnnnnnnnnnnnnnnnnnnnnnnnnnnnnnnnnnnnnnnnnnnnnnnnnnnnnnnnnnnnnnnnnnnnnnnnnnnnnnnnnnnnnnnnnnnnnnnnnnnnnnnnnnnnnnnnnnnnnnnnnnnnnnnnnnnnnnnnnnnnnnnnnnnnnnnnnnnnnnnnnnnnnnnnnnnnnnnnnnnnnnnnnnnnnnnnnnnnnnnnnnnnnnnnnnnnnnnnnnnnnnnnnnnnnnnnnnnnnnnnnnnnnnnnnnnnnnnnnnnnnnnnnnnnnnnnnnnnnnnnnnnnnnnnnnnnnnnnnnnnnnnnnnnnnnnnnnnnnnnnnnnnnnnnnnnnnnnnnnnnnnnnnnnnnnnnnnnnnnnnnnnnnnnnnnnnnnnnnnnnnnnnnnnnnnnnnnnnnnnnnnnnnnnnnnnnnnnnnnnnnnnnnnnnnnnnnnnnnnnnnnnnnnnnnnnnnnnnnnnnnnnnnnnnnnnnnnnnnnnnnnnnnnnnnnnnnnnnnnnnnnnnnnnnnnnnnnnnnnnnnnnnnnnnnnnnnnnnnnnnnnnnnnnnnnnnnnnnnnnnnnnnnnnnnnnnnnnnnnnnnnnnnnnnnnnnnnnnnnnnnnnnnnnnnnnnnnnnnnnnnnnnnnnnnnnnnnnnnnnnnnnnnnnnnnnnnnnnnnnnnnnnnnnnnnnnnnnnnnnnnnnnnnnnnnnnnnnnnnnnnnnnnnnnnnnnnnnnnnnnnnnnnnnnnnnnnnnnnnnnnnnnnnnnnnnnnnnnnnnnnnnnnnnnnnnnnnnnnnnnnnnnnnnnnnnnnnnnnnnnnnnnnnnnnnnnnnnnnnnnnnnnnnnnnnnnnnnnnnnnnnnnnnnnnnnnnnnnnnnnnnnnnnnnnnnnnnnnnnnnnnnnnnnnnnnnnnnnnnnnnnnnnnnnnnnnnnnnnnnnnnnnnnnnnnnnnnnnnnnnnnnnnnnnnnnnnnnnnnnnnnnnnnnnnnnnnnnnnnnnnnnnnnnnnnnnnnnnnnnnnnnnnnnnnnnnnnnnnnnnnnnnnnnnnnnnnnnnnnnnnnnnnnnnnnnnnnnnnnnnnnnnnnnnnnnnnnnnnnnnnnnnnnnnnnnnnnnnnnnnnnnnnnnnnnnnnnnnnnnnnnnnnnnnnnnnnnnnnnnnnnnnnnnnnnnnnnnnnnnnnnnnnnnnnnnnnnnnnnnnnnnnnnnnnnnnnnnnnnnnnnnnnnnnnnnnnnnnnnnnnnnnnnnnnnnnnnnnnnnnnnnnnnnnnnnnnnnnnnnnnnnnnnnnnnnnnnnnnnnnnnnnnnnnnnnnnnnnnnnnnnnnnnnnnnnnnnnnnnnnnnnnnnnnnnnnnnnnnnnnnnnnnnnnnnnnnnnnnnnnnnnnnnnnnnnnnnnnnnnnnnnnnnnnnnnnnnnnnnnnnnnnnnnnnnnnnnnnnnnnnnnnnnnnnnnnnnnnnnnnnnnnnnnnnnnnnnnnnnnnnnnnnnnnnnnnnnnnnnnnnnnnnnnnnnnnnnnnnnnnnnnnnnnnnnnnnnnnnnnnnnnnnnnnnnnnnnnnnnnnnnnnnnnnnnnnnnnnnnnnnnnnnnnnnnnnnnnnnnnnnnnnnnnnnnnnnnnnnnnnnnnnnnnnnnnnnnnnnnnnnnnnnnnnnnnnnnnnnnnnnnnnnnnnnnnnnnnnnnnnnnnnnnnnnnnnnnnnnnnnnnnnnnnnnnnnnnnnnnnnnnnnnnnnnnnnnnnnnnnnnnnnnnnnnnnnnnnnnnnnnnnnnnnnnnnnnnnnnnnnnnnnnnnnnnnnnnnnnnnnnnnnnnnnnnnnnnnnnnnnnnnnnnnnnnnnnnnnnnnnnnnnnnnnnnnnnnnnnnnnnnnnnnnnnnnnnnnnnnnnnnnnnnnnnnnnnnnnnnnnnnnnnnnnnnnnnnnnnnnnnnnnnnnnnnnnnnnnnnnnnnnnnnnnnnnnnnnnnnnnnnnnnnnnnnnnnnnnnnnnnnnnnnnnnnnnnnnnnnnnnnnnnnnnnnnnnnnnnnnnnnnnnnnnnnnnnnnnnnnnnnnnnnnnnnnnnnnnnnnnnnnnnnnnnnnnnnnnnnnnnnnnnnnnnnnnnnnnnnnnnnnnnnnnnnnnnnnnnnnnnnnnnnnnnnnnnnnnnnnnnnnnnnnnnnnnnnnnnnnnnnnnnnnnnnnnnnnnnnnnnnnnnnnnnnnnnnnnnnnnnnnnnnnnnnnnnnnnnnnnnnnnnnnnnnnnnnnnnnnnnnnnnnnnnnnnnnnnnnnnnnnnnnnnnnnnnnnnnnnnnnnnnnnnnnnnnnnnnnnnnnnnnnnnnnnnnnnnnnnnnnnnnnnnnnnnnnnnnnnnnnnnnnnnnnnnnnnnnnnnnnnnnnnnnnnnnnnnnnnnnnnnnnnnnnnnnnnnnnnnnnnnnnnnnnnnnnnnnnnnnnnnnnnnnnnnnnnnnnnnnnnnnnnnnnnnnnnnnnnnnnnnnnnnnnnnnnnnnnnnnnnnnnnnnnnnnnnnnnnnnnnnnnnnnnnnnnnnnnnnnnnnnnnnnnnnnnnnnnnnnnnnnnnnnnnnnnnnnnnnnnnnnnnnnnnnnnnnnnnnnnnnnnnnnnnnnnnnnnnnnnnnnnnnnnnnnnnnnnnnnnnnnnnnnnnnnnnnnnnnnnnnnnnnnnnnnnnnnnnnnnnnnnnnnnnnnnnnnnnnnnnnnnnnnnnnnnnnnnnnnnnnnnnnnnnnnnnnnnnnnnnnnnnnnnnnnnnnnnnnnnnnnnnnnnnnnnnnnnnnnnnnnnnnnnnnnnnnnnnnnnnnnnnnnnnnnnnnnnnnnnnnnnnnnnnnnnnnnnnnnnnnnnnnnnnnnnnnnnnnnnnnnnnnnnnnnnnnnnnnnnnnnnnnnnnnnnnnnnnnnnnnnnnnnnnnnnnnnnnnnnnnnnnnnnnnnnnnnnnnnnnnnnnnnnnnnnnnnnnnnnnnnnnnnnnnnnnnnnnnnnnnnnnnnnnnnnnnnnnnnnnnnnnnnnnnnnnnnnnnnnnnnnnnnnnnnnnnnnnnnnnnnnnnnnnnnnnnnnnnnnnnnnnnnnnnnnnnnnnnnnnnnnnnnnnnnnnnnnnnnnnnnnnnnnnnnnnnnnnnnnnnnnnnnnnnnnnnnnnnnnnnnnnnnnnnnnnnnnnnnnnnnnnnnnnnnnnnnnnnnnnnnnnnnnnnnnnnnnnnnnnnnnnnnnnnnnnnnnnnnnnnnnnnnnnnnnnnnnnnnnnnnnnnnnnnnnnnnnnnnnnnnnnnnnnnnnnnnnnnnnnnnnnnnnnnnnnnnnnnnnnnnnnnnnnnnnnnnnnnnnnnnnnnnnnnnnnnnnnnnnnnnnnnnnnnnnnnnnnnnnnnnnnnnnnnnnnnnnnnnnnnnnnnnnnnnnnnnnnnnnnnnnnnnnnnnnnnnnnnnnnnnnnnnnnnnnnnnnnnnnnnnnnnnnnnnnnnnnnnnnnnnnnnnnnnnnnnnnnnnnnnnnnnnnnnnnnnnnnnnnnnnnnnnnnnnnnnnnnnnnnnnnnnnnnnnnnnnnnnnnnnnnnnnnnnnnnnnnnnnnnnnnnnnnnnnnnnnnnnnnnnnnnnnnnnnnnnnnnnnnnnnnnnnnnnnnnnnnnnnnnnnnnnnnnnnnnnnnnnnnnnnnnnnnnnnnnnnnnnnnnnnnnnnnnnnnnnnnnnnnnnnnnnnnnnnnnnnnnnnnnnnnnnnnnnnnnnnnnnnnnnnnnnnnnnnnnnnnnnnnnnnnnnnnnnnnnnnnnnnnnnnnnnnnnnnnnnnnnnnnnnnnnnnnnnnnnnnnnnnnnnnnnnnnnnnnnnnnnnnnnnnnnnnnnnnnnnnnnnnnnnnnnnnnnnnnnnnnnnnnnnnnnnnnnnnnnnnnnnnnnnnnnnnnnnnnnnnnnnnnnnnnnnnnnnnnnnnnnnnnnnnnnnnnnnnnnnnnnnnnnnnnnnnnnnnnnnnnnnnnnnnnnnnnnnnnnnnnnnnnnnnnnnnnnnnnnnnnnnnnnnnnnnnnnnnnnnnnnnnnnnnnnnnnnnnnnnnnnnnnnnnnnnnnnnnnnnnnnnnnnnnnnnnnnnnnnnnnnnnnnnnnnnnnnnnnnnnnnnnnnnnnnnnnnnnnnnnnnnnnnnnnnnnnnnnnnnnnnnnnnnnnnnnnnnnnnnnnnnnnnnnnnnnnnnnnnnnnnnnnnnnnnnnnnnnnnnnnnnnnnnnnnnnnnnnnnnnnnnnnnnnnnnnnnnnnnnnnnnnnnnnnnnnnnnnnnnnnnnnnnnnnnnnnnnnnnnnnnnnnnnnnnnnnnnnnnnnnnnnnnnnnnnnnnnnnnnnnnnnnnnnnnnnnnnnnnnnnnnnnnnnnnnnnnnnnnnnnnnnnnnnnnnnnnnnnnnnnnnnnnnnnnnnnnnnnnnnnnnnnnnnnnnnnnnnnnnnnnnnnnnnnnnnnnnnnnnnnnnnnnnnnnnnnnnnnnnnnnnnnnnnnnnnnnnnnnnnnnnnnnnnnnnnnnnnnnnnnnnnnnnnnnnnnnnnnnnnnnnnnnnnnnnnnnnnnnnnnnnnnnnnnnnnnnnnnnnnnnnnnnnnnnnnnnnnnnnnnnnnnnnnnnnnnnnnnnnnnnnnnnnnnnnnnnnnnnnnnnnnnnnnnnnnnnnnnnnnnnnnnnnnnnnnnnnnnnnnnnnnnnnnnnnnnnnnnnnnnnnnnnnnnnnnnnnnnnnnnnnnnnnnnnnnnnnnnnnnnnnnnnnnnnnnnnnnnnnnnnnnnnnnnnnnnnnnnnnnnnnnnnnnnnnnnnnnnnnnnnnnnnnnnnnnnnnnnnnnnnnnnnnnnnnnnnnnnnnnnnnnnnnnnnnnnnnnnnnnnnnnnnnnnnnnnnnnnnnnnnnnnnnnnnnnnnnnnnnnnnnnnnnnnnnnnnnnnnnnnnnnnnnnnnnnnnnnnnnnnnnnnnnnnnnnnnnnnnnnnnnnnnnnnnnnnnnnnnnnnnnnnnnnnnnnnnnnnnnnnnnnnnnnnnnnnnnnnnnnnnnnnnnnnnnnnnnnnnnnnnnnnnnnnnnnnnnnnnnnnnnnnnnnnnnnnnnnnnnnnnnnnnnnnnnnnnnnnnnnnnnnnnnnnnnnnnnnnnnnnnnnnnnnnnnnnnnnnnnnnnnnnnnnnnnnnnnnnnnnnnnnnnnnnnnnnnnnnnnnnnnnnnnnnnnnnnnnnnnnnnnnnnnnnnnnnnnnnnnnnnnnnnnnnnnnnnnnnnnnnnnnnnnnnnnnnnnnnnnnnnnnnnnnnnnnnnnnnnnnnnnnnnnnnnnnnnnnnnnnnnnnnnnnnnnnnnnnnnnnnnnnnnnnnnnnnnnnnnnnnnnnnnnnnnnnnnnnnnnnnnnnnnnnnnnnnnnnnnnnnnnnnnnnnnnnnnnnnnnnnnnnnnnnnnnnnnnnnnnnnnnnnnnnnnnnnnnnnnnnnnnnnnnnnnnnnnnnnnnnnnnnnnnnnnnnnnnnnnnnnnnnnnnnnnnnnnnnnnnnnnnnnnnnnnnnnnnnnnnnnnnnnnnnnnnnnnnnnnnnnnnnnnnnnnnnnnnnnnnnnnnnnnnnnnnnnnnnnnnnnnnnnnnnnnnnnnnnnnnnnnnnnnnnnnnnnnnnnnnnnnnnnnnnnnnnnnnnnnnnnnnnnnnnnnnnnnnnnnnnnnnnnnnnnnnnnnnnnnnnnnnnnnnnnnnnnnnnnnnnnnnnnnnnnnnnnnnnnnnnnnnnnnnnnnnnnnnnnnnnnnnnnnnnnnnnnnnnnnnnnnnnnnnnnnnnnnnnnnnnnnnnnnnnnnnnnnnnnnnnnnnnnnnnnnnnnnnnnnnnnnnnnnnnnnnnnnnnnnnnnnnnnnnnnnnnnnnnnnnnnnnnnnnnnnnnnnnnnnnnnnnnnnnnnnnnnnnnnnnnnnnnnnnnnnnnnnnnnnnnnnnnnnnnnnnnnnnnnnnnnnnnnnnnnnnnnnnnnnnnnnnnnnnnnnnnnnnnnnnnnnnnnnnnnnnnnnnnnnnnnnnnnnnnnnnnnnnnnnnnnnnnnnnnnnnnnnnnnnnnnnnnnnnnnnnnnnnnnnnnnnnnnnnnnnnnnnnnnnnnnnnnnnnnnnnnnnnnnnnnnnnnnnnnnnnnnnnnnnnnnnnnnnnnnnnnnnnnnnnnnnnnnnnnnnnnnnnnnnnnnnnnnnnnnnnnnnnnnnnnnnnnnnnnnnnnnnnnnnnnnnnnnnnnnnnnnnnnnnnnnnnnnnnnnnnnnnnnnnnnnnnnnnnnnnnnnnnnnnnnnnnnnnnnnnnnnnnnnnnnnnnnnnnnnnnnnnnnnnnnnnnnnnnnnnnnnnnnnnnnnnnnnnnnnnnnnnnnnnnnnnnnnnnnnnnnnnnnnnnnnnnnnnnnnnnnnnnnnnnnnnnnnnnnnnnnnnnnnnnnnnnnnnnnnnnnnnnnnnnnnnnnnnnnnnnnnnnnnnnnnnnnnnnnnnnnnnnnnnnnnnnnnnnnnnnnnnnnnnnnnnnnnnnnnnnnnnnnnnnnnnnnnnnnnnnnnnnnnnnnnnnnnnnnnnnnnnnnnnnnnnnnnnnnnnnnnnnnnnnnnnnnnnnnnnnnnnnnnnnnnnnnnnnnnnnnnnnnnnnnnnnnnnnnnnnnnnnnnnnnnnnnnnnnnnnnnnnnnnnnnnnnnnnnnnnnnnnnnnnnnnnnnnnnnnnnnnnnnnnnnnnnnnnnnnnnnnnnnnnnnnnnnnnnnnnnnnnnnnnnnnnnnnnnnnnnnnnnnnnnnnnnnnnnnnnnnnnnnnnnnnnnnnnnnnnnnnnnnnnnnnnnnnnnnnnnnnnnnnnnnnnnnnnnnnnnnnnnnnnnnnnnnnnnnnnnnnnnnnnnnnnnnnnnnnnnnnnnnnnnnnnnnnnnnnnnnnnnnnnnnnnnnnnnnnnnnnnnnnnnnnnnnnnnnnnnnnnnnnnnnnnnnnnnnnnnnnnnnnnnnnnnnnnnnnnnnnnnnnnnnnnnnnnnnnnnnnnnnnnnnnnnnnnnnnnnnnnnnnnnnnnnnnnnnnnnnnnnnnnnnnnnnnnnnnnnnnnnnnnnnnnnnnnnnnnnnnnnnnnnnnnnnnnnnnnnnnnnnnnnnnnnnnnnnnnnnnnnnnnnnnnnnnnnnnnnnnnnnnnnnnnnnnnnnnnnnnnnnnnnnnnnnnnnnnnnnnnnnnnnnnnnnnnnnnnnnnnnnnnnnnnnnnnnnnnnnnnnnnnnnnnnnnnnnnnnnnnnnnnnnnnnnnnnnnnnnnnnnnnnnnnnnnnnnnnnnnnnnnnnnnnnnnnnnnnnnnnnnnnnnnnnnnnnnnnnnnnnnnnnnnnnnnnnnnnnnnnnnnnnnnnnnnnnnnnnnnnnnnnnnnnnnnnnnnnnnnnnnnnnnnnnnnnnnnnnnnnnnnnnnnnnnnnnnnnnnnnnnnnnnnnnnnnnnnnnnnnnnnnnnnnnnnnnnnnnnnnnnnnnnnnnnnnnnnnnnnnnnnnnnnnnnnnnnnnnnnnnnnnnnnnnnnnnnnnnnnnnnnnnnnnnnnnnnnnnnnnnnnnnnnnnnnnnnnnnnnnnnnnnnnnnnnnnnnnnnnnnnnnnnnnnnnnnnnnnnnnnnnnnnnnnnnnnnnnnnnnnnnnnnnnnnnnnnnnnnnnnnnnnnnnnnnnnnnnnnnnnnnnnnnnnnnnnnnnnnnnnnnnnnnnnnnnnnnnnnnnnnnnnnnnnnnnnnnnnnnnnnnnnnnnnnnnnnnnnnnnnnnnnnnnnnnnnnnnnnnnnnnnnnnnnnnnnnnnnnnnnnnnnnnnnnnnnnnnnnnnnnnnnnnnnnnnnnnnnnnnnnnnnnnnnnnnnnnnnnnnnnnnnnnnnnnnnnnnnnnnnnnnnnnnnnnnnnnnnnnnnnnnnnnnnnnnnnnnnnnnnnnnnnnnnnnnnnnnnnnnnnnnnnnnnnnnnnnnnnnnnnnnnnnnnnnnnnnnnnnnnnnnnnnnnnnnnnnnnnnnnnnnnnnnnnnnnnnnnnnnnnnnnnnnnnnnnnnnnnnnnnnnnnnnnnnnnnnnnnnnnnnnnnnnnnnnnnnnnnnnnnnnnnnnnnnnnnnnnnnnnnnnnnnnnnnnnnnnnnnnnnnnnnnnnnnnnnnnnnnnnnnnnnnnnnnnnnnnnnnnnnnnnnnnnnnnnnnnnnnnnnnnnnnnnnnnnnnnnnnnnnnnnnnnnnnnnnnnnnnnnnnnnnnnnnnnnnnnnnnnnnnnnnnnnnnnnnnnnnnnnnnnnnnnnnnnnnnnnnnnnnnnnnnnnnnnnnnnnnnnnnnnnnnnnnnnnnnnnnnnnnnnnnnnnnnnnnnnnnnnnnnnnnnnnnnnnnnnnnnnnnnnnnnnnnnnnnnnnnnnnnnnnnnnnnnnnnnnnnnnnnnnnnnnnnnnnnnnnnnnnnnnnnnnnnnnnnnnnnnnnnnnnnnnnnnnnnnnnnnnnnnnnnnnnnnnnnnnnnnnnnnnnnnnnnnnnnnnnnnnnnnnnnnnnnnnnnnnnnnnnnnnnnnnnnnnnnnnnnnnnnnnnnnnnnnnnnnnnnnnnnnnnnnnnnnnnnnnnnnnnnnnnnnnnnnnnnnnnnnnnnnnnnnnnnnnnnnnnnnnnnnnnnnnnnnnnnnnnnnnnnnnnnnnnnnnnnnnnnnnnnnnnnnnnnnnnnnnnnnnnnnnnnnnnnnnnnnnnnnnnnnnnnnnnnnnnnnnnnnnnnnnnnnnnnnnnnnnnnnnnnnnnnnnnnnnnnnnnnnnnnnnnnnnnnnnnnnnnnnnnnnnnnnnnnnnnnnnnnnnnnnnnnnnnnnnnnnnnnnnnnnnnnnnnnnnnnnnnnnnnnnnnnnnnnnnnnnnnnnnnnnnnnnnnnnnnnnnnnnnnnnnnnnnnnnnnnnnnnnnnnnnnnnnnnnnnnnnnnnnnnnnnnnnnnnnnnnnnnnnnnnnnnnnnnnnnnnnnnnnnnnnnnnnnnnnnnnnnnnnnnnnnnnnnnnnnnnnnnnnnnnnnnnnnnnnnnnnnnnnnnnnnnnnnnnnnnnnnnnnnnnnnnnnnnnnnnnnnnnnnnnnnnnnnnnnnnnnnnnnnnnnnnnnnnnnnnnnnnnnnnnnnnnnnnnnnnnnnnnnnnnnnnnnnnnnnnnnnnnnnnnnnnnnnnnnnnnnnnnnnnnnnnnnnnnnnnnnnnnnnnnnnnnnnnnnnnnnnnnnnnnnnnnnnnnnnnnnnnnnnnnnnnnnnnnnnnnnnnnnnnnnnnnnnnnnnnnnnnnnnnnnnnnnnnnnnnnnnnnnnnnnnnnnnnnnnnnnnnnnnnnnnnnnnnnnnnnnnnnnnnnnnnnnnnnnnnnnnnnnnnnnnnnnnnnnnnnnnnnnnnnnnnnnnnnnnnnnnnnnnnnnnnnnnnnnnnnnnnnnnnnnnnnnnnnnnnnnnnnnnnnnnnnnnnnnnnnnnnnnnnnnnnnnnnnnnnnnnnnnnnnnnnnnnnnnnnnnnnnnnnnnnnnnnnnnnnnnnnnnnnnnnnnnnnnnnnnnnnnnnnnnnnnnnnnnnnnnnnnnnnnnnnnnnnnnnnnnnnnnnnnnnnnnnnnnnnnnnnnnnnnnnnnnnnnnnnnnnnnnnnnnnnnnnnnnnnnnnnnnnnnnnnnnnnnnnnnnnnnnnnnnnnnnnnnnnnnnnnnnnnnnnnnnnnnnnnnnnnnnnnnnnnnnnnnnnnnnnnnnnnnnnnnnnnnnnnnnnnnnnnnnnnnnnnnnnnnnnnnnnnnnnnnnnnnnnnnnnnnnnnnnnnnnnnnnnnnnnnnnnnnnnnnnnnnnnnnnnnnnnnnnnnnnnnnnnnnnnnnnnnnnnnnnnnnnnnnnnnnnnnnnnnnnnnnnnnnnnnnnnnnnnnnnnnnnnnnnnnnnnnnnnnnnnnnnnnnnnnnnnnnnnnnnnnnnnnnnnnnnnnnnnnnnnnnnnnnnnnnnnnnnnnnnnnnnnnnnnnnnnnnnnnnnnnnnnnnnnnnnnnnnnnnnnnnnnnnnnnnnnnnnnnnnnnnnnnnnnnnnnnnnnnnnnnnnnnnnnnnnnnnnnnnnnnnnnnnnnnnnnnnnnnnnnnnnnnnnnnnnnnnnnnnnnnnnnnnnnnnnnnnnnnnnnnnnnnnnnnnnnnnnnnnnnnnnnnnnnnnnnnnnnnnnnnnnnnnnnnnnnnnnnnnnnnnnnnnnnnnnnnnnnnnnnnnnnnnnnnnnnnnnnnnnnnnnnnnnnnnnnnnnnnnnnnnnnnnnnnnnnnnnnnnnnnnnnnnnnnnnnnnnnnnnnnnnnnnnnnnnnnnnnnnnnnnnnnnnnnnnnnnnnnnnnnnnnnnnnnnnnnnnnnnnnnnnnnnnnnnnnnnnnnnnnnnnnnnnnnnnnnnnnnnnnnnnnnnnnnnnnnnnnnnnnnnnnnnnnnnnnnnnnnnnnnnnnnnnnnnnnnnnnnnnnnnnnnnnnnnnnnnnnnnnnnnnnnnnnnnnnnnnnnnnnnnnnnnnnnnnnnnnnnnnnnnnnnnnnnnnnnnnnnnnnnnnnnnnnnnnnnnnnnnnnnnnnnnnnnnnnnnnnnnnnnnnnnnnnnnnnnnnnnnnnnnnnnnnnnnnnnnnnnnnnnnnnnnnnnnnnnnnnnnnnnnnnnnnnnnnnnnnnnnnnnnnnnnnnnnnnnnnnnnnnnnnnnnnnnnnnnnnnnnnnnnnnnnnnnnnnnnnnnnnnnnnnnnnnnnnnnnnnnnnnnnnnnnnnnnnnnnnnnnnnnnnnnnnnnnnnnnnnnnnnnnnnnnnnnnnnnnnnnnnnnnnnnnnnnnnnnnnnnnnnnnnnnnnnnnnnnnnnnnnnnnnnnnnnnnnnnnnnnnnnnnnnnnnnnnnnnnnnnnnnnnnnnnnnnnnnnnnnnnnnnnnnnnnnnnnnnnnnnnnnnnnnnnnnnnnnnnnnnnnnnnnnnnnnnnnnnnnnnnnnnnnnnnnnnnnnnnnnnnnnnnnnnnnnnnnnnnnnnnnnnnnnnnnnnnnnnnnnnnnnnnnnnnnnnnnnnnnnnnnnnnnnnnnnnnnnnnnnnnnnnnnnnnnnnnnnnnnnnnnnnnnnnnnnnnnnnnnnnnnnnnnnnnnnnnnnnnnnnnnnnnnnnnnnnnnnnnnnnnnnnnnnnnnnnnnnnnnnnnnnnnnnnnnnnnnnnnnnnnnnnnnnnnnnnnnnnnnnnnnnnnnnnnnnnnnnnnnnnnnnnnnnnnnnnnnnnnnnnnnnnnnnnnnnnnnnnnnnnnnnnnnnnnnnnnnnnnnnnnnnnnnnnnnnnnnnnnnnnnnnnnnnnnnnnnnnnnnnnnnnnnnnnnnnnnnnnnnnnnnnnnnnnnnnnnnnnnnnnnnnnnnnnnnnnnnnnnnnnnnnnnnnnnnnnnnnnnnnnnnnnnnnnnnnnnnnnnnnnnnnnnnnnnnnnnnnnnnnnnnnnnnnnnnnnnnnnnnnnnnnnnnnnnnnnnnnnnnnnnnnnnnnnnnnnnnnnnnnnnnnnnnnnnnnnnnnnnnnnnnnnnnnnnnnnnnnnnnnnnnnnnnnnnnnnnnnnnnnnnnnnnnnnnnnnnnnnnnnnnnnnnnnnnnnnnnnnnnnnnnnnnnnnnnnnnnnnnnnnnnnnnnnnnnnnnnnnnnnnnnnnnnnnnnnnnnnnnnnnnnnnnnnnnnnnnnnnnnnnnnnnnnnnnnnnnnnnnnnnnnnnnnnnnnnnnnnnnnnnnnnnnnnnnnnnnnnnnnnnnnnnnnnnnnnnnnnnnnnnnnnnnnnnnnnnnnnnnnnnnnnnnnnnnnnnnnnnnnnnnnnnnnnnnnnnnnnnnnnnnnnnnnnnnnnnnnnnnnnnnnnnnnnnnnnnnnnnnnnnnnnnnnnnnnnnnnnnnnnnnnnnnnnnnnnnnnnnnnnnnnnnnnnnnnnnnnnnnnnnnnnnnnnnnnnnnnnnnnnnnnnnnnnnnnnnnnnnnnnnnnnnnnnnnnnnnnnnnnnnnnnnnnnnnnnnnnnnnnnnnnnnnnnnnnnnnnnnnnnnnnnnnnnnnnnnnnnnnnnnnnnnnnnnnnnnnnnnnnnnnnnnnnnnnnnnnnnnnnnnnnnnnnnnnnnnnnnnnnnnnnnnnnnnnnnnnnnnnnnnnnnnnnnnnnnnnnnnnnnnnnnnnnnnnnnnnnnnnnnnnnnnnnnnnnnnnnnnnnnnnnnnnnnnnnnnnnnnnnnnnnnnnnnnnnnnnnnnnnnnnnnnnnnnnnnnnnnnnnnnnnnnnnnnnnnnnnnnnnnnnnnnnnnnnnnnnnnnnnnnnnnnnnnnnnnnnnnnnnnnnnnnnnnnnnnnnnnnnnnnnnnnnnnnnnnnnnnnnnnnnnnnnnnnnnnnnnnnnnnnnnnnnnnnnnnnnnnnnnnnnnnnnnnnnnnnnnnnnnnnnnnnnnnnnnnnnnnnnnnnnnnnnnnnnnnnnnnnnnnnnnnnnnnnnnnnnnnnnnnnnnnnnnnnnnnnnnnnnnnnnnnnnnnnnnnnnnnnnnnnnnnnnnnnnnnnnnnnnnnnnnnnnnnnnnnnnnnnnnnnnnnnnnnnnnnnnnnnnnnnnnnnnnnnnnnnnnnnnnnnnnnnnnnnnnnnnnnnnnnnnnnnnnnnnnnnnnnnnnnnnnnnnnnnnnnnnnnnnnnnnnnnnnnnnnnnnnnnnnnnnnnnnnnnnnnnnnnnnnnnnnnnnnnnnnnnnnnnnnnnnnnnnnnnnnnnnnnnnnnnnnnnnnnnnnnnnnnnnnnnnnnnnnnnnnnnnnnnnnnnnnnnnnnnnnnnnnnnnnnnnnnnnnnnnnnnnnnnnnnnnnnnnnnnnnnnnnnnnnnnnnnnnnnnnnnnnnnnnnnnnnnnnnnnnnnnnnnnnnnnnnnnnnnnnnnnnnnnnnnnnnnnnnnnnnnnnnnnnnnnnnnnnnnnnnnnnnnnnnnnnnnnnnnnnnnnnnnnnnnnnnnnnnnnnnnnnnnnnnnnnnnnnnnnnnnnnnnnnnnnnnnnnnnnnnnnnnnnnnnnnnnnnnnnnnnnnnnnnnnnnnnnnnnnnnnnnnnnnnnnnnnnnnnnnnnnnnnnnnnnnnnnnnnnnnnnnnnnnnnnnnnnnnnnnnnnnnnnnnnnnnnnnnnnnnnnnnnnnnnnnnnnnnnnnnnnnnnnnnnnnnnnnnnnnnnnnnnnnnnnnnnnnnnnnnnnnnnnnnnnnnnnnnnnnnnnnnnnnnnnnnnnnnnnnnnnnnnnnnnnnnnnnnnnnnnnnnnnnnnnnnnnnnnnnnnnnnnnnnnnnnnnnnnnnnnnnnnnnnnnnnnnnnnnnnnnnnnnnnnnnnnnnnnnnnnnnnnnnnnnnnnnnnnnnnnnnnnnnnnnnnnnnnnnnnnnnnnnnnnnnnnnnnnnnnnnnnnnnnnnnnnnnnnnnnnnnnnnnnnnnnnnnnnnnnnnnnnnnnnnnnnnnnnnnnnnnnnnnnnnnnnnnnnnnnnnnnnnnnnnnnnnnnnnnnnnnnnnnnnnnnnnnnnnnnnnnnnnnnnnnnnnnnnnnnnnnnnnnnnnnnnnnnnnnnnnnnnnnnnnnnnnnnnnnnnnnnnnnnnnnnnnnnnnnnnnnnnnnnnnnnnnnnnnnnnnnnnnnnnnnnnnnnnnnnnnnnnnnnnnnnnnnnnnnnnnnnnnnnnnnnnnnnnnnnnnnnnnnnnnnnnnnnnnnnnnnnnnnnnnnnnnnnnnnnnnnnnnnnnnnnnnnnnnnnnnnnnnnnnnnnnnnnnnnnnnnnnnnnnnnnnnnnnnnnnnnnnnnnnnnnnnnnnnnnnnnnnnnnnnnnnnnnnnnnnnnnnnnnnnnnnnnnnnnnnnnnnnnnnnnnnnnnnnnnnnnnnnnnnnnnnnnnnnnnnnnnnnnnnnnnnnnnnnnnnnnnnnnnnnnnnnnnnnnnnnnnnnnnnnnnnnnnnnnnnnnnnnnnnnnnnnnnnnnnnnnnnnnnnnnnnnnnnnnnnnnnnnnnnnnnnnnnnnnnnnnnnnnnnnnnnnnnnnnnnnnnnnnnnnnnnnnnnnnnnnnnnnnnnnnnnnnnnnnnnnnnnnnnnnnnnnnnnnnnnnnnnnnnnnnnnnnnnnnnnnnnnnnnnnnnnnnnnnnnnnnnnnnnnnnnnnnnnnnnnnnnnnnnnnnnnnnnnnnnnnnnnnnnnnnnnnnnnnnnnnnnnnnnnnnnnnnnnnnnnnnnnnnnnnnnnnnnnnnnnnnnnnnnnnnnnnnnnnnnnnnnnnnnnnnnnnnnnnnnnnnnnnnnnnnnnnnnnnnnnnnnnnnnnnnnnnnnnnnnnnnnnnnnnnnnnnnnnnnnnnnnnnnnnnnnnnnnnnnnnnnnnnnnnnnnnnnnnnnnnnnnnnnnnnnnnnnnnnnnnnnnnnnnnnnnnnnnnnnnnnnnnnnnnnnnnnnnnnnnnnnnnnnnnnnnnnnnnnnnnnnnnnnnnnnnnnnnnnnnnnnnnnnnnnnnnnnnnnnnnnnnnnnnnnnnnnnnnnnnnnnnnnnnnnnnnnnnnnnnnnnnnnnnnnnnnnnnnnnnnnnnnnnnnnnnnnnnnnnnnnnnnnnnnnnnnnnnnnnnnnnnnnnnnnnnnnnnnnnnnnnnnnnnnnnnnnnnnnnnnnnnnnnnnnnnnnnnnnnnnnnnnnnnnnnnnnnnnnnnnnnnnnnnnnnnnnnnnnnnnnnnnnnnnnnnnnnnnnnnnnnnnnnnnnnnnnnnnnnnnnnnnnnnnnnnnnnnnnnnnnnnnnnnnnnnnnnnnnnnnnnnnnnnnnnnnnnnnnnnnnnnnnnnnnnnnnnnnnnnnnnnnnnnnnnnnnnnnnnnnnnnnnnnnnnnnnnnnnnnnnnnnnnnnnnnnnnnnnnnnnnnnnnnnnnnnnnnnnnnnnnnnnnnnnnnnnnnnnnnnnnnnnnnnnnnnnnnnnnnnnnnnnnnnnnnnnnnnnnnnnnnnnnnnnnnnnnnnnnnnnnnnnnnnnnnnnnnnnnnnnnnnnnnnnnnnnnnnnnnnnnnnnnnnnnnnnnnnnnnnnnnnnnnnnnnnnnnnnnnnnnnnnnnnnnnnnnnnnnnnnnnnnnnnnnnnnnnnnnnnnnnnnnnnnnnnnnnnnnnnnnnnnnnnnnnnnnnnnnnnnnnnnnnnnnnnnnnnnnnnnnnnnnnnnnnnnnnnnnnnnnnnnnnnnnnnnnnnnnnnnnnnnnnnnnnnnnnnnnnnnnnnnnnnnnnnnnnnnnnnnnnnnnnnnnnnnnnnnnnnnnnnnnnnnnnnnnnnnnnnnnnnnnnnnnnnnnnnnnnnnnnnnnnnnnnnnnnnnnnnnnnnnnnnnnnnnnnnnnnnnnnnnnnnnnnnnnnnnnnnnnnnnnnnnnnnnnnnnnnnnnnnnnnnnnnnnnnnnnnnnnnnnnnnnnnnnnnnnnnnnnnnnnnnnnnnnnnnnnnnnnnnnnnnnnnnnnnnnnnnnnnnnnnnnnnnnnnnnnnnnnnnnnnnnnnnnnnnnnnnnnnnnnnnnnnnnnnnnnnnnnnnnnnnnnnnnnnnnnnnnnnnnnnnnnnnnnnnnnnnnnnnnnnnnnnnnnnnnnnnnnnnnnnnnnnnnnnnnnnnnnnnnnnnnnnnnnnnnnnnnnnnnnnnnnnnnnnnnnnnnnnnnnnnnnnnnnnnnnnnnnnnnnnnnnnnnnnnnnnnnnnnnnnnnnnnnnnnnnnnnnnnnnnnnnnnnnnnnnnnnnnnnnnnnnnnnnnnnnnnnnnnnnnnnnnnnnnnnnnnnnnnnnnnnnnnnnnnnnnnnnnnnnnnnnnnnnnnnnnnnnnnnnnnnnnnnnnnnnnnnnnnnnnnnnnnnnnnnnnnnnnnnnnnnnnnnnnnnnnnnnnnnnnnnnnnnnnnnnnnnnnnnnnnnnnnnnnnnnnnnnnnnnnnnnnnnnnnnnnnnnnnnnnnnnnnnnnnnnnnnnnnnnnnnnnnnnnnnnnnnnnnnnnnnnnnnnnnnnnnnnnnnnnnnnnnnnnnnnnnnnnnnnnnnnnnnnnnnnnnnnnnnnnnnnnnnnnnnnnnnnnnnnnnnnnnnnnnnnnnnnnnnnnnnnnnnnnnnnnnnnnnnnnnnnnnnnnnnnnnnnnnnnnnnnnnnnnnnnnnnnnnnnnnnnnnnnnnnnnnnnnnnnnnnnnnnnnnnnnnnnnnnnnnnnnnnnnnnnnnnnnnnnnnnnnnnnnnnnnnnnnnnnnnnnnnnnnnnnnnnnnnnnnnnnnnnnnnnnnnnnnnnnnnnnnnnnnnnnnnnnnnnnnnnnnnnnnnnnnnnnnnnnnnnnnnnnnnnnnnnnnnnnnnnnnnnnnnnnnnnnnnnnnnnnnnnnnnnnnnnnnnnnnnnnnnnnnnnnnnnnnnnnnnnnnnnnnnnnnnnnnnnnnnnnnnnnnnnnnnnnnnnnnnnnnnnnnnnnnnnnnnnnnnnnnnnnnnnnnnnnnnnnnnnnnnnnnnnnnnnnnnnnnnnnnnnnnnnnnnnnnnnnnnnnnnnnnnnnnnnnnnnnnnnnnnnnnnnnnnnnnnnnnnnnnnnnnnnnnnnnnnnnnnnnnnnnnnnnnnnnnnnnnnnnnnnnnnnnnnnnnnnnnnnnnnnnnnnnnnnnnnnnnnnnnnnnnnnnnnnnnnnnnnnnnnnnnnnnnnnnnnnnnnnnnnnnnnnnnnnnnnnnnnnnnnnnnnnnnnnnnnnnnnnnnnnnnnnnnnnnnnnnnnnnnnnnnnnnnnnnnnnnnnnnnnnnnnnnnnnnnnnnnnnnnnnnnnnnnnnnnnnnnnnnnnnnnnnnnnnnnnnnnnnnnnnnnnnnnnnnnnnnnnnnnnnnnnnnnnnnnnnnnnnnnnnnnnnnnnnnnnnnnnnnnnnnnnnnnnnnnnnnnnnnnnnnnnnnnnnnnnnnnnnnnnnnnnnnnnnnnnnnnnnnnnnnnnnnnnnnnnnnnnnnnnnnnnnnnnnnnnnnnnnnnnnnnnnnnnnnnnnnnnnnnnnnnnnnnnnnnnnnnnnnnnnnnnnnnnnnnnnnnnnnnnnnnnnnnnnnnnnnnnnnnnnnnnnnnnnnnnnnnnnnnnnnnnnnnnnnnnnnnnnnnnnnnnnnnnnnnnnnnnnnnnnnnnnnnnnnnnnnnnnnnnnnnnnnnnnnnnnnnnnnnnnnnnnnnnnnnnnnnnnnnnnnnnnnnnnnnnnnnnnnnnnnnnnnnnnnnnnnnnnnnnnnnnnnnnnnnnnnnnnnnnnnnnnnnnnnnnnnnnnnnnnnnnnnnnnnnnnnnnnnnnnnnnnnnnnnnnnnnnnnnnnnnnnnnnnnnnnnnnnnnnnnnnnnnnnnnnnnnnnnnnnnnnnnnnnnnnnnnnnnnnnnnnnnnnnnnnnnnnnnnnnnnnnnnnnnnnnnnnnnnnnnnnnnnnnnnnnnnnnnnnnnnnnnnnnnnnnnnnnnnnnnnnnnnnnnnnnnnnnnnnnnnnnnnnnnnnnnnnnnnnnnnnnnnnnnnnnnnnnnnnnnnnnnnnnnnnnnnnnnnnnnnnnnnnnnnnnnnnnnnnnnnnnnnnnnnnnnnnnnnnnnnnnnnnnnnnnnnnnnnnnnnnnnnnnnnnnnnnnnnnnnnnnnnnnnnnnnnnnnnnnnnnnnnnnnnnnnnnnnnnnnnnnnnnnnnnnnnnnnnnnnnnnnnnnnnnnnnnnnnnnnnnnnnnnnnnnnnnnnnnnnnnnnnnnnnnnnnnnnnnnnnnnnnnnnnnnnnnnnnnnnnnnnnnnnnnnnnnnnnnnnnnnnnnnnnnnnnnnnnnnnnnnnnnnnnnnnnnnnnnnnnnnnnnnnnnnnnnnnnnnnnnnnnnnnnnnnnnnnnnnnnnnnnnnnnnnnnnnnnnnnnnnnnnnnnnnnnnnnnnnnnnnnnnnnnnnnnnnnnnnnnnnnnnnnnnnnnnnnnnnnnnnnnnnnnnnnnnnnnnnnnnnnnnnnnnnnnnnnnnnnnnnnnnnnnnnnnnnnnnnnnnnnnnnnnnnnnnnnnnnnnnnnnnnnnnnnnnnnnnnnnnnnnnnnnnnnnnnnnnnnnnnnnnnnnnnnnnnnnnnnnnnnnnnnnnnnnnnnnnnnnnnnnnnnnnnnnnnnnnnnnnnnnnnnnnnnnnnnnnnnnnnnnnnnnnnnnnnnnnnnnnnnnnnnnnnnnnnnnnnnnnnnnnnnnnnnnnnnnnnnnnnnnnnnnnnnnnnnnnnnnnnnnnnnnnnnnnnnnnnnnnnnnnnnnnnnnnnnnnnnnnnnnnnnnnnnnnnnnnnnnnnnnnnnnnnnnnnnnnnnnnnnnnnnnnnnnnnnnnnnnnnnnnnnnnnnnnnnnnnnnnnnnnnnnnnnnnnnnnnnnnnnnnnnnnnnnnnnnnnnnnnnnnnnnnnnnnnnnnnnnnnnnnnnnnnnnnnnnnnnnnnnnnnnnnnnnnnnnnnnnnnnnnnnnnnnnnnnnnnnnnnnnnnnnnnnnnnnnnnnnnnnnnnnnnnnnnnnnnnnnnnnnnnnnnnnnnnnnnnnnnnnnnnnnnnnnnnnnnnnnnnnnnnnnnnnnnnnnnnnnnnnnnnnnnnnnnnnnnnnnnnnnnnnnnnnnnnnnnnnnnnnnnnnnnnnnnnnnnnnnnnnnnnnnnnnnnnnnnnnnnnnnnnnnnnnnnnnnnnnnnnnnnnnnnnnnnnnnnnnnnnnnnnnnnnnnnnnnnnnnnnnnnnnnnnnnnnnnnnnnnnnnnnnnnnnnnnnnnnnnnnnnnnnnnnnnnnnnnnnnnnnnnnnnnnnnnnnnnnnnnnnnnnnnnnnnnnnnnnnnnnnnnnnnnnnnnnnnnnnnnnnnnnnnnnnnnnnnnnnnnnnnnnnnnnnnnnnnnnnnnnnnnnnnnnnnnnnnnnnnnnnnnnnnnnnnnnnnnnnnnnnnnnnnnnnnnnnnnnnnnnnnnnnnnnnnnnnnnnnnnnnnnnnnnnnnnnnnnnnnnnnnnnnnnnnnnnnnnnnnnnnnnnnnnnnnnnnnnnnnnnnnnnnnnnnnnnnnnnnnnnnnnnnnnnnnnnnnnnnnnnnnnnnnnnnnnnnnnnnnnnnnnnnnnnnnnnnnnnnnnnnnnnnnnnnnnnnnnnnnnnnnnnnnnnnnnnnnnnnnnnnnnnnnnnnnnnnnnnnnnnnnnnnnnnnnnnnnnnnnnnnnnnnnnnnnnnnnnnnnnnnnnnnnnnnnnnnnnnnnnnnnnnnnnnnnnnnnnnnnnnnnnnnnnnnnnnnnnnnnnnnnnnnnnnnnnnnnnnnnnnnnnnnnnnnnnnnnnnnnnnnnnnnnnnnnnnnnnnnnnnnnnnnnnnnnnnnnnnnnnnnnnnnnnnnnnnnnnnnnnnnnnnnnnnnnnnnnnnnnnnnnnnnnnnnnnnnnnnnnnnnnnnnnnnnnnnnnnnnnnnnnnnnnnnnnnnnnnnnnnnnnnnnnnnnnnnnnnnnnnnnnnnnnnnnnnnnnnnnnnnnnnnnnnnnnnnnnnnnnnnnnnnnnnnnnnnnnnnnnnnnnnnnnnnnnnnnnnnnnnnnnnnnnnnnnnnnnnnnnnnnnnnnnnnnnnnnnnnnnnnnnnnnnnnnnnnnnnnnnnnnnnnnnnnnnnnnnnnnnnnnnnnnnnnnnnnnnnnnnnnnnnnnnnnnnnnnnnnnnnnnnnnnnnnnnnnnnnnnnnnnnnnnnnnnnnnnnnnnnnnnnnnnnnnnnnnnnnnnnnnnnnnnnnnnnnnnnnnnnnnnnnnnnnnnnnnnnnnnnnnnnnnnnnnnnnnnnnnnnnnnnnnnnnnnnnnnnnnnnnnnnnnnnnnnnnnnnnnnnnnnnnnnnnnnnnnnnnnnnnnnnnnnnnnnnnnnnnnnnnnnnnnnnnnnnnnnnnnnnnnnnnnnnnnnnnnnnnnnnnnnnnnnnnnnnnnnnnnnnnnnnnnnnnnnnnnnnnnnnnnnnnnnnnnnnnnnnnnnnnnnnnnnnnnnnnnnnnnnnnnnnnnnnnnnnnnnnnnnnnnnnnnnnnnnnnnnnnnnnnnnnnnnnnnnnnnnnnnnnnnnnnnnnnnnnnnnnnnnnnnnnnnnnnnnnnnnnnnnnnnnnnnnnnnnnnnnnnnnnnnnnnnnnnnnnnnnnnnnnnnnnnnnnnnnnnnnnnnnnnnnnnnnnnnnnnnnnnnnnnnnnnnnnnnnnnnnnnnnnnnnnnnnnnnnnnnnnnnnnnnnnnnnnnnnnnnnnnnnnnnnnnnnnnnnnnnnnnnnnnnnnnnnnnnnnnnnnnnnnnnnnnnnnnnnnnnnnnnnnnnnnnnnnnnnnnnnnnnnnnnnnnnnnnnnnnnnnnnnnnnnnnnnnnnnnnnnnnnnnnnnnnnnnnnnnnnnnnnnnnnnnnnnnnnnnnnnnnnnnnnnnnnnnnnnnnnnnnnnnnnnnnnnnnnnnnnnnnnnnnnnnnnnnnnnnnnnnnnnnnnnnnnnnnnnnnnnnnnnnnnnnnnnnnnnnnnnnnnnnnnnnnnnnnnnnnnnnnnnnnnnnnnnnnnnnnnnnnnnnnnnnnnnnnnnnnnnnnnnnnnnnnnnnnnnnnnnnnnnnnnnnnnnnnnnnnnnnnnnnnnnnnnnnnnnnnnnnnnnnnnnnnnnnnnnnnnnnnnnnnnnnnnnnnnnnnnnnnnnnnnnnnnnnnnnnnnnnnnnnnnnnnnnnnnnnnnnnnnnnnnnnnnnnnnnnnnnnnnnnnnnnnnnnnnnnnnnnnnnnnnnnnnnnnnnnnnnnnnnnnnnnnnnnnnnnnnnnnnnnnnnnnnnnnnnnnnnnnnnnnnnnnnnnnnnnnnnnnnnnnnnnnnnnnnnnnnnnnnnnnnnnnnnnnnnnnnnnnnnnnnnnnnnnnnnnnnnnnnnnnnnnnnnnnnnnnnnnnnnnnnnnnnnnnnnnnnnnnnnnnnnnnnnnnnnnnnnnnnnnnnnnnnnnnnnnnnnnnnnnnnnnnnnnnnnnnnnnnnnnnnnnnnnnnnnnnnnnnnnnnnnnnnnnnnnnnnnnnnnnnnnnnnnnnnnnnnnnnnnnnnnnnnnnnnnnnnnnnnnnnnnnnnnnnnnnnnnnnnnnnnnnnnnnnnnnnnnnnnnnnnnnnnnnnnnnnnnnnnnnnnnnnnnnnnnnnnnnnnnnnnnnnnnnnnnnnnnnnnnnnnnnnnnnnnnnnnnnnnnnnnnnnnnnnnnnnnnnnnnnnnnnnnnnnnnnnnnnnnnnnnnnnnnnnnnnnnnnnnnnnnnnnnnnnnnnnnnnnnnnnnnnnnnnnnnnnnnnnnnnnnnnnnnnnnnnnnnnnnnnnnnnnnnnnnnnnnnnnnnnnnnnnnnnnnnnnnnnnnnnnnnnnnnnnnnnnnnnnnnnnnnnnnnnnnnnnnnnnnnnnnnnnnnnnnnnnnnnnnnnnnnnnnnnnnnnnnnnnnnnnnnnnnnnnnnnnnnnnnnnnnnnnnnnnnnnnnnnnnnnnnnnnnnnnnnnnnnnnnnnnnnnnnnnnnnnnnnnnnnnnnnnnnnnnnnnnnnnnnnnnnnnnnnnnnnnnnnnnnnnnnnnnnnnnnnnnnnnnnnnnnnnnnnnnnnnnnnnnnnnnnnnnnnnnnnnnnnnnnnnnnnnnnnnnnnnnnnnnnnnnnnnnnnnnnnnnnnnnnnnnnnnnnnnnnnnnnnnnnnnnnnnnnnnnnnnnnnnnnnnnnnnnnnnnnnnnnnnnnnnnnnnnnnnnnnnnnnnnnnnnnnnnnnnnnnnnnnnnnnnnnnnnnnnnnnnnnnnnnnnnnnnnnnnnnnnnnnnnnnnnnnnnnnnnnnnnnnnnnnnnnnnnnnnnnnnnnnnnnnnnnnnnnnnnnnnnnnnnnnnnnnnnnnnnnnnnnnnnnnnnnnnnnnnnnnnnnnnnnnnnnnnnnnnnnnnnnnnnnnnnnnnnnnnnnnnnnnnnnnnnnnnnnnnnnnnnnnnnnnnnnnnnnnnnnnnnnnnnnnnnnnnnnnnnnnnnnnnnnnnnnnnnnnnnnnnnnnnnnnnnnnnnnnnnnnnnnnnnnnnnnnnnnnnnnnnnnnnnnnnnnnnnnnnnnnnnnnnnnnnnnnnnnnnnnnnnnnnnnnnnnnnnnnnnnnnnnnnnnnnnnnnnnnnnnnnnnnnnnnnnnnnnnnnnnnnnnnnnnnnnnnnnnnnnnnnnnnnnnnnnnnnnnnnnnnnnnnnnnnnnnnnnnnnnnnnnnnnnnnnnnnnnnnnnnnnnnnnnnnnnnnnnnnnnnnnnnnnnnnnnnnnnnnnnnnnnnnnnnnnnnnnnnnnnnnnnnnnnnnnnnnnnnnnnnnnnnnnnnnnnnnnnnnnnnnnnnnnnnnnnnnnnnnnnnnnnnnnnnnnnnnnnnnnnnnnnnnnnnnnnnnnnnnnnnnnnnnnnnnnnnnnnnnnnnnnnnnnnnnnnnnnnnnnnnnnnnnnnnnnnnnnnnnnnnnnnnnnnnnnnnnnnnnnnnnnnnnnnnnnnnnnnnnnnnnnnnnnnnnnnnnnnnnnnnnnnnnnnnnnnnnnnnnnnnnnnnnnnnnnnnnnnnnnnnnnnnnnnnnnnnnnnnnnnnnnnnnnnnnnnnnnnnnnnnnnnnnnnnnnnnnnnnnnnnnnnnnnnnnnnnnnnnnnnnnnnnnnnnnnnnnnnnnnnnnnnnnnnnnnnnnnnnnnnnnnnnnnnnnnnnnnnnnnnnnnnnnnnnnnnnnnnnnnnnnnnnnnnnnnnnnnnnnnnnnnnnnnnnnnnnnnnnnnnnnnnnnnnnnnnnnnnnnnnnnnnnnnnnnnnnnnnnnnnnnnnnnnnnnnnnnnnnnnnnnnnnnnnnnnnnnnnnnnnnnnnnnnnnnnnnnnnnnnnnnnnnnnnnnnnnnnnnnnnnnnnnnnnnnnnnnnnnnnnnnnnnnnnnnnnnnnnnnnnnnnnnnnnnnnnnnnnnnnnnnnnnnnnnnnnnnnnnnnnnnnnnnnnnnnnnnnnnnnnnnnnnnnnnnnnnnnnnnnnnnnnnnnnnnnnnnnnnnnnnnnnnnnnnnnnnnnnnnnnnnnnnnnnnnnnnnnnnnnnnnnnnnnnnnnnnnnnnnnnnnnnnnnnnnnnnnnnnnnnnnnnnnnnnnnnnnnnnnnnnnnnnnnnnnnnnnnnnnnnnnnnnnnnnnnnnnnnnnnnnnnnnnnnnnnnnnnnnnnnnnnnnnnnnnnnnnnnnnnnnnnnnnnnnnnnnnnnnnnnnnnnnnnnnnnnnnnnnnnnnnnnnnnnnnnnnnnnnnnnnnnnnnnnnnnnnnnnnnnnnnnnnnnnnnnnnnnnnnnnnnnnnnnnnnnnnnnnnnnnnnnnnnnnnnnnnnnnnnnnnnnnnnnnnnnnnnnnnnnnnnnnnnnnnnnnnnnnnnnnnnnnnnnnnnnnnnnnnnnnnnnnnnnnnnnnnnnnnnnnnnnnnnnnnnnnnnnnnnnnnnnnnnnnnnnnnnnnnnnnnnnnnnnnnnnnnnnnnnnnnnnnnnnnnnnnnnnnnnnnnnnnnnnnnnnnnnnnnnnnnnnnnnnnnnnnnnnnnnnnnnnnnnnnnnnnnnnnnnnnnnnnnnnnnnnnnnnnnnnnnnnnnnnnnnnnnnnnnnnnnnnnnnnnnnnnnnnnnnnnnnnnnnnnnnnnnnnnnnnnnnnnnnnnnnnnnnnnnnnnnnnnnnnnnnnnnnnnnnnnnnnnnnnnnnnnnnnnnnnnnnnnnnnnnnnnnnnnnnnnnnnnnnnnnnnnnnnnnnnnnnnnnnnnnnnnnnnnnnnnnnnnnnnnnnnnnnnnnnnnnnnnnnnnnnnnnnnnnnnnnnnnnnnnnnnnnnnnnnnnnnnnnnnnnnnnnnnnnnnnnnnnnnnnnnnnnnnnnnnnnnnnnnnnnnnnnnnnnnnnnnnnnnnnnnnnnnnnnnnnnnnnnnnnnnnnnnnnnnnnnnnnnnnnnnnnnnnnnnnnnnnnnnnnnnnnnnnnnnnnnnnnnnnnnnnnnnnnnnnnnnnnnnnnnnnnnnnnnnnnnnnnnnnnnnnnnnnnnnnnnnnnnnnnnnnnnnnnnnnnnnnnnnnnnnnnnnnnnnnnnnnnnnnnnnnnnnnnnnnnnnnnnnnnnnnnnnnnnnnnnnnnnnnnnnnnnnnnnnnnnnnnnnnnnnnnnnnnnnnnnnnnnnnnnnnnnnnnnnnnnnnnnnnnnnnnnnnnnnnnnnnnnnnnnnnnnnnnnnnnnnnnnnnnnnnnnnnnnnnnnnnnnnnnnnnnnnnnnnnnnnnnnnnnnnnnnnnnnnnnnnnnnnnnnnnnnnnnnnnnnnnnnnnnnnnnnnnnnnnnnnnnnnnnnnnnnnnnnnnnnnnnnnnnnnnnnnnnnnnnnnnnnnnnnnnnnnnnnnnnnnnnnnnnnnnnnnnnnnnnnnnnnnnnnnnnnnnnnnnnnnnnnnnnnnnnnnnnnnnnnnnnnnnnnnnnnnnnnnnnnnnnnnnnnnnnnnnnnnnnnnnnnnnnnnnnnnnnnnnnnnnnnnnnnnnnnnnnnnnnnnnnnnnnnnnnnnnnnnnnnnnnnnnnnnnnnnnnnnnnnnnnnnnnnnnnnnnnnnnnnnnnnnnnnnnnnnnnnnnnnnnnnnnnnnnnnnnnnnnnnnnnnnnnnnnnnnnnnnnnnnnnnnnnnnnnnnnnnnnnnnnnnnnnnnnnnnnnnnnnnnnnnnnnnnnnnnnnnnnnnnnnnnnnnnnnnnnnnnnnnnnnnnnnnnnnnnnnnnnnnnnnnnnnnnnnnnnnnnnnnnnnnnnnnnnnnnnnnnnnnnnnnnnnnnnnnnnnnnnnnnnnnnnnnnnnnnnnnnnnnnnnnnnnnnnnnnnnnnnnnnnnnnnnnnnnnnnnnnnnnnnnnnnnnnnnnnnnnnnnnnnnnnnnnnnnnnnnnnnnnnnnnnnnnnnnnnnnnnnnnnnnnnnnnnnnnnnnnnnnnnnnnnnnnnnnnnnnnnnnnnnnnnnnnnnnnnnnnnnnnnnnnnnnnnnnnnnnnnnnnnnnnnnnnnnnnnnnnnnnnnnnnnnnnnnnnnnnnnnnnnnnnnnnnnnnnnnnnnnnnnnnnnnnnnnnnnnnnnnnnnnnnnnnnnnnnnnnnnnnnnnnnnnnnnnnnnnnnnnnnnnnnnnnnnnnnnnnnnnnnnnnnnnnnnnnnnnnnnnnnnnnnnnnnnnnnnnnnnnnnnnnnnnnnnnnnnnnnnnnnnnnnnnnnnnnnnnnnnnnnnnnnnnnnnnnnnnnnnnnnnnnnnnnnnnnnnnnnnnnnnnnnnnnnnnnnnnnnnnnnnnnnnnnnnnnnnnnnnnnnnnnnnnnnnnnnnnnnnnnnnnnnnnnnnnnnnnnnnnnnnnnnnnnnnnnnnnnnnnnnnnnnnnnnnnnnnnnnnnnnnnnnnnnnnnnnnnnnnnnnnnnnnnnnnnnnnnnnnnnnnnnnnnnnnnnnnnnnnnnnnnnnnnnnnnnnnnnnnnnnnnnnnnnnnnnnnnnnnnnnnnnnnnnnnnnnnnnnnnnnnnnnnnnnnnnnnnnnnnnnnnnnnnnnnnnnnnnnnnnnnnnnnnnnnnnnnnnnnnnnnnnnnnnnnnnnnnnnnnnnnnnnnnnnnnnnnnnnnnnnnnnnnnnnnnnnnnnnnnnnnnnnnnnnnnnnnnnnnnnnnnnnnnnnnnnnnnnnnnnnnnnnnnnnnnnnnnnnnnnnnnnnnnnnnnnnnnnnnnnnnnnnnnnnnnnnnnnnnnnnnnnnnnnnnnnnnnnnnnnnnnnnnnnnnnnnnnnnnnnnnnnnnnnnnnnnnnnnnnnnnnnnnnnnnnnnnnnnnnnnnnnnnnnnnnnnnnnnnnnnnnnnnnnnnnnnnnnnnnnnnnnnnnnnnnnnnnnnnnnnnnnnnnnnnnnnnnnnnnnnnnnnnnnnnnnnnnnnnnnnnnnnnnnnnnnnnnnnnnnnnnnnnnnnnnnnnnnnnnnnnnnnnnnnnnnnnnnnnnnnnnnnnnnnnnnnnnnnnnnnnnnnnnnnnnnnnnnnnnnnnnnnnnnnnnnnnnnnnnnnnnnnnnnnnnnnnnnnnnnnnnnnnnnnnnnnnnnnnnnnnnnnnnnnnnnnnnnnnnnnnnnnnnnnnnnnnnnnnnnnnnnnnnnnnnnnnnnnnnnnnnnnnnnnnnnnnnnnnnnnnnnnnnnnnnnnnnnnnnnnnnnnnnnnnnnnnnnnnnnnnnnnnnnnnnnnnnnnnnnnnnnnnnnnnnnnnnnnnnnnnnnnnnnnnnnnnnnnnnnnnnnnnnnnnnnnnnnnnnnnnnnnnnnnnnnnnnnnnnnnnnnnnnnnnnnnnnnnnnnnnnnnnnnnnnnnnnnnnnnnnnnnnnnnnnnnnnnnnnnnnnnnnnnnnnnnnnnnnnnnnnnnnnnnnnnnnnnnnnnnnnnnnnnnnnnnnnnnnnnnnnnnnnnnnnnnnnnnnnnnnnnnnnnnnnnnnnnnnnnnnnnnnnnnnnnnnnnnnnnnnnnnnnnnnnnnnnnnnnnnnnnnnnnnnnnnnnnnnnnnnnnnnnnnnnnnnnnnnnnnnnnnnnnnnnnnnnnnnnnnnnnnnnnnnnnnnnnnnnnnnnnnnnnnnnnnnnnnnnnnnnnnnnnnnnnnnnnnnnnnnnnnnnnnnnnnnnnnnnnnnnnnnnnnnnnnnnnnnnnnnnnnnnnnnnnnnnnnnnnnnnnnnnnnnnnnnnnnnnnnnnnnnnnnnnnnnnnnnnnnnnnnnnnnnnnnnnnnnnnnnnnnnnnnnnnnnnnnnnnnnnnnnnnnnnnnnnnnnnnnnnnnnnnnnnnnnnnnnnnnnnnnnnnnnnnnnnnnnnnnnnnnnnnnnnnnnnnnnnnnnnnnnnnnnnnnnnnnnnnnnnnnnnnnnnnnnnnnnnnnnnnnnnnnnnnnnnnnnnnnnnnnnnnnnnnnnnnnnnnnnnnnnnnnnnnnnnnnnnnnnnnnnnnnnnnnnnnnnnnnnnnnnnnnnnnnnnnnnnnnnnnnnnnnnnnnnnnnnnnnnnnnnnnnnnnnnnnnnnnnnnnnnnnnnnnnnnnnnnnnnnnnnnnnnnnnnnnnnnnnnnnnnnnnnnnnnnnnnnnnnnnnnnnnnnnnnnnnnnnnnnnnnnnnnnnnnnnnnnnnnnnnnnnnnnnnnnnnnnnnnnnnnnnnnnnnnnnnnnnnnnnnnnnnnnnnnnnnnnnnnnnnnnnnnnnnnnnnnnnnnnnnnnnnnnnnnnnnnnnnnnnnnnnnnnnnnnnnnnnnnnnnnnnnnnnnnnnnnnnnnnnnnnnnnnnnnnnnnnnnnnnnnnnnnnnnnnnnnnnnnnnnnnnnnnnnnnnnnnnnnnnnnnnnnnnnnnnnnnnnnnnnnnnnnnnnnnnnnnnnnnnnnnnnnnnnnnnnnnnnnnnnnnnnnnnnnnnnnnnnnnnnnnnnnnnnnnnnnnnnnnnnnnnnnnnnnnnnnnnnnnnnnnnnnnnnnnnnnnnnnnnnnnnnnnnnnnnnnnnnnnnnnnnnnnnnnnnnnnnnnnnnnnnnnnnnnnnnnnnnnnnnnnnnnnnnnnnnnnnnnnnnnnnnnnnnnnnnnnnnnnnnnnnnnnnnnnnnnnnnnnnnnnnnnnnnnnnnnnnnnnnnnnnnnnnnnnnnnnnnnnnnnnnnnnnnnnnnnnnnnnnnnnnnnnnnnnnnnnnnnnnnnnnnnnnnnnnnnnnnnnnnnnnnnnnnnnnnnnnnnnnnnnnnnnnnnnnnnnnnnnnnnnnnnnnnnnnnnnnnnnnnnnnnnnnnnnnnnnnnnnnnnnnnnnnnnnnnnnnnnnnnnnnnnnnnnnnnnnnnnnnnnnnnnnnnnnnnnnnnnnnnnnnnnnnnnnnnnnnnnnnnnnnnnnnnnnnnnnnnnnnnnnnnnnnnnnnnnnnnnnnnnnnnnnnnnnnnnnnnnnnnnnnnnnnnnnnnnnnnnnnnnnnnnnnnnnnnnnnnnnnnnnnnnnnnnnnnnnnnnnnnnnnnnnnnnnnnnnnnnnnnnnnnnnnnnnnnnnnnnnnnnnnnnnnnnnnnnnnnnnnnnnnnnnnnnnnnnnnnnnnnnnnnnnnnnnnnnnnnnnnnnnnnnnnnnnnnnnnnnnnnnnnnnnnnnnnnnnnnnnnnnnnnnnnnnnnnnnnnnnnnnnnnnnnnnnnnnnnnnnnnnnnnnnnnnnnnnnnnnnnnnnnnnnnnnnnnnnnnnnnnnnnnnnnnnnnnnnnnnnnnnnnnnnnnnnnnnnnnnnnnnnnnnnnnnnnnnnnnnnnnnnnnnnnnnnnnnnnnnnnnnnnnnnnnnnnnnnnnnnnnnnnnnnnnnnnnnnnnnnnnnnnnnnnnnnnnnnnnnnnnnnnnnnnnnnnnnnnnnnnnnnnnnnnnnnnnnnnnnnnnnnnnnnnnnnnnnnnnnnnnnnnnnnnnnnnnnnnnnnnnnnnnnnnnnnnnnnnnnnnnnnnnnnnnnnnnnnnnnnnnnnnnnnnnnnnnnnnnnnnnnnnnnnnnnnnnnnnnnnnnnnnnnnnnnnnnnnnnnnnnnnnnnnnnnnnnnnnnnnnnnnnnnnnnnnnnnnnnnnnnnnnnnnnnnnnnnnnnnnnnnnnnnnnnnnnnnnnnnnnnnnnnnnnnnnnnnnnnnnnnnnnnnnnnnnnnnnnnnnnnnnnnnnnnnnnnnnnnnnnnnnnnnnnnnnnnnnnnnnnnnnnnnnnnnnnnnnnnnnnnnnnnnnnnnnnnnnnnnnnnnnnnnnnnnnnnnnnnnnnnnnnnnnnnnnnnnnnnnnnnnnnnnnnnnnnnnnnnnnnnnnnnnnnnnnnnnnnnnnnnnnnnnnnnnnnnnnnnnnnnnnnnnnnnnnnnnnnnnnnnnnnnnnnnnnnnnnnnnnnnnnnnnnnnnnnnnnnnnnnnnnnnnnnnnnnnnnnnnnnnnnnnnnnnnnnnnnnnnnnnnnnnnnnnnnnnnnnnnnnnnnnnnnnnnnnnnnnnnnnnnnnnnnnnnnnnnnnnnnnnnnnnnnnnnnnnnnnnnnnnnnnnnnnnnnnnnnnnnnnnnnnnnnnnnnnnnnnnnnnnnnnnnnnnnnnnnnnnnnnnnnnnnnnnnnnnnnnnnnnnnnnnnnnnnnnnnnnnnnnnnnnnnnnnnnnnnnnnnnnnnnnnnnnnnnnnnnnnnnnnnnnnnnnnnnnnnnnnnnnnnnnnnnnnnnnnnnnnnnnnnnnnnnnnnnnnnnnnnnnnnnnnnnnnnnnnnnnnnnnnnnnnnnnnnnnnnnnnnnnnnnnnnnnnnnnnnnnnnnnnnnnnnnnnnnnnnnnnnnnnnnnnnnnnnnnnnnnnnnnnnnnnnnnnnnnnnnnnnnnnnnnnnnnnnnnnnnnnnnnnnnnnnnnnnnnnnnnnnnnnnnnnnnnnnnnnnnnnnnnnnnnnnnnnnnnnnnnnnnnnnnnnnnnnnnnnnnnnnnnnnnnnnnnnnnnnnnnnnnnnnnnnnnnnnnnnnnnnnnnnnnnnnnnnnnnnnnnnnnnnnnnnnnnnnnnnnnnnnnnnnnnnnnnnnnnnnnnnnnnnnnnnnnnnnnnnnnnnnnnnnnnnnnnnnnnnnnnnnnnnnnnnnnnnnnnnnnnnnnnnnnnnnnnnnnnnnnnnnnnnnnnnnnnnnnnnnnnnnnnnnnnnnnnnnnnnnnnnnnnnnnnnnnnnnnnnnnnnnnnnnnnnnnnnnnnnnnnnnnnnnnnnnnnnnnnnnnnnnnnnnnnnnnnnnnnnnnnnnnnnnnnnnnnnnnnnnnnnnnnnnnnnnnnnnnnnnnnnnnnnnnnnnnnnnnnnnnnnnnnnnnnnnnnnnnnnnnnnnnnnnnnnnnnnnnnnnnnnnnnnnnnnnnnnnnnnnnnnnnnnnnnnnnnnnnnnnnnnnnnnnnnnnnnnnnnnnnnnnnnnnnnnnnnnnnnnnnnnnnnnnnnnnnnnnnnnnnnnnnnnnnnnnnnnnnnnnnnnnnnnnnnnnnnnnnnnnnnnnnnnnnnnnnnnnnnnnnnnnnnnnnnnnnnnnnnnnnnnnnnnnnnnnnnnnnnnnnnnnnnnnnnnnnnnnnnnnnnnnnnnnnnnnnnnnnnnnnnnnnnnnnnnnnnnnnnnnnnnnnnnnnnnnnnnnnnnnnnnnnnnnnnnnnnnnnnnnnnnnnnnnnnnnnnnnnnnnnnnnnnnnnnnnnnnnnnnnnnnnnnnnnnnnnnnnnnnnnnnnnnnnnnnnnnnnnnnnnnnnnnnnnnnnnnnnnnnnnnnnnnnnnnnnnnnnnnnnnnnnnnnnnnnnnnnnnnnnnnnnnnnnnnnnnnnnnnnnnnnnnnnnnnnnnnnnnnnnnnnnnnnnnnnnnnnnnnnnnnnnnnnnnnnnnnnnnnnnnnnnnnnnnnnnnnnnnnnnnnnnnnnnnnnnnnnnnnnnnnnnnnnnnnnnnnnnnnnnnnnnnnnnnnnnnnnnnnnnnnnnnnnnnnnnnnnnnnnnnnnnnnnnnnnnnnnnnnnnnnnnnnnnnnnnnnnnnnnnnnnnnnnnnnnnnnnnnnnnnnnnnnnnnnnnnnnnnnnnnnnnnnnnnnnnnnnnnnnnnnnnnnnnnnnnnnnnnnnnnnnnnnnnnnnnnnnnnnnnnnnnnnnnnnnnnnnnnnnnnnnnnnnnnnnnnnnnnnnnnnnnnnnnnnnnnnnnnnnnnnnnnnnnnnnnnnnnnnnnnnnnnnnnnnnnnnnnnnnnnnnnnnnnnnnnnnnnnnnnnnnnnnnnnnnnnnnnnnnnnnnnnnnnnnnnnnnnnnnnnnnnnnnnnnnnnnnnnnnnnnnnnnnnnnnnnnnnnnnnnnnnnnnnnnnnnnnnnnnnnnnnnnnnnnnnnnnnnnnnnnnnnnnnnnnnnnnnnnnnnnnnnnnnnnnnnnnnnnnnnnnnnnnnnnnnnnnnnnnnnnnnnnnnnnnnnnnnnnnnnnnnnnnnnnnnnnnnnnnnnnnnnnnnnnnnnnnnnnnnnnnnnnnnnnnnnnnnnnnnnnnnnnnnnnnnnnnnnnnnnnnnnnnnnnnnnnnnnnnnnnnnnnnnnnnnnnnnnnnnnnnnnnnnnnnnnnnnnnnnnnnnnnnnnnnnnnnnnnnnnnnnnnnnnnnnnnnnnnnnnnnnnnnnnnnnnnnnnnnnnnnnnnnnnnnnnnnnnnnnnnnnnnnnnnnnnnnnnnnnnnnnnnnnnnnnnnnnnnnnnnnnnnnnnnnnnnnnnnnnnnnnnnnnnnnnnnnnnnnnnnnnnnnnnnnnnnnnnnnnnnnnnnnnnnnnnnnnnnnnnnnnnnnnnnnnnnnnnnnnnnnnnnnnnnnnnnnnnnnnnnnnnnnnnnnnnnnnnnnnnnnnnnnnnnnnnnnnnnnnnnnnnnnnnnnnnnnnnnnnnnnnnnnnnnnnnnnnnnnnnnnnnnnnnnnnnnnnnnnnnnnnnnnnnnnnnnnnnnnnnnnnnnnnnnnnnnnnnnnnnnnnnnnnnnnnnnnnnnnnnnnnnnnnnnnnnnnnnnnnnnnnnnnnnnnnnnnnnnnnnnnnnnnnnnnnnnnnnnnnnnnnnnnnnnnnnnnnnnnnnnnnnnnnnnnnnnnnnnnnnnnnnnnnnnnnnnnnnnnnnnnnnnnnnnnnnnnnnnnnnnnnnnnnnnnnnnnnnnnnnnnnnnnnnnnnnnnnnnnnnnnnnnnnnnnnnnnnnnnnnnnnnnnnnnnnnnnnnnnnnnnnnnnnnnnnnnnnnnnnnnnnnnnnnnnnnnnnnnnnnnnnnnnnnnnnnnnnnnnnnnnnnnnnnnnnnnnnnnnnnnnnnnnnnnnnnnnnnnnnnnnnnnnnnnnnnnnnnnnnnnnnnnnnnnnnnnnnnnnnnnnnnnnnnnnnnnnnnnnnnnnnnnnnnnnnnnnnnnnnnnnnnnnnnnnnnnnnnnnnnnnnnnnnnnnnnnnnnnnnnnnnnnnnnnnnnnnnnnnnnnnnnnnnnnnnnnnnnnnnnnnnnnnnnnnnnnnnnnnnnnnnnnnnnnnnnnnnnnnnnnnnnnnnnnnnnnnnnnnnnnnnnnnnnnnnnnnnnnnnnnnnnnnnnnnnnnnnnnnnnnnnnnnnnnnnnnnnnnnnnnnnnnnnnnnnnnnnnnnnnnnnnnnnnnnnnnnnnnnnnnnnnnnnnnnnnnnnnnnnnnnnnnnnnnnnnnnnnnnnnnnnnnnnnnnnnnnnnnnnnnnnnnnnnnnnnnnnnnnnnnnnnnnnnnnnnnnnnnnnnnnnnnnnnnnnnnnnnnnnnnnnnnnnnnnnnnnnnnnnnnnnnnnnnnnnnnnnnnnnnnnnnnnnnnnnnnnnnnnnnnnnnnnnnnnnnnnnnnnnnnnnnnnnnnnnnnnnnnnnnnnnnnnnnnnnnnnnnnnnnnnnnnnnnnnnnnnnnnnnnnnnnnnnnnnnnnnnnnnnnnnnnnnnnnnnnnnnnnnnnnnnnnnnnnnnnnnnnnnnnnnnnnnnnnnnnnnnnnnnnnnnnnnnnnnnnnnnnnnnnnnnnnnnnnnnnnnnnnnnnnnnnnnnnnnnnnnnnnnnnnnnnnnnnnnnnnnnnnnnnnnnnnnnnnnnnnnnnnnnnnnnnnnnnnnnnnnnnnnnnnnnnnnnnnnnnnnnnnnnnnnnnnnnnnnnnnnnnnnnnnnnnnnnnnnnnnnnnnnnnnnnnnnnnnnnnnnnnnnnnnnnnnnnnnnnnnnnnnnnnnnnnnnnnnnnnnnnnnnnnnnnnnnnnnnnnnnnnnnnnnnnnnnnnnnnnnnnnnnnnnnnnnnnnnnnnnnnnnnnnnnnnnnnnnnnnnnnnnnnnnnnnnnnnnnnnnnnnnnnnnnnnnnnnnnnnnnnnnnnnnnnnnnnnnnnnnnnnnnnnnnnnnnnnnnnnnnnnnnnnnnnnnnnnnnnnnnnnnnnnnnnnnnnnnnnnnnnnnnnnnnnnnnnnnnnnnnnnnnnnnnnnnnnnnnnnnnnnnnnnnnnnnnnnnnnnnnnnnnnnnnnnnnnnnnnnnnnnnnnnnnnnnnnnnnnnnnnnnnnnnnnnnnnnnnnnnnnnnnnnnnnnnnnnnnnnnnnnnnnnnnnnnnnnnnnnnnnnnnnnnnnnnnnnnnnnnnnnnnnnnnnnnnnnnnnnnnnnnnnnnnnnnnnnnnnnnnnnnnnnnnnnnnnnnnnnnnnnnnnnnnnnnnnnnnnnnnnnnnnnnnnnnnnnnnnnnnnnnnnnnnnnnnnnnnnnnnnnnnnnnnnnnnnnnnnnnnnnnnnnnnnnnnnnnnnnnnnnnnnnnnnnnnnnnnnnnnnnnnnnnnnnnnnnnnnnnnnnnnnnnnnnnnnnnnnnnnnnnnnnnnnnnnnnnnnnnnnnnnnnnnnnnnnnnnnnnnnnnnnnnnnnnnnnnnnnnnnnnnnnnnnnnnnnnnnnnnnnnnnnnnnnnnnnnnnnnnnnnnnnnnnnnnnnnnnnnnnnnnnnnnnnnnnnnnnnnnnnnnnnnnnnnnnnnnnnnnnnnnnnnnnnnnnnnnnnnnnnnnnnnnnnnnnnnnnnnnnnnnnnnnnnnnnnnnnnnnnnnnnnnnnnnnnnnnnnnnnnnnnnnnnnnnnnnnnnnnnnnnnnnnnnnnnnnnnnnnnnnnnnnnnnnnnnnnnnnnnnnnnnnnnnnnnnnnnnnnnnnnnnnnnnnnnnnnnnnnnnnnnnnnnnnnnnnnnnnnnnnnnnnnnnnnnnnnnnnnnnnnnnnnnnnnnnnnnnnnnnnnnnnnnnnnnnnnnnnnnnnnnnnnnnnnnnnnnnnnnnnnnnnnnnnnnnnnnnnnnnnnnnnnnnnnnnnnnnnnnnnnnnnnnnnnnnnnnnnnnnnnnnnnnnnnnnnnnnnnnnnnnnnnnnnnnnnnnnnnnnnnnnnnnnnnnnnnnnnnnnnnnnnnnnnnnnnnnnnnnnnnnnnnnnnnnnnnnnnnnnnnnnnnnnnnnnnnnnnnnnnnnnnnnnnnnnnnnnnnnnnnnnnnnnnnnnnnnnnnnnnnnnnnnnnnnnnnnnnnnnnnnnnnnnnnnnnnnnnnnnnnnnnnnnnnnnnnnnnnnnnnnnnnnnnnnnnnnnnnnnnnnnnnnnnnnnnnnnnnnnnnnnnnnnnnnnnnnnnnnnnnnnnnnnnnnnnnnnnnnnnnnnnnnnnnnnnnnnnnnnnnnnnnnnnnnnnnnnnnnnnnnnnnnnnnnnnnnnnnnnnnnnnnnnnnnnnnnnnnnnnnnnnnnnnnnnnnnnnnnnnnnnnnnnnnnnnnnnnnnnnnnnnnnnnnnnnnnnnnnnnnnnnnnnnnnnnnnnnnnnnnnnnnnnnnnnnnnnnnnnnnnnnnnnnnnnnnnnnnnnnnnnnnnnnnnnnnnnnnnnnnnnnnnnnnnnnnnnnnnnnnnnnnnnnnnnnnnnnnnnnnnnnnnnnnnnnnnnnnnnnnnnnnnnnnnnnnnnnnnnnnnnnnnnnnnnnnnnnnnnnnnnnnnnnnnnnnnnnnnnnnnnnnnnnnnnnnnnnnnnnnnnnnnnnnnnnnnnnnnnnnnnnnnnnnnnnnnnnnnnnnnnnnnnnnnnnnnnnnnnnnnnnnnnnnnnnnnnnnnnnnnnnnnnnnnnnnnnnnnnnnnnnnnnnnnnnnnnnnnnnnnnnnnnnnnnnnnnnnnnnnnnnnnnnnnnnnnnnnnnnnnnnnnnnnnnnnnnnnnnnnnnnnnnnnnnnnnnnnnnnnnnnnnnnnnnnnnnnnnnnnnnnnnnnnnnnnnnnnnnnnnnnnnnnnnnnnnnnnnnnnnnnnnnnnnnnnnnnnnnnnnnnnnnnnnnnnnnnnnnnnnnnnnnnnnnnnnnnnnnnnnnnnnnnnnnnnnnnnnnnnnnnnnnnnnnnnnnnnnnnnnnnnnnnnnnnnnnnnnnnnnnnnnnnnnnnnnnnnnnnnnnnnnnnnnnnnnnnnnnnnnnnnnnnnnnnnnnnnnnnnnnnnnnnnnnnnnnnnnnnnnnnnnnnnnnnnnnnnnnnnnnnnnnnnnnnnnnnnnnnnnnnnnnnnnnnnnnnnnnnnnnnnnnnnnnnnnnnnnnnnnnnnnnnnnnnnnnnnnnnnnnnnnnnnnnnnnnnnnnnnnnnnnnnnnnnnnnnnnnnnnnnnnnnnnnnnnnnnnnnnnnnnnnnnnnnnnnnnnnnnnnnnnnnnnnnnnnnnnnnnnnnnnnnnnnnnnnnnnnnnnnnnnnnnnnnnnnnnnnnnnnnnnnnnnnnnnnnnnnnnnnnnnnnnnnnnnnnnnnnnnnnnnnnnnnnnnnnnnnnnnnnnnnnnnnnnnnnnnnnnnnnnnnnnnnnnnnnnnnnnnnnnnnnnnnnnnnnnnnnnnnnnnnnnnnnnnnnnnnnnnnnnnnnnnnnnnnnnnnnnnnnnnnnnnnnnnnnnnnnnnnnnnnnnnnnnnnnnnnnnnnnnnnnnnnnnnnnnnnnnnnnnnnnnnnnnnnnnnnnnnnnnnnnnnnnnnnnnnnnnnnnnnnnnnnnnnnnnnnnnnnnnnnnnnnnnnnnnnnnnnnnnnnnnnnnnnnnnnnnnnnnnnnnnnnnnnnnnnnnnnnnnnnnnnnnnnnnnnnnnnnnnnnnnnnnnnnnnnnnnnnnnnnnnnnnnnnnnnnnnnnnnnnnnnnnnnnnnnnnnnnnnnnnnnnnnnnnnnnnnnnnnnnnnnnnnnnnnnnnnnnnnnnnnnnnnnnnnnnnnnnnnnnnnnnnnnnnnnnnnnnnnnnnnnnnnnnnnnnnnnnnnnnnnnnnnnnnnnnnnnnnnnnnnnnnnnnnnnnnnnnnnnnnnnnnnnnnnnnnnnnnnnnnnnnnnnnnnnnnnnnnnnnnnnnnnnnnnnnnnnnnnnnnnnnnnnnnnnnnnnnnnnnnnnnnnnnnnnnnnnnnnnnnnnnnnnnnnnnnnnnnnnnnnnnnnnnnnnnnnnnnnnnnnnnnnnnnnnnnnnnnnnnnnnnnnnnnnnnnnnnnnnnnnnnnnnnnnnnnnnnnnnnnnnnnnnnnnnnnnnnnnnnnnnnnnnnnnnnnnnnnnnnnnnnnnnnnnnnnnnnnnnnnnnnnnnnnnnnnnnnnnnnnnnnnnnnnnnnnnnnnnnnnnnnnnnnnnnnnnnnnnnnnnnnnnnnnnnnnnnnnnnnnnnnnnnnnnnnnnnnnnnnnnnnnnnnnnnnnnnnnnnnnnnnnnnnnnnnnnnnnnnnnnnnnnnnnnnnnnnnnnnnnnnnnnnnnnnnnnnnnnnnnnnnnnnnnnnnnnnnnnnnnnnnnnnnnnnnnnnnnnnnnnnnnnnnnnnnnnnnnnnnnnnnnnnnnnnnnnnnnnnnnnnnnnnnnnnnnnnnnnnnnnnnnnnnnnnnnnnnnnnnnnnnnnnnnnnnnnnnnnnnnnnnnnnnnnnnnnnnnnnnnnnnnnnnnnnnnnnnnnnnnnnnnnnnnnnnnnnnnnnnnnnnnnnnnnnnnnnnnnnnnnnnnnnnnnnnnnnnnnnnnnnnnnnnnnnnnnnnnnnnnnnnnnnnnnnnnnnnnnnnnnnnnnnnnnnnnnnnnnnnnnnnnnnnnnnnnnnnnnnnnnnnnnnnnnnnnnnnnnnnnnnnnnnnnnnnnnnnnnnnnnnnnnnnnnnnnnnnnnnnnnnnnnnnnnnnnnnnnnnnnnnnnnnnnnnnnnnnnnnnnnnnnnnnnnnnnnnnnnnnnnnnnnnnnnnnnnnnnnnnnnnnnnnnnnnnnnnnnnnnnnnnnnnnnnnnnnnnnnnnnnnnnnnnnnnnnnnnnnnnnnnnnnnnnnnnnnnnnnnnnnnnnnnnnnnnnnnnnnnnnnnnnnnnnnnnnnnnnnnnnnnnnnnnnnnnnnnnnnnnnnnnnnnnnnnnnnnnnnnnnnnnnnnnnnnnnnnnnnnnnnnnnnnnnnnnnnnnnnnnnnnnnnnnnnnnnnnnnnnnnnnnnnnnnnnnnnnnnnnnnnnnnnnnnnnnnnnnnnnnnnnnnnnnnnnnnnnnnnnnnnnnnnnnnnnnnnnnnnnnnnnnnnnnnnnnnnnnnnnnnnnnnnnnnnnnnnnnnnnnnnnnnnnnnnnnnnnnnnnnnnnnnnnnnnnnnnnnnnnnnnnnnnnnnnnnnnnnnnnnnnnnnnnnnnnnnnnnnnnnnnnnnnnnnnnnnnnnnnnnnnnnnnnnnnnnnnnnnnnnnnnnnnnnnnnnnnnnnnnnnnnnnnnnnnnnnnnnnnnnnnnnnnnnnnnnnnnnnnnnnnnnnnnnnnnnnnnnnnnnnnnnnnnnnnnnnnnnnnnnnnnnnnnnnnnnnnnnnnnnnnnnnnnnnnnnnnnnnnnnnnnnnnnnnnnnnnnnnnnnnnnnnnnnnnnnnnnnnnnnnnnnnnnnnnnnnnnnnnnnnnnnnnnnnnnnnnnnnnnnnnnnnnnnnnnnnnnnnnnnnnnnnnnnnnnnnnnnnnnnnnnnnnnnnnnnnnnnnnnnnnnnnnnnnnnnnnnnnnnnnnnnnnnnnnnnnnnnnnnnnnnnnnnnnnnnnnnnnnnnnnnnnnnnnnnnnnnnnnnnnnnnnnnnnnnnnnnnnnnnnnnnnnnnnnnnnnnnnnnnnnnnnnnnnnnnnnnnnnnnnnnnnnnnnnnnnnnnnnnnnnnnnnnnnnnnnnnnnnnnnnnnnnnnnnnnnnnnnnnnnnnnnnnnnnnnnnnnnnnnnnnnnnnnnnnnnnnnnnnnnnnnnnnnnnnnnnnnnnnnnnnnnnnnnnnnnnnnnnnnnnnnnnnnnnnnnnnnnnnnnnnnnnnnnnnnnnnnnnnnnnnnnnnnnnnnnnnnnnnnnnnnnnnnnnnnnnnnnnnnnnnnnnnnnnnnnnnnnnnnnnnnnnnnnnnnnnnnnnnnnnnnnnnnnnnnnnnnnnnnnnnnnnnnnnnnnnnnnnnnnnnnnnnnnnnnnnnnnnnnnnnnnnnnnnnnnnnnnnnnnnnnnnnnnnnnnnnnnnnnnnnnnnnnnnnnnnnnnnnnnnnnnnnnnnnnnnnnnnnnnnnnnnnnnnnnnnnnnnnnnnnnnnnnnnnnnnnnnnnnnnnnnnnnnnnnnnnnnnnnnnnnnnnnnnnnnnnnnnnnnnnnnnnnnnnnnnnnnnnnnnnnnnnnnnnnnnnnnnnnnnnnnnnnnnnnnnnnnnnnnnnnnnnnnnnnnnnnnnnnnnnnnnnnnnnnnnnnnnnnnnnnnnnnnnnnnnnnnnnnnnnnnnnnnnnnnnnnnnnnnnnnnnnnnnnnnnnnnnnnnnnnnnnnnnnnnnnnnnnnnnnnnnnnnnnnnnnnnnnnnnnnnnnnnnnnnnnnnnnnnnnnnnnnnnnnnnnnnnnnnnnnnnnnnnnnnnnnnnnnnnnnnnnnnnnnnnnnnnnnnnnnnnnnnnnnnnnnnnnnnnnnnnnnnnnnnnnnnnnnnnnnnnnnnnnnnnnnnnnnnnnnnnnnnnnnnnnnnnnnnnnnnnnnnnnnnnnnnnnnnnnnnnnnnnnnnnnnnnnnnnnnnnnnnnnnnnnnnnnnnnnnnnnnnnnnnnnnnnnnnnnnnnnnnnnnnnnnnnnnnnnnnnnnnnnnnnnnnnnnnnnnnnnnnnnnnnnnnnnnnnnnnnnnnnnnnnnnnnnnnnnnnnnnnnnnnnnnnnnnnnnnnnnnnnnnnnnnnnnnnnnnnnnnnnnnnnnnnnnnnnnnnnnnnnnnnnnnnnnnnnnnnnnnnnnnnnnnnnnnnnnnnnnnnnnnnnnnnnnnnnnnnnnnnnnnnnnnnnnnnnnnnnnnnnnnnnnnnnnnnnnnnnnnnnnnnnnnnnnnnnnnnnnnnnnnnnnnnnnnnnnnnnnnnnnnnnnnnnnnnnnnnnnnnnnnnnnnnnnnnnnnnnnnnnnnnnnnnnnnnnnnnnnnnnnnnnnnnnnnnnnnnnnnnnnnnnnnnnnnnnnnnnnnnnnnnnnnnnnnnnnnnnnnnnnnnnnnnnnnnnnnnnnnnnnnnnnnnnnnnnnnnnnnnnnnnnnnnnnnnnnnnnnnnnnnnnnnnnnnnnnnnnnnnnnnnnnnnnnnnnnnnnnnnnnnnnnnnnnnnnnnnnnnnnnnnnnnnnnnnnnnnnnnnnnnnnnnnnnnnnnnnnnnnnnnnnnnnnnnnnnnnnnnnnnnnnnnnnnnnnnnnnnnnnnnnnnnnnnnnnnnnnnnnnnnnnnnnnnnnnnnnnnnnnnnnnnnnnnnnnnnnnnnnnnnnnnnnnnnnnnnnnnnnnnnnnnnnnnnnnnnnnnnnnnnnnnnnnnnnnnnnnnnnnnnnnnnnnnnnnnnnnnnnnnnnnnnnnnnnnnnnnnnnnnnnnnnnnnnnnnnnnnnnnnnnnnnnnnnnnnnnnnnnnnnnnnnnnnnnnnnnnnnnnnnnnnnnnnnnnnnnnnnnnnnnnnnnnnnnnnnnnnnnnnnnnnnnnnnnnnnnnnnnnnnnnnnnnnnnnnnnnnnnnnnnnnnnnnnnnnnnnnnnnnnnnnnnnnnnnnnnnnnnnnnnnnnnnnnnnnnnnnnnnnnnnnnnnnnnnnnnnnnnnnnnnnnnnnnnnnnnnnnnnnnnnnnnnnnnnnnnnnnnnnnnnnnnnnnnnnnnnnnnnnnnnnnnnnnnnnnnnnnnnnnnnnnnnnnnnnnnnnnnnnnnnnnnnnnnnnnnnnnnnnnnnnnnnnnnnnnnnnnnnnnnnnnnnnnnnnnnnnnnnnnnnnnnnnnnnnnnnnnnnnnnnnnnnnnnnnnnnnnnnnnnnnnnnnnnnnnnnnnnnnnnnnnnnnnnnnnnnnnnnnnnnnnnnnnnnnnnnnnnnnnnnnnnnnnnnnnnnnnnnnnnnnnnnnnnnnnnnnnnnnnnnnnnnnnnnnnnnnnnnnnnnnnnnnnnnnnnnnnnnnnnnnnnnnnnnnnnnnnnnnnnnnnnnnnnnnnnnnnnnnnnnnnnnnnnnnnnnnnnnnnnnnnnnnnnnnnnnnnnnnnnnnnnnnnnnnnnnnnnnnnnnnnnnnnnnnnnnnnnnnnnnnnnnnnnnnnnnnnnnnnnnnnnnnnnnnnnnnnnnnnnnnnnnnnnnnnnnnnnnnnnnnnnnnnnnnnnnnnnnnnnnnnnnnnnnnnnnnnnnnnnnnnnnnnnnnnnnnnnnnnnnnnnnnnnnnnnnnnnnnnnnnnnnnnnnnnnnnnnnnnnnnnnnnnnnnnnnnnnnnnnnnnnnnnnnnnnnnnnnnnnnnnnnnnnnnnnnnnnnnnnnnnnnnnnnnnnnnnnnnnnnnnnnnnnnnnnnnnnnnnnnnnnnnnnnnnnnnnnnnnnnnnnnnnnnnnnnnnnnnnnnnnnnnnnnnnnnnnnnnnnnnnnnnnnnnnnnnnnnnnnnnnnnnnnnnnnnnnnnnnnnnnnnnnnnnnnnnnnnnnnnnnnnnnnnnnnnnnnnnnnnnnnnnnnnnnnnnnnnnnnnnnnnnnnnnnnnnnnnnnnnnnnnnnnnnnnnnnnnnnnnnnnnnnnnnnnnnnnnnnnnnnnnnnnnnnnnnnnnnnnnnnnnnnnnnnnnnnnnnnnnnnnnnnnnnnnnnnnnnnnnnnnnnnnnnnnnnnnnnnnnnnnnnnnnnnnnnnnnnnnnnnnnnnnnnnnnnnnnnnnnnnnnnnnnnnnnnnnnnnnnnnnnnnnnnnnnnnnnnnnnnnnnnnnnnnnnnnnnnnnnnnnnnnnnnnnnnnnnnnnnnnnnnnnnnnnnnnnnnnnnnnnnnnnnnnnnnnnnnnnnnnnnnnnnnnnnnnnnnnnnnnnnnnnnnnnnnnnnnnnnnnnnnnnnnnnnnnnnnnnnnnnnnnnnnnnnnnnnnnnnnnnnnnnnnnnnnnnnnnnnnnnnnnnnnnnnnnnnnnnnnnnnnnnnnnnnnnnnnnnnnnnnnnnnnnnnnnnnnnnnnnnnnnnnnnnnnnnnnnnnnnnnnnnnnnnnnnnnnnnnnnnnnnnnnnnnnnnnnnnnnnnnnnnnnnnnnnnnnnnnnnnnnnnnnnnnnnnnnnnnnnnnnnnnnnnnnnnnnnnnnnnnnnnnnnnnnnnnnnnnnnnnnnnnnnnnnnnnnnnnnnnnnnnnnnnnnnnnnnnnnnnnnnnnnnnnnnnnnnnnnnnnnnnnnnnnnnnnnnnnnnnnnnnnnnnnnnnnnnnnnnnnnnnnnnnnnnnnnnnnnnnnnnnnnnnnnnnnnnnnnnnnnnnnnnnnnnnnnnnnnnnnnnnnnnnnnnnnnnnnnnnnnnnnnnnnnnnnnnnnnnnnnnnnnnnnnnnnnnnnnnnnnnnnnnnnnnnnnnnnnnnnnnnnnnnnnnnnnnnnnnnnnnnnnnnnnnnnnnnnnnnnnnnnnnnnnnnnnnnnnnnnnnnnnnnnnnnnnnnnnnnnnnnnnnnnnnnnnnnnnnnnnnnnnnnnnnnnnnnnnnnnnnnnnnnnnnnnnnnnnnnnnnnnnnnnnnnnnnnnnnnnnnnnnnnnnnnnnnnnnnnnnnnnnnnnnnnnnnnnnnnnnnnnnnnnnnnnnnnnnnnnnnnnnnnnnnnnnnnnnnnnnnnnnnnnnnnnnnnnnnnnnnnnnnnnnnnnnnnnnnnnnnnnnnnnnnnnnnnnnnnnnnnnnnnnnnnnnnnnnnnnnnnnnnnnnnnnnnnnnnnnnnnnnnnnnnnnnnnnnnnnnnnnnnnnnnnnnnnnnnnnnnnnnnnnnnnnnnnnnnnnnnnnnnnnnnnnnnnnnnnnnnnnnnnnnnnnnnnnnnnnnnnnnnnnnnnnnnnnnnnnnnnnnnnnnnnnnnnnnnnnnnnnnnnnnnnnnnnnnnnnnnnnnnnnnnnnnnnnnnnnnnnnnnnnnnnnnnnnnnnnnnnnnnnnnnnnnnnnnnnnnnnnnnnnnnnnnnnnnnnnnnnnnnnnnnnnnnnnnnnnnnnnnnnnnnnnnnnnnnnnnnnnnnnnnnnnnnnnnnnnnnnnnnnnnnnnnnnnnnnnnnnnnnnnnnnnnnnnnnnnnnnnnnnnnnnnnnnnnnnnnnnnnnnnnnnnnnnnnnnnnnnnnnnnnnnnnnnnnnnnnnnnnnnnnnnnnnnnnnnnnnnnnnnnnnnnnnnnnnnnnnnnnnnnnnnnnnnnnnnnnnnnnnnnnnnnnnnnnnnnnnnnnnnnnnnnnnnnnnnnnnnnnnnnnnnnnnnnnnnnnnnnnnnnnnnnnnnnnnnnnnnnnnnnnnnnnnnnnnnnnnnnnnnnnnnnnnnnnnnnnnnnnnnnnnnnnnnnnnnnnnnnnnnnnnnnnnnnnnnnnnnnnnnnnnnnnnnnnnnnnnnnnnnnnnnnnnnnnnnnnnnnnnnnnnnnnnnnnnnnnnnnnnnnnnnnnnnnnnnnnnnnnnnnnnnnnnnnnnnnnnnnnnnnnnnnnnnnnnnnnnnnnnnnnnnnnnnnnnnnnnnnnnnnnnnnnnnnnnnnnnnnnnnnnnnnnnnnnnnnnnnnnnnnnnnnnnnnnnnnnnnnnnnnnnnnnnnnnnnnnnnnnnnnnnnnnnnnnnnnnnnnnnnnnnnnnnnnnnnnnnnnnnnnnnnnnnnnnnnnnnnnnnnnnnnnnnnnnnnnnnnnnnnnnnnnnnnnnnnnnnnnnnnnnnnnnnnnnnnnnnnnnnnnnnnnnnnnnnnnnnnnnnnnnnnnnnnnnnnnnnnnnnnnnnnnnnnnnnnnnnnnnnnnnnnnnnnnnnnnnnnnnnnnnnnnnnnnnnnnnnnnnnnnnnnnnnnnnnnnnnnnnnnnnnnnnnnnnnnnnnnnnnnnnnnnnnnnnnnnnnnnnnnnnnnnnnnnnnnnnnnnnnnnnnnnnnnnnnnnnnnnnnnnnnnnnnnnnnnnnnnnnnnnnnnnnnnnnnnnnnnnnnnnnnnnnnnnnnnnnnnnnnnnnnnnnnnnnnnnnnnnnnnnnnnnnnnnnnnnnnnnnnnnnnnnnnnnnnnnnnnnnnnnnnnnnnnnnnnnnnnnnnnnnnnnnnnnnnnnnnnnnnnnnnnnnnnnnnnnnnnnnnnnnnnnnnnnnnnnnnnnnnnnnnnnnnnnnnnnnnnnnnnnnnnnnnnnnnnnnnnnnnnnnnnnnnnnnnnnnnnnnnnnnnnnnnnnnnnnnnnnnnnnnnnnnnnnnnnnnnnnnnnnnnnnnnnnnnnnnnnnnnnnnnnnnnnnnnnnnnnnnnnnnnnnnnnnnnnnnnnnnnnnnnnnnnnnnnnnnnnnnnnnnnnnnnnnnnnnnnnnnnnnnnnnnnnnnnnnnnnnnnnnnnnnnnnnnnnnnnnnnnnnnnnnnnnnnnnnnnnnnnnnnnnnnnnnnnnnnnnnnnnnnnnnnnnnnnnnnnnnnnnnnnnnnnnnnnnnnnnnnnnnnnnnnnnnnnnnnnnnnnnnnnnnnnnnnnnnnnnnnnnnnnnnnnnnnnnnnnnnnnnnnnnnnnnnnnnnnnnnnnnnnnnnnnnnnnnnnnnnnnnnnnnnnnnnnnnnnnnnnnnnnnnnnnnnnnnnnnnnnnnnnnnnnnnnnnnnnnnnnnnnnnnnnnnnnnnnnnnnnnnnnnnnnnnnnnnnnnnnnnnnnnnnnnnnnnnnnnnnnnnnnnnnnnnnnnnnnnnnnnnnnnnnnnnnnnnnnnnnnnnnnnnnnnnnnnnnnnnnnnnnnnnnnnnnnnnnnnnnnnnnnnnnnnnnnnnnnnnnnnnnnnnnnnnnnnnnnnnnnnnnnnnnnnnnnnnnnnnnnnnnnnnnnnnnnnnnnnnnnnnnnnnnnnnnnnnnnnnnnnnnnnnnnnnnnnnnnnnnnnnnnnnnnnnnnnnnnnnnnnnnnnnnnnnnnnnnnnnnnnnnnnnnnnnnnnnnnnnnnnnnnnnnnnnnnnnnnnnnnnnnnnnnnnnnnnnnnnnnnnnnnnnnnnnnnnnnnnnnnnnnnnnnnnnnnnnnnnnnnnnnnnnnnnnnnnnnnnnnnnnnnnnnnnnnnnnnnnnnnnnnnnnnnnnnnnnnnnnnnnnnnnnnnnnnnnnnnnnnnnnnnnnnnnnnnnnnnnnnnnnnnnnnnnnnnnnnnnnnnnnnnnnnnnnnnnnnnnnnnnnnnnnnnnnnnnnnnnnnnnnnnnnnnnnnnnnnnnnnnnnnnnnnnnnnnnnnnnnnnnnnnnnnnnnnnnnnnnnnnnnnnnnnnnnnnnnnnnnnnnnnnnnnnnnnnnnnnnnnnnnnnnnnnnnnnnnnnnnnnnnnnnnnnnnnnnnnnnnnnnnnnnnnnnnnnnnnnnnnnnnnnnnnnnnnnnnnnnnnnnnnnnnnnnnnnnnnnnnnnnnnnnnnnnnnnnnnnnnnnnnnnnnnnnnnnnnnnnnnnnnnnnnnnnnnnnnnnnnnnnnnnnnnnnnnnnnnnnnnnnnnnnnnnnnnnnnnnnnnnnnnnnnnnnnnnnnnnnnnnnnnnnnnnnnnnnnnnnnnnnnnnnnnnnnnnnnnnnnnnnnnnnnnnnnnnnnnnnnnnnnnnnnnnnnnnnnnnnnnnnnnnnnnnnnnnnnnnnnnnnnnnnnnnnnnnnnnnnnnnnnnnnnnnnnnnnnnnnnnnnnnnnnnnnnnnnnnnnnnnnnnnnnnnnnnnnnnnnnnnnnnnnnnnnnnnnnnnnnnnnnnnnnnnnnnnnnnnnnnnnnnnnnnnnnnnnnnnnnnnnnnnnnnnnnnnnnnnnnnnnnnnnnnnnnnnnnnnnnnnnnnnnnnnnnnnnnnnnnnnnnnnnnnnnnnnnnnnnnnnnnnnnnnnnnnnnnnnnnnnnnnnnnnnnnnnnnnnnnnnnnnnnnnnnnnnnnnnnnnnnnnnnnnnnnnnnnnnnnnnnnnnnnnnnnnnnnnnnnnnnnnnnnnnnnnnnnnnnnnnnnnnnnnnnnnnnnnnnnnnnnnnnnnnnnnnnnnnnnnnnnnnnnnnnnnnnnnnnnnnnnnnnnnnnnnnnnnnnnnnnnnnnnnnnnnnnnnnnnnnnnnnnnnnnnnnnnnnnnnnnnnnnnnnnnnnnnnnnnnnnnnnnnnnnnnnnnnnnnnnnnnnnnnnnnnnnnnnnnnnnnnnnnnnnnnnnnnnnnnnnnnnnnnnnnnnnnnnnnnnnnnnnnnnnnnnnnnnnnnnnnnnnnnnnnnnnnnnnnnnnnnnnnnnnnnnnnnnnnnnnnnnnnnnnnnnnnnnnnnnnnnnnnnnnnnnnnnnnnnnnnnnnnnnnnnnnnnnnnnnnnnnnnnnnnnnnnnnnnnnnnnnnnnnnnnnnnnnnnnnnnnnnnnnnnnnnnnnnnnnnnnnnnnnnnnnnnnnnnnnnnnnnnnnnnnnnnnnnnnnnnnnnnnnnnnnnnnnnnnnnnnnnnnnnnnnnnnnnnnnnnnnnnnnnnnnnnnnnnnnnnnnnnnnnnnnnnnnnnnnnnnnnnnnnnnnnnnnnnnnnnnnnnnnnnnnnnnnnnnnnnnnnnnnnnnnnnnnnnnnnnnnnnnnnnnnnnnnnnnnnnnnnnnnnnnnnnnnnnnnnnnnnnnnnnnnnnnnnnnnnnnnnnnnnnnnnnnnnnnnnnnnnnnnnnnnnnnnnnnnnnnnnnnnnnnnnnnnnnnnnnnnnnnnnnnnnnnnnnnnnnnnnnnnnnnnnnnnnnnnnnnnnnnnnnnnnnnnnnnnnnnnnnnnnnnnnnnnnnnnnnnnnnnnnnnnnnnnnnnnnnnnnnnnnnnnnnnnnnnnnnnnnnnnnnnnnnnnnnnnnnnnnnnnnnnnnnnnnnnnnnnnnnnnnnnnnnnnnnnnnnnnnnnnnnnnnnnnnnnnnnnnnnnnnnnnnnnnnnnnnnnnnnnnnnnnnnnnnnnnnnnnnnnnnnnnnnnnnnnnnnnnnnnnnnnnnnnnnnnnnnnnnnnnnnnnnnnnnnnnnnnnnnnnnnnnnnnnnnnnnnnnnnnnnnnnnnnnnnnnnnnnnnnnnnnnnnnnnnnnnnnnnnnnnnnnnnnnnnnnnnnnnnnnnnnnnnnnnnnnnnnnnnnnnnnnnnnnnnnnnnnnnnnnnnnnnnnnnnnnnnnnnnnnnnnnnnnnnnnnnnnnnnnnnnnnnnnnnnnnnnnnnnnnnnnnnnnnnnnnnnnnnnnnnnnnnnnnnnnnnnnnnnnnnnnnnnnnnnnnnnnnnnnnnnnnnnnnnnnnnnnnnnnnnnnnnnnnnnnnnnnnnnnnnnnnnnnnnnnnnnnnnnnnnnnnnnnnnnnnnnnnnnnnnnnnnnnnnnnnnnnnnnnnnnnnnnnnnnnnnnnnnnnnnnnnnnnnnnnnnnnnnnnnnnnnnnnnnnnnnnnnnnnnnnnnnnnnnnnnnnnnnnnnnnnnnnnnnnnnnnnnnnnnnnnnnnnnnnnnnnnnnnnnnnnnnnnnnnnnnnnnnnnnnnnnnnnnnnnnnnnnnnnnnnnnnnnnnnnnnnnnnnnnnnnnnnnnnnnnnnnnnnnnnnnnnnnnnnnnnnnnnnnnnnnnnnnnnnnnnnnnnnnnnnnnnnnnnnnnnnnnnnnnnnnnnnnnnnnnnnnnnnnnnnnnnnnnnnnnnnnnnnnnnnnnnnnnnnnnnnnnnnnnnnnnnnnnnnnnnnnnnnnnnnnnnnnnnnnnnnnnnnnnnnnnnnnnnnnnnnnnnnnnnnnnnnnnnnnnnnnnnnnnnnnnnnnnnnnnnnnnnnnnnnnnnnnnnnnnnnnnnnnnnnnnnnnnnnnnnnnnnnnnnnnnnnnnnnnnnnnnnnnnnnnnnnnnnnnnnnnnnnnnnnnnnnnnnnnnnnnnnnnnnnnnnnnnnnnnnnnnnnnnnnnnnnnnnnnnnnnnnnnnnnnnnnnnnnnnnnnnnnnnnnnnnnnnnnnnnnnnnnnnnnnnnnnnnnnnnnnnnnnnnnnnnnnnnnnnnnnnnnnnnnnnnnnnnnnnnnnnnnnnnnnnnnnnnnnnnnnnnnnnnnnnnnnnnnnnnnnnnnnnnnnnnnnnnnnnnnnnnnnnnnnnnnnnnnnnnnnnnnnnnnnnnnnnnnnnnnnnnnnnnnnnnnnnnnnnnnnnnnnnnnnnnnnnnnnnnnnnnnnnnnnnnnnnnnnnnnnnnnnnnnnnnnnnnnnnnnnnnnnnnnnnnnnnnnnnnnnnnnnnnnnnnnnnnnnnnnnnnnnnnnnnnnnnnnnnnnnnnnnnnnnnnnnnnnnnnnnnnnnnnnnnnnnnnnnnnnnnnnnnnnnnnnnnnnnnnnnnnnnnnnnnnnnnnnnnnnnnnnnnnnnnnnnnnnnnnnnnnnnnnnnnnnnnnnnnnnnnnnnnnnnnnnnnnnnnnnnnnnnnnnnnnnnnnnnnnnnnnnnnnnnnnnnnnnnnnnnnnnnnnnnnnnnnnnnnnnnnnnnnnnnnnnnnnnnnnnnnnnnnnnnnnnnnnnnnnnnnnnnnnnnnnnnnnnnnnnnnnnnnnnnnnnnnnnnnnnnnnnnnnnnnnnnnnnnnnnnnnnnnnnnnnnnnnnnnnnnnnnnnnnnnnnnnnnnnnnnnnnnnnnnnnnnnnnnnnnnnnnnnnnnnnnnnnnnnnnnnnnnnnnnnnnnnnnnnnnnnnnnnnnnnnnnnnnnnnnnnnnnnnnnnnnnnnnnnnnnnnnnnnnnnnnnnnnnnnnnnnnnnnnnnnnnnnnnnnnnnnnnnnnnnnnnnnnnnnnnnnnnnnnnnnnnnnnnnnnnnnnnnnnnnnnnnnnnnnnnnnnnnnnnnnnnnnnnnnnnnnnnnnnnnnnnnnnnnnnnnnnnnnnnnnnnnnnnnnnnnnnnnnnnnnnnnnnnnnnnnnnnnnnnnnnnnnnnnnnnnnnnnnnnnnnnnnnnnnnnnnnnnnnnnnnnnnnnnnnnnnnnnnnnnnnnnnnnnnnnnnnnnnnnnnnnnnnnnnnnnnnnnnnnnnnnnnnnnnnnnnnnnnnnnnnnnnnnnnnnnnnnnnnnnnnnnnnnnnnnnnnnnnnnnnnnnnnnnnnnnnnnnnnnnnnnnnnnnnnnnnnnnnnnnnnnnnnnnnnnnnnnnnnnnnnnnnnnnnnnnnnnnnnnnnnnnnnnnnnnnnnnnnnnnnnnnnnnnnnnnnnnnnnnnnnnnnnnnnnnnnnnnnnnnnnnnnnnnnnnnnnnnnnnnnnnnnnnnnnnnnnnnnnnnnnnnnnnnnnnnnnnnnnnnnnnnnnnnnnnnnnnnnnnnnnnnnnnnnnnnnnnnnnnnnnnnnnnnnnnnnnnnnnnnnnnnnnnnnnnnnnnnnnnnnnnnnnnnnnnnnnnnnnnnnnnnnnnnnnnnnnnnnnnnnnnnnnnnnnnnnnnnnnnnnnnnnnnnnnnnnnnnnnnnnnnnnnnnnnnnnnnnnnnnnnnnnnnnnnnnnnnnnnnnnnnnnnnnnnnnnnnnnnnnnnnnnnnnnnnnnnnnnnnnnnnnnnnnnnnnnnnnnnnnnnnnnnnnnnnnnnnnnnnnnnnnnnnnnnnnnnnnnnnnnnnnnnnnnnnnnnnnnnnnnnnnnnnnnnnnnnnnnnnnnnnnnnnnnnnnnnnnnnnnnnnnnnnnnnnnnnnnnnnnnnnnnnnnnnnnnnnnnnnnnnnnnnnnnnnnnnnnnnnnnnnnnnnnnnnnnnnnnnnnnnnnnnnnnnnnnnnnnnnnnnnnnnnnnnnnnnnnnnnnnnnnnnnnnnnnnnnnnnnnnnnnnnnnnnnnnnnnnnnnnnnnnnnnnnnnnnnnnnnnnnnnnnnnnnnnnnnnnnnnnnnnnnnnnnnnnnnnnnnnnnnnnnnnnnnnnnnnnnnnnnnnnnnnnnnnnnnnnnnnnnnnnnnnnnnnnnnnnnnnnnnnnnnnnnnnnnnnnnnnnnnnnnnnnnnnnnnnnnnnnnnnnnnnnnnnnnnnnnnnnnnnnnnnnnnnnnnnnnnnnnnnnnnnnnnnnnnnnnnnnnnnnnnnnnnnnnnnnnnnnnnnnnnnnnnnnnnnnnnnnnnnnnnnnnnnnnnnnnnnnnnnnnnnnnnnnnnnnnnnnnnnnnnnnnnnnnnnnnnnnnnnnnnnnnnnnnnnnnnnnnnnnnnnnnnnnnnnnnnnnnnnnnnnnnnnnnnnnnnnnnnnnnnnnnnnnnnnnnnnnnnnnnnnnnnnnnnnnnnnnnnnnnnnnnnnnnnnnnnnnnnnnnnnnnnnnnnnnnnnnnnnnnnnnnnnnnnnnnnnnnnnnnnnnnnnnnnnnnnnnnnnnnnnnnnnnnnnnnnnnnnnnnnnnnnnnnnnnnnnnnnnnnnnnnnnnnnnnnnnnnnnnnnnnnnnnnnnnnnnnnnnnnnnnnnnnnnnnnnnnnnnnnnnnnnnnnnnnnnnnnnnnnnnnnnnnnnnnnnnnnnnnnnnnnnnnnnnnnnnnnnnnnnnnnnnnnnnnnnnnnnnnnnnnnnnnnnnnnnnnnnnnnnnnnnnnnnnnnnnnnnnnnnnnnnnnnnnnnnnnnnnnnnnnnnnnnnnnnnnnnnnnnnnnnnnnnnnnnnnnnnnnnnnnnnnnnnnnnnnnnnnnnnnnnnnnnnnnnnnnnnnnnnnnnnnnnnnnnnnnnnnnnnnnnnnnnnnnnnnnnnnnnnnnnnnnnnnnnnnnnnnnnnnnnnnnnnnnnnnnnnnnnnnnnnnnnnnnnnnnnnnnnnnnnnnnnnnnnnnnnnnnnnnnnnnnnnnnnnnnnnnnnnnnnnnnnnnnnnnnnnnnnnnnnnnnnnnnnnnnnnnnnnnnnnnnnnnnnnnnnnnnnnnnnnnnnnnnnnnnnnnnnnnnnnnnnnnnnnnnnnnnnnnnnnnnnnnnnnnnnnnnnnnnnnnnnnnnnnnnnnnnnnnnnnnnnnnnnnnnnnnnnnnnnnnnnnnnnnnnnnnnnnnnnnnnnnnnnnnnnnnnnnnnnnnnnnnnnnnnnnnnnnnnnnnnnnnnnnnnnnnnnnnnnnnnnnnnnnnnnnnnnnnnnnnnnnnnnnnnnnnnnnnnnnnnnnnnnnnnnnnnnnnnnnnnnnnnnnnnnnnnnnnnnnnnnnnnnnnnnnnnnnnnnnnnnnnnnnnnnnnnnnnnnnnnnnnnnnnnnnnnnnnnnnnnnnnnnnnnnnnnnnnnnnnnnnnnnnnnnnnnnnnnnnnnnnnnnnnnnnnnnnnnnnnnnnnnnnnnnnnnnnnnnnnnnnnnnnnnnnnnnnnnnnnnnnnnnnnnnnnnnnnnnnnnnnnnnnnnnnnnnnnnnnnnnnnnnnnnnnnnnnnnnnnnnnnnnnnnnnnnnnnnnnnnnnnnnnnnnnnnnnnnnnnnnnnnnnnnnnnnnnnnnnnnnnnnnnnnnnnnnnnnnnnnnnnnnnnnnnnnnnnnnnnnnnnnnnnnnnnnnnnnnnnnnnnnnnnnnnnnnnnnnnnnnnnnnnnnnnnnnnnnnnnnnnnnnnnnnnnnnnnnnnnnnnnnnnnnnnnnnnnnnnnnnnnnnnnnnnnnnnnnnnnnnnnnnnnnnnnnnnnnnnnnnnnnnnnnnnnnnnnnnnnnnnnnnnnnnnnnnnnnnnnnnnnnnnnnnnnnnnnnnnnnnnnnnnnnnnnnnnnnnnnnnnnnnnnnnnnnnnnnnnnnnnnnnnnnnnnnnnnnnnnnnnnnnnnnnnnnnnnnnnnnnnnnnnnnnnnnnnnnnnnnnnnnnnnnnnnnnnnnnnnnnnnnnnnnnnnnnnnnnnnnnnnnnnnnnnnnnnnnnnnnnnnnnnnnnnnnnnnnnnnnnnnnnnnnnnnnnnnnnnnnnnnnnnnnnnnnnnnnnnnnnnnnnnnnnnnnnnnnnnnnnnnnnnnnnnnnnnnnnnnnnnnnnnnnnnnnnnnnnnnnnnnnnnnnnnnnnnnnnnnnnnnnnnnnnnnnnnnnnnnnnnnnnnnnnnnnnnnnnnnnnnnnnnnnnnnnnnnnnnnnnnnnnnnnnnnnnnnnnnnnnnnnnnnnnnnnnnnnnnnnnnnnnnnnnnnnnnnnnnnnnnnnnnnnnnnnnnnnnnnnnnnnnnnnnnnnnnnnnnnnnnnnnnnnnnnnnnnnnnnnnnnnnnnnnnnnnnnnnnnnnnnnnnnnnnnnnnnnnnnnnnnnnnnnnnnnnnnnnnnnnnnnnnnnnnnnnnnnnnnnnnnnnnnnnnnnnnnnnnnnnnnnnnnnnnnnnnnnnnnnnnnnnnnnnnnnnnnnnnnnnnnnnnnnnnnnnnnnnnnnnnnnnnnnnnnnnnnnnnnnnnnnnnnnnnnnnnnnnnnnnnnnnnnnnnnnnnnnnnnnnnnnnnnnnnnnnnnnnnnnnnnnnnnnnnnnnnnnnnnnnnnnnnnnnnnnnnnnnnnnnnnnnnnnnnnnnnnnnnnnnnnnnnnnnnnnnnnnnnnnnnnnnnnnnnnnnnnnnnnnnnnnnnnnnnnnnnnnnnnnnnnnnnnnnnnnnnnnnnnnnnnnnnnnnnnnnnnnnnnnnnnnnnnnnnnnnnnnnnnnnnnnnnnnnnnnnnnnnnnnnnnnnnnnnnnnnnnnnnnnnnnnnnnnnnnnnnnnnnnnnnnnnnnnnnnnnnnnnnnnnnnnnnnnnnnnnnnnnnnnnnnnnnnnnnnnnnnnnnnnnnnnnnnnnnnnnnnnnnnnnnnnnnnnnnnnnnnnnnnnnnnnnnnnnnnnnnnnnnnnnnnnnnnnnnnnnnnnnnnnnnnnnnnnnnnnnnnnnnnnnnnnnnnnnnnnnnnnnnnnnnnnnnnnnnnnnnnnnnnnnnnnnnnnnnnnnnnnnnnnnnnnnnnnnnnnnnnnnnnnnnnnnnnnnnnnnnnnnnnnnnnnnnnnnnnnnnnnnnnnnnnnnnnnnnnnnnnnnnnnnnnnnnnnnnnnnnnnnnnnnnnnnnnnnnnnnnnnnnnnnnnnnnnnnnnnnnnnnnnnnnnnnnnnnnnnnnnnnnnnnnnnnnnnnnnnnnnnnnnnnnnnnnnnnnnnnnnnnnnnnnnnnnnnnnnnnnnnnnnnnnnnnnnnnnnnnnnnnnnnnnnnnnnnnnnnnnnnnnnnnnnnnnnnnnnnnnnnnnnnnnnnnnnnnnnnnnnnnnnnnnnnnnnnnnnnnnnnnnnnnnnnnnnnnnnnnnnnnnnnnnnnnnnnnnnnnnnnnnnnnnnnnnnnnnnnnnnnnnnnnnnnnnnnnnnnnnnnnnnnnnnnnnnnnnnnnnnnnnnnnnnnnnnnnnnnnnnnnnnnnnnnnnnnnnnnnnnnnnnnnnnnnnnnnnnnnnnnnnnnnnnnnnnnnnnnnnnnnnnnnnnnnnnnnnnnnnnnnnnnnnnnnnnnnnnnnnnnnnnnnnnnnnnnnnnnnnnnnnnnnnnnnnnnnnnnnnnnnnnnnnnnnnnnnnnnnnnnnnnnnnnnnnnnnnnnnnnnnnnnnnnnnnnnnnnnnnnnnnnnnnnnnnnnnnnnnnnnnnnnnnnnnnnnnnnnnnnnnnnnnnnnnnnnnnnnnnnnnnnnnnnnnnnnnnnnnnnnnnnnnnnnnnnnnnnnnnnnnnnnnnnnnnnnnnnnnnnnnnnnnnnnnnnnnnnnnnnnnnnnnnnnnnnnnnnnnnnnnnnnnnnnnnnnnnnnnnnnnnnnnnnnnnnnnnnnnnnnnnnnnnnnnnnnnnnnnnnnnnnnnnnnnnnnnnnnnnnnnnnnnnnnnnnnnnnnnnnnnnnnnnnnnnnnnnnnnnnnnnnnnnnnnnnnnnnnnnnnnnnnnnnnnnnnnnnnnnnnnnnnnnnnnnnnnnnnnnnnnnnnnnnnnnnnnnnnnnnnnnnnnnnnnnnnnnnnnnnnnnnnnnnnnnnnnnnnnnnnnnnnnnnnnnnnnnnnnnnnnnnnnnnnnnnnnnnnnnnnnnnnnnnnnnnnnnnnnnnnnnnnnnnnnnnnnnnnnnnnnnnnnnnnnnnnnnnnnnnnnnnnnnnnnnnnnnnnnnnnnnnnnnnnnnnnnnnnnnnnnnnnnnnnnnnnnnnnnnnnnnnnnnnnnnnnnnnnnnnnnnnnnnnnnnnnnnnnnnnnnnnnnnnnnnnnnnnnnnnnnnnnnnnnnnnnnnnnnnnnnnnnnnnnnnnnnnnnnnnnnnnnnnnnnnnnnnnnnnnnnnnnnnnnnnnnnnnnnnnnnnnnnnnnnnnnnnnnnnnnnnnnnnnnnnnnnnnnnnnnnnnnnnnnnnnnnnnnnnnnnnnnnnnnnnnnnnnnnnnnnnnnnnnnnnnnnnnnnnnnnnnnnnnnnnnnnnnnnnnnnnnnnnnnnnnnnnnnnnnnnnnnnnnnnnnnnnnnnnnnnnnnnnnnnnnnnnnnnnnnnnnnnnnnnnnnnnnnnnnnnnnnnnnnnnnnnnnnnnnnnnnnnnnnnnnnnnnnnnnnnnnnnnnnnnnnnnnnnnnnnnnnnnnnnnnnnnnnnnnnnnnnnnnnnnnnnnnnnnnnnnnnnnnnnnnnnnnnnnnnnnnnnnnnnnnnnnnnnnnnnnnnnnnnnnnnnnnnnnnnnnnnnnnnnnnnnnnnnnnnnnnnnnnnnnnnnnnnnnnnnnnnnnnnnnnnnnnnnnnnnnnnnnnnnnnnnnnnnnnnnnnnnnnnnnnnnnnnnnnnnnnnnnnnnnnnnnnnnnnnnnnnnnnnnnnnnnnnnnnnnnnnnnnnnnnnnnnnnnnnnnnnnnnnnnnnnnnnnnnnnnnnnnnnnnnnnnnnnnnnnnnnnnnnnnnnnnnnnnnnnnnnnnnnnnnnnnnnnnnnnnnnnnnnnnnnnnnnnnnnnnnnnnnnnnnnnnnnnnnnnnnnnnnnnnnnnnnnnnnnnnnnnnnnnnnnnnnnnnnnnnnnnnnnnnnnnnnnnnnnnnnnnnnnnnnnnnnnnnnnnnnnnnnnnnnnnnnnnnnnnnnnnnnnnnnnnnnnnnnnnnnnnnnnnnnnnnnnnnnnnnnnnnnnnnnnnnnnnnnnnnnnnnnnnnnnnnnnnnnnnnnnnnnnnnnnnnnnnnnnnnnnnnnnnnnnnnnnnnnnnnnnnnnnnnnnnnnnnnnnnnnnnnnnnnnnnnnnnnnnnnnnnnnnnnnnnnnnnnnnnnnnnnnnnnnnnnnnnnnnnnnnnnnnnnnnnnnnnnnnnnnnnnnnnnnnnnnnnnnnnnnnnnnnnnnnnnnnnnnnnnnnnnnnnnnnnnnnnnnnnnnnnnnnnnnnnnnnnnnnnnnnnnnnnnnnnnnnnnnnnnnnnnnnnnnnnnnnnnnnnnnnnnnnnnnnnnnnnnnnnnnnnnnnnnnnnnnnnnnnnnnnnnnnnnnnnnnnnnnnnnnnnnnnnnnnnnnnnnnnnnnnnnnnnnnnnnnnnnnnnnnnnnnnnnnnnnnnnnnnnnnnnnnnnnnnnnnnnnnnnnnnnnnnnnnnnnnnnnnnnnnnnnnnnnnnnnnnnnnnnnnnnnnnnnnnnnnnnnnnnnnnnnnnnnnnnnnnnnnnnnnnnnnnnnnnnnnnnnnnnnnnnnnnnnnnnnnnnnnnnnnnnnnnnnnnnnnnnnnnnnnnnnnnnnnnnnnnnnnnnnnnnnnnnnnnnnnnnnnnnnnnnnnnnnnnnnnnnnnnnnnnnnnnnnnnnnnnnnnnnnnnnnnnnnnnnnnnnnnnnnnnnnnnnnnnnnnnnnnnnnnnnnnnnnnnnnnnnnnnnnnnnnnnnnnnnnnnnnnnnnnnnnnnnnnnnnnnnnnnnnnnnnnnnnnnnnnnnnnnnnnnnnnnnnnnnnnnnnnnnnnnnnnnnnnnnnnnnnnnnnnnnnnnnnnnnnnnnnnnnnnnnnnnnnnnnnnnnnnnnnnnnnnnnnnnnnnnnnnnnnnnnnnnnnnnnnnnnnnnnnnnnnnnnnnnnnnnnnnnnnnnnnnnnnnnnnnnnnnnnnnnnnnnnnnnnnnnnnnnnnnnnnnnnnnnnnnnnnnnnnnnnnnnnnnnnnnnnnnnnnnnnnnnnnnnnnnnnnnnnnnnnnnnnnnnnnnnnnnnnnnnnnnnnnnnnnnnnnnnnnnnnnnnnnnnnnnnnnnnnnnnnnnnnnnnnnnnnnnnnnnnnnnnnnnnnnnnnnnnnnnnnnnnnnnnnnnnnnnnnnnnnnnnnnnnnnnnnnnnnnnnnnnnnnnnnnnnnnnnnnnnnnnnnnnnnnnnnnnnnnnnnnnnnnnnnnnnnnnnnnnnnnnnnnnnnnnnnnnnnnnnnnnnnnnnnnnnnnnnnnnnnnnnnnnnnnnnnnnnnnnnnnnnnnnnnnnnnnnnnnnnnnnnnnnnnnnnnnnnnnnnnnnnnnnnnnnnnnnnnnnnnnnnnnnnnnnnnnnnnnnnnnnnnnnnnnnnnnnnnnnnnnnnnnnnnnnnnnnnnnnnnnnnnnnnnnnnnnnnnnnnnnnnnnnnnnnnnnnnnnnnnnnnnnnnnnnnnnnnnnnnnnnnnnnnnnnnnnnnnnnnnnnnnnnnnnnnnnnnnnnnnnnnnnnnnnnnnnnnnnnnnnnnnnnnnnnnnnnnnnnnnnnnnnnnnnnnnnnnnnnnnnnnnnnnnnnnnnnnnnnnnnnnnnnnnnnnnnnnnnnnnnnnnnnnnnnnnnnnnnnnnnnnnnnnnnnnnnnnnnnnnnnnnnnnnnnnnnnnnnnnnnnnnnnnnnnnnnnnnnnnnnnnnnnnnnnnnnnnnnnnnnnnnnnnnnnnnnnnnnnnnnnnnnnnnnnnnnnnnnnnnnnnnnnnnnnnnnnnnnnnnnnnnnnnnnnnnnnnnnnnnnnnnnnnnnnnnnnnnnnnnnnnnnnnnnnnnnnnnnnnnnnnnnnnnnnnnnnnnnnnnnnnnnnnnnnnnnnnnnnnnnnnnnnnnnnnnnnnnnnnnnnnnnnnnnnnnnnnnnnnnnnnnnnnnnnnnnnnnnnnnnnnnnnnnnnnnnnnnnnnnnnnnnnnnnnnnnnnnnnnnnnnnnnnnnnnnnnnnnnnnnnnnnnnnnnnnnnnnnnnnnnnnnnnnnnnnnnnnnnnnnnnnnnnnnnnnnnnnnnnnnnnnnnnnnnnnnnnnnnnnnnnnnnnnnnnnnnnnnnnnnnnnnnnnnnnnnnnnnnnnnnnnnnnnnnnnnnnnnnnnnnnnnnnnnnnnnnnnnnnnnnnnnnnnnnnnnnnnnnnnnnnnnnnnnnnnnnnnnnnnnnnnnnnnnnnnnnnnnnnnnnnnnnnnnnnnnnnnnnnnnnnnnnnnnnnnnnnnnnnnnnnnnnnnnnnnnnnnnnnnnnnnnnnnnnnnnnnnnnnnnnnnnnnnnnnnnnnnnnnnnnnnnnnnnnnnnnnnnnnnnnnnnnnnnnnnnnnnnnnnnnnnnnnnnnnnnnnnnnnnnnnnnnnnnnnnnnnnnnnnnnnnnnnnnnnnnnnnnnnnnnnnnnnnnnnnnnnnnnnnnnnnnnnnnnnnnnnnnnnnnnnnnnnnnnnnnnnnnnnnnnnnnnnnnnnnnnnnnnnnnnnnnnnnnnnnnnnnnnnnnnnnnnnnnnnnnnnnnnnnnnnnnnnnnnnnnnnnnnnnnnnnnnnnnnnnnnnnnnnnnnnnnnnnnnnnnnnnnnnnnnnnnnnnnnnnnnnnnnnnnnnnnnnnnnnnnnnnnnnnnnnnnnnnnnnnnnnnnnnnnnnnnnnnnnnnnnnnnnnnnnnnnnnnnnnnnnnnnnnnnnnnnnnnnnnnnnnnnnnnnnnnnnnnnnnnnnnnnnnnnnnnnnnnnnnnnnnnnnnnnnnnnnnnnnnnnnnnnnnnnnnnnnnnnnnnnnnnnnnnnnnnnnnnnnnnnnnnnnnnnnnnnnnnnnnnnnnnnnnnnnnnnnnnnnnnnnnnnnnnnnnnnnnnnnnnnnnnnnnnnnnnnnnnnnnnnnnnnnnnnnnnnnnnnnnnnnnnnnnnnnnnnnnnnnnnnnnnnnnnnnnnnnnnnnnnnnnnnnnnnnnnnnnnnnnnnnnnnnnnnnnnnnnnnnnnnnnnnnnnnnnnnnnnnnnnnnnnnnnnnnnnnnnnnnnnnnnnnnnnnnnnnnnnnnnnnnnnnnnnnnnnnnnnnnnnnnnnnnnnnnnnnnnnnnnnnnnnnnnnnnnnnnnnnnnnnnnnnnnnnnnnnnnnnnnnnnnnnnnnnnnnnnnnnnnnnnnnnnnnnnnnnnnnnnnnnnnnnnnnnnnnnnnnnnnnnnnnnnnnnnnnnnnnnnnnnnnnnnnnnnnnnnnnnnnnnnnnnnnnnnnnnnnnnnnnnnnnnnnnnnnnnnnnnnnnnnnnnnnnnnnnnnnnnnnnnnnnnnnnnnnnnnnnnnnnnnnnnnnnnnnnnnnnnnnnnnnnnnnnnnnnnnnnnnnnnnnnnnnnnnnnnnnnnnnnnnnnnnnnnnnnnnnnnnnnnnnnnnnnnnnnnnnnnnnnnnnnnnnnnnnnnnnnnnnnnnnnnnnnnnnnnnnnnnnnnnnnnnnnnnnnnnnnnnnnnnnnnnnnnnnnnnnnnnnnnnnnnnnnnnnnnnnnnnnnnnnnnnnnnnnnnnnnnnnnnnnnnnnnnnnnnnnnnnnnnnnnnnnnnnnnnnnnnnnnnnnnnnnnnnnnnnnnnnnnnnnnnnnnnnnnnnnnnnnnnnnnnnnnnnnnnnnnnnnnnnnnnnnnnnnnnnnnnnnnnnnnnnnnnnnnnnnnnnnnnnnnnnnnnnnnnnnnnnnnnnnnnnnnnnnnnnnnnnnnnnnnnnnnnnnnnnnnnnnnnnnnnnnnnnnnnnnnnnnnnnnnnnnnnnnnnnnnnnnnnnnnnnnnnnnnnnnnnnnnnnnnnnnnnnnnnnnnnnnnnnnnnnnnnnnnnnnnnnnnnnnnnnnnnnnnnnnnnnnnnnnnnnnnnnnnnnnnnnnnnnnnnnnnnnnnnnnnnnnnnnnnnnnnnnnnnnnnnnnnnnnnnnnnnnnnnnnnnnnnnnnnnnnnnnnnnnnnnnnnnnnnnnnnnnnnnnnnnnnnnnnnnnnnnnnnnnnnnnnnnnnnnnnnnnnnnnnnnnnnnnnnnnnnnnnnnnnnnnnnnnnnnnnnnnnnnnnnnnnnnnnnnnnnnnnnnnnnnnnnnnnnnnnnnnnnnnnnnnnnnnnnnnnnnnnnnnnnnnnnnnnnnnnnnnnnnnnnnnnnnnnnnnnnnnnnnnnnnnnnnnnnnnnnnnnnnnnnnnnnnnnnnnnnnnnnnnnnnnnnnnnnnnnnnnnnnnnnnnnnnnnnnnnnnnnnnnnnnnnnnnnnnnnnnnnnnnnnnnnnnnnnnnnnnnnnnnnnnnnnnnnnnnnnnnnnnnnnnnnnnnnnnnnnnnnnnnnnnnnnnnnnnnnnnnnnnnnnnnnnnnnnnnnnnnnnnnnnnnnnnnnnnnnnnnnnnnnnnnnnnnnnnnnnnnnnnnnnnnnnnnnnnnnnnnnnnnnnnnnnnnnnnnnnnnnnnnnnnnnnnnnnnnnnnnnnnnnnnnnnnnnnnnnnnnnnnnnnnnnnnnnnnnnnnnnnnnnnnnnnnnnnnnnnnnnnnnnnnnnnnnnnnnnnnnnnnnnnnnnnnnnnnnnnnnnnnnnnnnnnnnnnnnnnnnnnnnnnnnnnnnnnnnnnnnnnnnnnnnnnnnnnnnnnnnnnnnnnnnnnnnnnnnnnnnnnnnnnnnnnnnnnnnnnnnnnnnnnnnnnnnnnnnnnnnnnnnnnnnnnnnnnnnnnnnnnnnnnnnnnnnnnnnnnnnnnnnnnnnnnnnnnnnnnnnnnnnnnnnnnnnnnnnnnnnnnnnnnnnnnnnnnnnnnnnnnnnnnnnnnnnnnnnnnnnnnnnnnnnnnnnnnnnnnnnnnnnnnnnnnnnnnnnnnnnnnnnnnnnnnnnnnnnnnnnnnnnnnnnnnnnnnnnnnnnnnnnnnnnnnnnnnnnnnnnnnnnnnnnnnnnnnnnnnnnnnnnnnnnnnnnnnnnnnnnnnnnnnnnnnnnnnnnnnnnnnnnnnnnnnnnnnnnnnnnnnnnnnnnnnnnnnnnnnnnnnnnnnnnnnnnnnnnnnnnnnnnnnnnnnnnnnnnnnnnnnnnnnnnnnnnnnnnnnnnnnnnnnnnnnnnnnnnnnnnnnnnnnnnnnnnnnnnnnnnnnnnnnnnnnnnnnnnnnnnnnnnnnnnnnnnnnnnnnnnnnnnnnnnnnnnnnnnnnnnnnnnnnnnnnnnnnnnnnnnnnnnnnnnnnnnnnnnnnnnnnnnnnnnnnnnnnnnnnnnnnnnnnnnnnnnnnnnnnnnnnnnnnnnnnnnnnnnnnnnnnnnnnnnnnnnnnnnnnnnnnnnnnnnnnnnnnnnnnnnnnnnnnnnnnnnnnnnnnnnnnnnnnnnnnnnnnnnnnnnnnnnnnnnnnnnnnnnnnnnnnnnnnnnnnnnnnnnnnnnnnnnnnnnnnnnnnnnnnnnnnnnnnnnnnnnnnnnnnnnnnnnnnnnnnnnnnnnnnnnnnnnnnnnnnnnnnnnnnnnnnnnnnnnnnnnnnnnnnnnnnnnnnnnnnnnnnnnnnnnnnnnnnnnnnnnnnnnnnnnnnnnnnnnnnnnnnnnnnnnnnnnnnnnnnnnnnnnnnnnnnnnnnnnnnnnnnnnnnnnnnnnnnnnnnnnnnnnnnnnnnnnnnnnnnnnnnnnnnnnnnnnnnnnnnnnnnnnnnnnnnnnnnnnnnnnnnnnnnnnnnnnnnnnnnnnnnnnnnnnnnnnnnnnnnnnnnnnnnnnnnnnnnnnnnnnnnnnnnnnnnnnnnnnnnnnnnnnnnnnnnnnnnnnnnnnnnnnnnnnnnnnnnnnnnnnnnnnnnnnnnnnnnnnnnnnnnnnnnnnnnnnnnnnnnnnnnnnnnnnnnnnnnnnnnnnnnnnnnnnnnnnnnnnnnnnnnnnnnnnnnnnnnnnnnnnnnnnnnnnnnnnnnnnnnnnnnnnnnnnnnnnnnnnnnnnnnnnnnnnnnnnnnnnnnnnnnnnnnnnnnnnnnnnnnnnnnnnnnnnnnnnnnnnnnnnnnnnnnnnnnnnnnnnnnnnnnnnnnnnnnnnnnnnnnnnnnnnnnnnnnnnnnnnnnnnnnnnnnnnnnnnnnnnnnnnnnnnnnnnnnnnnnnnnnnnnnnnnnnnnnnnnnnnnnnnnnnnnnnnnnnnnnnnnnnnnnnnnnnnnnnnnnnnnnnnnnnnnnnnnnnnnnnnnnnnnnnnnnnnnnnnnnnnnnnnnnnnnnnnnnnnnnnnnnnnnnnnnnnnnnnnnnnnnnnnnnnnnnnnnnnnnnnnnnnnnnnnnnnnnnnnnnnnnnnnnnnnnnnnnnnnnnnnnnnnnnnnnnnnnnnnnnnnnnnnnnnnnnnnnnnnnnnnnnnnnnnnnnnnnnnnnnnnnnnnnnnnnnnnnnnnnnnnnnnnnnnnnnnnnnnnnnnnnnnnnnnnnnnnnnnnnnnnnnnnnnnnnnnnnnnnnnnnnnnnnnnnnnnnnnnnnnnnnnnnnnnnnnnnnnnnnnnnnnnnnnnnnnnnnnnnnnnnnnnnnnnnnnnnnnnnnnnnnnnnnnnnnnnnnnnnnnnnnnnnnnnnnnnnnnnnnnnnnnnnnnnnnnnnnnnnnnnnnnnnnnnnnnnnnnnnnnnnnnnnnnnnnnnnnnnnnnnnnnnnnnnnnnnnnnnnnnnnnnnnnnnnnnnnnnnnnnnnnnnnnnnnnnnnnnnnnnnnnnnnnnnnnnnnnnnnnnnnnnnnnnnnnnnnnnnnnnnnnnnnnnnnnnnnnnnnnnnnnnnnnnnnnnnnnnnnnnnnnnnnnnnnnnnnnnnnnnnnnnnnnnnnnnnnnnnnnnnnnnnnnnnnnnnnnnnnnnnnnnnnnnnnnnnnnnnnnnnnnnnnnnnnnnnnnnnnnnnnnnnnnnnnnnnnnnnnnnnnnnnnnnnnnnnnnnnnnnnnnnnnnnnnnnnnnnnnnnnnnnnnnnnnnnnnnnnnnnnnnnnnnnnnnnnnnnnnnnnnnnnnnnnnnnnnnnnnnnnnnnnnnnnnnnnnnnnnnnnnnnnnnnnnnnnnnnnnnnnnnnnnnnnnnnnnnnnnnnnnnnnnnnnnnnnnnnnnnnnnnnnnnnnnnnnnnnnnnnnnnnnnnnnnnnnnnnnnnnnnnnnnnnnnnnnnnnnnnnnnnnnnnnnnnnnnnnnnnnnnnnnnnnnnnnnnnnnnnnnnnnnnnnnnnnnnnnnnnnnnnnnnnnnnnnnnnnnnnnnnnnnnnnnnnnnnnnnnnnnnnnnnnnnnnnnnnnnnnnnnnnnnnnnnnnnnnnnnnnnnnnnnnnnnnnnnnnnnnnnnnnnnnnnnnnnnnnnnnnnnnnnnnnnnnnnnnnnnnnnnnnnnnnnnnnnnnnnnnnnnnnnnnnnnnnnnnnnnnnnnnnnnnnnnnnnnnnnnnnnnnnnnnnnnnnnnnnnnnnnnnnnnnnnnnnnnnnnnnnnnnnnnnnnnnnnnnnnnnnnnnnnnnnnnnnnnnnnnnnnnnnnnnnnnnnnnnnnnnnnnnnnnnnnnnnnnnnnnnnnnnnnnnnnnnnnnnnnnnnnnnnnnnnnnnnnnnnnnnnnnnnnnnnnnnnnnnnnnnnnnnnnnnnnnnnnnnnnnnnnnnnnnnnnnnnnnnnnnnnnnnnnnnnnnnnnnnnnnnnnnnnnnnnnnnnnnnnnnnnnnnnnnnnnnnnnnnnnnnnnnnnnnnnnnnnnnnnnnnnnnnnnnnnnnnnnnnnnnnnnnnnnnnnnnnnnnnnnnnnnnnnnnnnnnnnnnnnnnnnnnnnnnnnnnnnnnnnnnnnnnnnnnnnnnnnnnnnnnnnnnnnnnnnnnnnnnnnnnnnnnnnnnnnnnnnnnnnnnnnnnnnnnnnnnnnnnnnnnnnnnnnnnnnnnnnnnnnnnnnnnnnnnnnnnnnnnnnnnnnnnnnnnnnnnnnnnnnnnnnnnnnnnnnnnnnnnnnnnnnnnnnnnnnnnnnnnnnnnnnnnnnnnnnnnnnnnnnnnnnnnnnnnnnnnnnnnnnnnnnnnnnnnnnnnnnnnnnnnnnnnnnnnnnnnnnnnnnnnnnnnnnnnnnnnnnnnnnnnnnnnnnnnnnnnnnnnnnnnnnnnnnnnnnnnnnnnnnnnnnnnnnnnnnnnnnnnnnnnnnnnnnnnnnnnnnnnnnnnnnnnnnnnnnnnnnnnnnnnnnnnnnnnnnnnnnnnnnnnnnnnnnnnnnnnnnnnnnnnnnnnnnnnnnnnnnnnnnnnnnnnnnnnnnnnnnnnnnnnnnnnnnnnnnnnnnnnnnnnnnnnnnnnnnnnnnnnnnnnnnnnnnnnnnnnnnnnnnnnnnnnnnnnnnnnnnnnnnnnnnnnnnnnnnnnnnnnnnnnnnnnnnnnnnnnnnnnnnnnnnnnnnnnnnnnnnnnnnnnnnnnnnnnnnnnnnnnnnnnnnnnnnnnnnnnnnnnnnnnnnnnnnnnnnnnnnnnnnnnnnnnnnnnnnnnnnnnnnnnnnnnnnnnnnnnnnnnnnnnnnnnnnnnnnnnnnnnnnnnnnnnnnnnnnnnnnnnnnnnnnnnnnnnnnnnnnnnnnnnnnnnnnnnnnnnnnnnnnnnnnnnnnnnnnnnnnnnnnnnnnnnnnnnnnnnnnnnnnnnnnnnnnnnnnnnnnnnnnnnnnnnnnnnnnnnnnnnnnnnnnnnnnnnnnnnnnnnnnnnnnnnnnnnnnnnnnnnnnnnnnnnnnnnnnnnnnnnnnnnnnnnnnnnnnnnnnnnnnnnnnnnnnnnnnnnnnnnnnnnnnnnnnnnnnnnnnnnnnnnnnnnnnnnnnnnnnnnnnnnnnnnnnnnnnnnnnnnnnnnnnnnnnnnnnnnnnnnnnnnnnnnnnnnnnnnnnnnnnnnnnnnnnnnnnnnnnnnnnnnnnnnnnnnnnnnnnnnnnnnnnnnnnnnnnnnnnnnnnnnnnnnnnnnnnnnnnnnnnnnnnnnnnnnnnnnnnnnnnnnnnnnnnnnnnnnnnnnnnnnnnnnnnnnnnnnnnnnnnnnnnnnnnnnnnnnnnnnnnnnnnnnnnnnnnnnnnnnnnnnnnnnnnnnnnnnnnnnnnnnnnnnnnnnnnnnnnnnnnnnnnnnnnnnnnnnnnnnnnnnnnnnnnnnnnnnnnnnnnnnnnnnnnnnnnnnnnnnnnnnnnnnnnnnnnnnnnnnnnnnnnnnnnnnnnnnnnnnnnnnnnnnnnnnnnnnnnnnnnnnnnnnnnnnnnnnnnnnnnnnnnnnnnnnnnnnnnnnnnnnnnnnnnnnnnnnnnnnnnnnnnnnnnnnnnnnnnnnnnnnnnnnnnnnnnnnnnnnnnnnnnnnnnnnnnnnnnnnnnnnnnnnnnnnnnnnnnnnnnnnnnnnnnnnnnnnnnnnnnnnnnnnnnnnnnnnnnnnnnnnnnnnnnnnnnnnnnnnnnnnnnnnnnnnnnnnnnnnnnnnnnnnnnnnnnnnnnnnnnnnnnnnnnnnnnnnnnnnnnnnnnnnnnnnnnnnnnnnnnnnnnnnnnnnnnnnnnnnnnnnnnnnnnnnnnnnnnnnnnnnnnnnnnnnnnnnnnnnnnnnnnnnnnnnnnnnnnnnnnnnnnnnnnnnnnnnnnnnnnnnnnnnnnnnnnnnnnnnnnnnnnnnnnnnnnnnnnnnnnnnnnnnnnnnnnnnnnnnnnnnnnnnnnnnnnnnnnnnnnnnnnnnnnnnnnnnnnnnnnnnnnnnnnnnnnnnnnnnnnnnnnnnnnnnnnnnnnnnnnnnnnnnnnnnnnnnnnnnnnnnnnnnnnnnnnnnnnnnnnnnnnnnnnnnnnnnnnnnnnnnnnnnnnnnnnnnnnnnnnnnnnnnnnnnnnnnnnnnnnnnnnnnnnnnnnnnnnnnnnnnnnnnnnnnnnnnnnnnnnnnnnnnnnnnnnnnnnnnnnnnnnnnnnnnnnnnnnnnnnnnnnnnnnnnnnnnnnnnnnnnnnnnnnnnnnnnnnnnnnnnnnnnnnnnnnnnnnnnnnnnnnnnnnnnnnnnnnnnnnnnnnnnnnnnnnnnnnnnnnnnnnnnnnnnnnnnnnnnnnnnnnnnnnnnnnnnnnnnnnnnnnnnnnnnnnnnnnnnnnnnnnnnnnnnnnnnnnnnnnnnnnnnnnnnnnnnnnnnnnnnnnnnnnnnnnnnnnnnnnnnnnnnnnnnnnnnnnnnnnnnnnnnnnnnnnnnnnnnnnnnnnnnnnnnnnnnnnnnnnnnnnnnnnnnnnnnnnnnnnnnnnnnnnnnnnnnnnnnnnnnnnnnnnnnnnnnnnnnnnnnnnnnnnnnnnnnnnnnnnnnnnnnnnnnnnnnnnnnnnnnnnnnnnnnnnnnnnnnnnnnnnnnnnnnnnnnnnnnnnnnnnnnnnnnnnnnnnnnnnnnnnnnnnnnnnnnnnnnnnnnnnnnnnnnnnnnnnnnnnnnnnnnnnnnnnnnnnnnnnnnnnnnnnnnnnnnnnnnnnnnnnnnnnnnnnnnnnnnnnnnnnnnnnnnnnnnnnnnnnnnnnnnnnnnnnnnnnnnnnnnnnnnnnnnnnnnnnnnnnnnnnnnnnnnnnnnnnnnnnnnnnnnnnnnnnnnnnnnnnnnnnnnnnnnnnnnnnnnnnnnnnnnnnnnnnnnnnnnnnnnnnnnnnnnnnnnnnnnnnnnnnnnnnnnnnnnnnnnnnnnnnnnnnnnnnnnnnnnnnnnnnnnnnnnnnnnnnnnnnnnnnnnnnnnnnnnnnnnnnnnnnnnnnnnnnnnnnnnnnnnnnnnnnnnnnnnnnnnnnnnnnnnnnnnnnnnnnnnnnnnnnnnnnnnnnnnnnnnnnnnnnnnnnnnnnnnnnnnnnnnnnnnnnnnnnnnnnnnnnnnnnnnnnnnnnnnnnnnnnnnnnnnnnnnnnnnnnnnnnnnnnnnnnnnnnnnnnnnnnnnnnnnnnnnnnnnnnnnnnnnnnnnnnnnnnnnnnnnnnnnnnnnnnnnnnnnnnnnnnnnnnnnnnnnnnnnnnnnnnnnnnnnnnnnnnnnnnnnnnnnnnnnnnnnnnnnnnnnnnnnnnnnnnnnnnnnnnnnnnnnnnnnnnnnnnnnnnnnnnnnnnnnnnnnnnnnnnnnnnnnnnnnnnnnnnnnnnnnnnnnnnnnnnnnnnnnnnnnnnnnnnnnnnnnnnnnnnnnnnnnnnnnnnnnnnnnnnnnnnnnnnnnnnnnnnnnnnnnnnnnnnnnnnnnnnnnnnnnnnnnnnnnnnnnnnnnnnnnnnnnnnnnnnnnnnnnnnnnnnnnnnnnnnnnnnnnnnnnnnnnnnnnnnnnnnnnnnnnnnnnnnnnnnnnnnnnnnnnnnnnnnnnnnnnnnnnnnnnnnnnnnnnnnnnnnnnnnnnnnnnnnnnnnnnnnnnnnnnnnnnnnnnnnnnnnnnnnnnnnnnnnnnnnnnnnnnnnnnnnnnnnnnnnnnnnnnnnnnnnnnnnnnnnnnnnnnnnnnnnnnnnnnnnnnnnnnnnnnnnnnnnnnnnnnnnnnnnnnnnnnnnnnnnnnnnnnnnnnnnnnnnnnnnnnnnnnnnnnnnnnnnnnnnnnnnnnnnnnnnnnnnnnnnnnnnnnnnnnnnnnnnnnnnnnnnnnnnnnnnnnnnnnnnnnnnnnnnnnnnnnnnnnnnnnnnnnnnnnnnnnnnnnnnnnnnnnnnnnnnnnnnnnnnnnnnnnnnnnnnnnnnnnnnnnnnnnnnnnnnnnnnnnnnnnnnnnnnnnnnnnnnnnnnnnnnnnnnnnnnnnnnnnnnnnnnnnnnnnnnnnnnnnnnnnnnnnnnnnnnnnnnnnnnnnnnnnnnnnnnnnnnnnnnnnnnnnnnnnnnnnnnnnnnnnnnnnnnnnnnnnnnnnnnnnnnnnnnnnnnnnnnnnnnnnnnnnnnnnnnnnnnnnnnnnnnnnnnnnnnnnnnnnnnnnnnnnnnnnnnnnnnnnnnnnnnnnnnnnnnnnnnnnnnnnnnnnnnnnnnnnnnnnnnnnnnnnnnnnnnnnnnnnnnnnnnnnnnnnnnnnnnnnnnnnnnnnnnnnnnnnnnnnnnnnnnnnnnnnnnnnnnnnnnnnnnnnnnnnnnnnnnnnnnnnnnnnnnnnnnnnnnnnnnnnnnnnnnnnnnnnnnnnnnnnnnnnnnnnnnnnnnnnnnnnnnnnnnnnnnnnnnnnnnnnnnnnnnnnnnnnnnnnnnnnnnnnnnnnnnnnnnnnnnnnnnnnnnnnnnnnnnnnnnnnnnnnnnnnnnnnnnnnnnnnnnnnnnnnnnnnnnnnnnnnnnnnnnnnnnnnnnnnnnnnnnnnnnnnnnnnnnnnnnnnnnnnnnnnnnnnnnnnnnnnnnnnnnnnnnnnnnnnnnnnnnnnnnnnnnnnnnnnnnnnnnnnnnnnnnnnnnnnnnnnnnnnnnnnnnnnnnnnnnnnnnnnnnnnnnnnnnnnnnnnnnnnnnnnnnnnnnnnnnnnnnnnnnnnnnnnnnnnnnnnnnnnnnnnnnnnnnnnnnnnnnnnnnnnnnnnnnnnnnnnnnnnnnnnnnnnnnnnnnnnnnnnnnnnnnnnnnnnnnnnnnnnnnnnnnnnnnnnnnnnnnnnnnnnnnnnnnnnnnnnnnnnnnnnnnnnnnnnnnnnnnnnnnnnnnnnnnnnnnnnnnnnnnnnnnnnnnnnnnnnnnnnnnnnnnnnnnnnnnnnnnnnnnnnnnnnnnnnnnnnnnnnnnnnnnnnnnnnnnnnnnnnnnnnnnnnnnnnnnnnnnnnnnnnnnnnnnnnnnnnnnnnnnnnnnnnnnnnnnnnnnnnnnnnnnnnnnnnnnnnnnnnnnnnnnnnnnnnnnnnnnnnnnnnnnnnnnnnnnnnnnnnnnnnnnnnnnnnnnnnnnnnnnnnnnnnnnnnnnnnnnnnnnnnnnnnnnnnnnnnnnnnnnnnnnnnnnnnnnnnnnnnnnnnnnnnnnnnnnnnnnnnnnnnnnnnnnnnnnnnnnnnnnnnnnnnnnnnnnnnnnnnnnnnnnnnnnnnnnnnnnnnnnnnnnnnnnnnnnnnnnnnnnnnnnnnnnnnnnnnnnnnnnnnnnnnnnnnnnnnnnnnnnnnnnnnnnnnnnnnnnnnnnnnnnnnnnnnnnnnnnnnnnnnnnnnnnnnnnnnnnnnnnnnnnnnnnnnnnnnnnnnnnnnnnnnnnnnnnnnnnnnnnnnnnnnnnnnnnnnnnnnnnnnnnnnnnnnnnnnnnnnnnnnnnnnnnnnnnnnnnnnnnnnnnnnnnnnnnnnnnnnnnnnnnnnnnnnnnnnnnnnnnnnnnnnnnnnnnnnnnnnnnnnnnnnnnnnnnnnnnnnnnnnnnnnnnnnnnnnnnnnnnnnnnnnnnnnnnnnnnnnnnnnnnnnnnnnnnnnnnnnnnnnnnnnnnnnnnnnnnnnnnnnnnnnnnnnnnnnnnnnnnnnnnnnnnnnnnnnnnnnnnnnnnnnnnnnnnnnnnnnnnnnnnnnnnnnnnnnnnnnnnnnnnnnnnnnnnnnnnnnnnnnnnnnnnnnnnnnnnnnnnnnnnnnnnnnnnnnnnnnnnnnnnnnnnnnnnnnnnnnnnnnnnnnnnnnnnnnnnnnnnnnnnnnnnnnnnnnnnnnnnnnnnnnnnnnnnnnnnnnnnnnnnnnnnnnnnnnnnnnnnnnnnnnnnnnnnnnnnnnnnnnnnnnnnnnnnnnnnnnnnnnnnnnnnnnnnnnnnnnnnnnnnnnnnnnnnnnnnnnnnnnnnnnnnnnnnnnnnnnnnnnnnnnnnnnnnnnnnnnnnnnnnnnnnnnnnnnnnnnnnnnnnnnnnnnnnnnnnnnnnnnnnnnnnnnnnnnnnnnnnnnnnnnnnnnnnnnnnnnnnnnnnnnnnnnnnnnnnnnnnnnnnnnnnnnnnnnnnnnnnnnnnnnnnnnnnnnnnnnnnnnnnnnnnnnnnnnnnnnnnnnnnnnnnnnnnnnnnnnnnnnnnnnnnnnnnnnnnnnnnnnnnnnnnnnnnnnnnnnnnnnnnnnnnnnnnnnnnnnnnnnnnnnnnnnnnnnnnnnnnnnnnnnnnnnnnnnnnnnnnnnnnnnnnnnnnnnnnnnnnnnnnnnnnnnnnnnnnnnnnnnnnnnnnnnnnnnnnnnnnnnnnnnnnnnnnnnnnnnnnnnnnnnnnnnnnnnnnnnnnnnnnnnnnnnnnnnnnnnnnnnnnnnnnnnnnnnnnnnnnnnnnnnnnnnnnnnnnnnnnnnnnnnnnnnnnnnnnnnnnnnnnnnnnnnnnnnnnnnnnnnnnnnnnnnnnnnnnnnnnnnnnnnnnnnnnnnnnnnnnnnnnnnnnnnnnnnnnnnnnnnnnnnnnnnnnnnnnnnnnnnnnnnnnnnnnnnnnnnnnnnnnnnnnnnnnnnnnnnnnnnnnnnnnnnnnnnnnnnnnnnnnnnnnnnnnnnnnnnnnnnnnnnnnnnnnnnnnnnnnnnnnnnnnnnnnnnnnnnnnnnnnnnnnnnnnnnnnnnnnnnnnnnnnnnnnnnnnnnnnnnnnnnnnnnnnnnnnnnnnnnnnnnnnnnnnnnnnnnnnnnnnnnnnnnnnnnnnnnnnnnnnnnnnnnnnnnnnnnnnnnnnnnnnnnnnnnnnnnnnnnnnnnnnnnnnnnnnnnnnnnnnnnnnnnnnnnnnnnnnnnnnnnnnnnnnnnnnnnnnnnnnnnnnnnnnnnnnnnnnnnnnnnnnnnnnnnnnnnnnnnnnnnnnnnnnnnnnnnnnnnnnnnnnnnnnnnnnnnnnnnnnnnnnnnnnnnnnnnnnnnnnnnnnnnnnnnnnnnnnnnnnnnnnnnnnnnnnnnnnnnnnnnnnnnnnnnnnnnnnnnnnnnnnnnnnnnnnnnnnnnnnnnnnnnnnnnnnnnnnnnnnnnnnnnnnnnnnnnnnnnnnnnnnnnnnnnnnnnnnnnnnnnnnnnnnnnnnnnnnnnnnnnnnnnnnnnnnnnnnnnnnnnnnnnnnnnnnnnnnnnnnnnnnnnnnnnnnnnnnnnnnnnnnnnnnnnnnnnnnnnnnnnnnnnnnnnnnnnnnnnnnnnnnnnnnnnnnnnnnnnnnnnnnnnnnnnnnnnnnnnnnnnnnnnnnnnnnnnnnnnnnnnnnnnnnnnnnnnnnnnnnnnnnnnnnnnnnnnnnnnnnnnnnnnnnnnnnnnnnnnnnnnnnnnnnnnnnnnnnnnnnnnnnnnnnnnnnnnnnnnnnnnnnnnnnnnnnnnnnnnnnnnnnnnnnnnnnnnnnnnnnnnnnnnnnnnnnnnnnnnnnnnnnnnnnnnnnnnnnnnnnnnnnnnnnnnnnnnnnnnnnnnnnnnnnnnnnnnnnnnnnnnnnnnnnnnnnnnnnnnnnnnnnnnnnnnnnnnnnnnnnnnnnnnnnnnnnnnnnnnnnnnnnnnnnnnnnnnnnnnnnnnnnnnnnnnnnnnnnnnnnnnnnnnnnnnnnnnnnnnnnnnnnnnnnnnnnnnnnnnnnnnnnnnnnnnnnnnnnnnnnnnnnnnnnnnnnnnnnnnnnnnnnnnnnnnnnnnnnnnnnnnnnnnnnnnnnnnnnnnnnnnnnnnnnnnnnnnnnnnnnnnnnnnnnnnnnnnnnnnnnnnnnnnnnnnnnnnnnnnnnnnnnnnnnnnnnnnnnnnnnnnnnnnnnnnnnnnnnnnnnnnnnnnnnnnnnnnnnnnnnnnnnnnnnnnnnnnnnnnnnnnnnnnnnnnnnnnnnnnnnnnnnnnnnnnnnnnnnnnnnnnnnnnnnnnnnnnnnnnnnnnnnnnnnnnnnnnnnnnnnnnnnnnnnnnnnnnnnnnnnnnnnnnnnnnnnnnnnnnnnnnnnnnnnnnnnnnnnnnnnnnnnnnnnnnnnnnnnnnnnnnnnnnnnnnnnnnnnnnnnnnnnnnnnnnnnnnnnnnnnnnnnnnnnnnnnnnnnnnnnnnnnnnnnnnnnnnnnnnnnnnnnnnnnnnnnnnnnnnnnnnnnnnnnnnnnnnnnnnnnnnnnnnnnnnnnnnnnnnnnnnnnnnnnnnnnnnnnnnnnnnnnnnnnnnnnnnnnnnnnnnnnnnnnnnnnnnnnnnnnnnnnnnnnnnnnnnnnnnnnnnnnnnnnnnnnnnnnnnnnnnnnnnnnnnnnnnnnnnnnnnnnnnnnnnnnnnnnnnnnnnnnnnnnnnnnnnnnnnnnnnnnnnnnnnnnnnnnnnnnnnnnnnnnnnnnnnnnnnnnnnnnnnnnnnnnnnnnnnnnnnnnnnnnnnnnnnnnnnnnnnnnnnnnnnnnnnnnnnnnnnnnnnnnnnnnnnnnnnnnnnnnnnnnnnnnnnnnnnnnnnnnnnnnnnnnnnnnnnnnnnnnnnnnnnnnnnnnnnnnnnnnnnnnnnnnnnnnnnnnnnnnnnnnnnnnnnnnnnnnnnnnnnnnnnnnnnnnnnnnnnnnnnnnnnnnnnnnnnnnnnnnnnnnnnnnnnnnnnnnnnnnnnnnnnnnnnnnnnnnnnnnnnnnnnnnnnnnnnnnnnnnnnnnnnnnnnnnnnnnnnnnnnnnnnnnnnnnnnnnnnnnnnnnnnnnnnnnnnnnnnnnnnnnnnnnnnnnnnnnnnnnnnnnnnnnnnnnnnnnnnnnnnnnnnnnnnnnnnnnnnnnnnnnnnnnnnnnnnnnnnnnnnnnnnnnnnnnnnnnnnnnnnnnnnnnnnnnnnnnnnnnnnnnnnnnnnnnnnnnnnnnnnnnnnnnnnnnnnnnnnnnnnnnnnnnnnnnnnnnnnnnnnnnnnnnnnnnnnnnnnnnnnnnnnnnnnnnnnnnnnnnnnnnnnnnnnnnnnnnnnnnnnnnnnnnnnnnnnnnnnnnnnnnnnnnnnnnnnnnnnnnnnnnnnnnnnnnnnnnnnnnnnnnnnnnnnnnnnnnnnnnnnnnnnnnnnnnnnnnnnnnnnnnnnnnnnnnnnnnnnnnnnnnnnnnnnnnnnnnnnnnnnnnnnnnnnnnnnnnnnnnnnnnnnnnnnnnnnnnnnnnnnnnnnnnnnnnnnnnnnnnnnnnnnnnnnnnnnnnnnnnnnnnnnnnnnnnnnnnnnnnnnnnnnnnnnnnnnnnnnnnnnnnnnnnnnnnnnnnnnnnnnnnnnnnnnnnnnnnnnnnnnnnnnnnnnnnnnnnnnnnnnnnnnnnnnnnnnnnnnnnnnnnnnnnnnnnnnnnnnnnnnnnnnnnnnnnnnnnnnnnnnnnnnnnnnnnnnnnnnnnnnnnnnnnnnnnnnnnnnnnnnnnnnnnnnnnnnnnnnnnnnnnnnnnnnnnnnnnnnnnnnnnnnnnnnnnnnnnnnnnnnnnnnnnnnnnnnnnnnnnnnnnnnnnnnnnnnnnnnnnnnnnnnnnnnnnnnnnnnnnnnnnnnnnnnnnnnnnnnnnnnnnnnnnnnnnnnnnnnnnnnnnnnnnnnnnnnnnnnnnnnnnnnnnnnnnnnnnnnnnnnnnnnnnnnnnnnnnnnnnnnnnnnnnnnnnnnnnnnnnnnnnnnnnnnnnnnnnnnnnnnnnnnnnnnnnnnnnnnnnnnnnnnnnnnnnnnnnnnnnnnnnnnnnnnnnnnnnnnnnnnnnnnnnnnnnnnnnnnnnnnnnnnnnnnnnnnnnnnnnnnnnnnnnnnnnnnnnnnnnnnnnnnnnnnnnnnnnnnnnnnnnnnnnnnnnnnnnnnnnnnnnnnnnnnnnnnnnnnnnnnnnnnnnnnnnnnnnnnnnnnnnnnnnnnnnnnnnnnnnnnnnnnnnnnnnnnnnnnnnnnnnnnnnnnnnnnnnnnnnnnnnnnnnnnnnnnnnnnnnnnnnnnnnnnnnnnnnnnnnnnnnnnnnnnnnnnnnnnnnnnnnnnnnnnnnnnnnnnnnnnnnnnnnnnnnnnnnnnnnnnnnnnnnnnnnnnnnnnnnnnnnnnnnnnnnnnnnnnnnnnnnnnnnnnnnnnnnnnnnnnnnnnnnnnnnnnnnnnnnnnnnnnnnnnnnnnnnnnnnnnnnnnnnnnnnnnnnnnnnnnnnnnnnnnnnnnnnnnnnnnnnnnnnnnnnnnnnnnnnnnnnnnnnnnnnnnnnnnnnnnnnnnnnnnnnnnnnnnnnnnnnnnnnnnnnnnnnnnnnnnnnnnnnnnnnnnnnnnnnnnnnnnnnnnnnnnnnnnnnnnnnnnnnnnnnnnnnnnnnnnnnnnnnnnnnnnnnnnnnnnnnnnnnnnnnnnnnnnnnnnnnnnnnnnnnnnnnnnnnnnnnnnnnnnnnnnnnnnnnnnnnnnnnnnnnnnnnnnnnnnnnnnnnnnnnnnnnnnnnnnnnnnnnnnnnnnnnnnnnnnnnnnnnnnnnnnnnnnnnnnnnnnnnnnnnnnnnnnnnnnnnnnnnnnnnnnnnnnnnnnnnnnnnnnnnnnnnnnnnnnnnnnnnnnnnnnnnnnnnnnnnnnnnnnnnnnnnnnnnnnnnnnnnnnnnnnnnnnnnnnnnnnnnnnnnnnnnnnnnnnnnnnnnnnnnnnnnnnnnnnnnnnnnnnnnnnnnnnnnnnnnnnnnnnnnnnnnnnnnnnnnnnnnnnnnnnnnnnnnnnnnnnnnnnnnnnnnnnnnnnnnnnnnnnnnnnnnnnnnnnnnnnnnnnnnnnnnnnnnnnnnnnnnnnnnnnnnnnnnnnnnnnnnnnnnnnnnnnnnnnnnnnnnnnnnnnnnnnnnnnnnnnnnnnnnnnnnnnnnnnnnnnnnnnnnnnnnnnnnnnnnnnnnnnnnnnnnnnnnnnnnnnnnnnnnnnnnnnnnnnnnnnnnnnnnnnnnnnnnnnnnnnnnnnnnnnnnnnnnnnnnnnnnnnnnnnnnnnnnnnnnnnnnnnnnnnnnnnnnnnnnnnnnnnnnnnnnnnnnnnnnnnnnnnnnnnnnnnnnnnnnnnnnnnnnnnnnnnnnnnnnnnnnnnnnnnnnnnnnnnnnnnnnnnnnnnnnnnnnnnnnnnnnnnnnnnnnnnnnnnnnnnnnnnnnnnnnnnnnnnnnnnnnnnnnnnnnnnnnnnnnnnnnnnnnnnnnnnnnnnnnnnnnnnnnnnnnnnnnnnnnnnnnnnnnnnnnnnnnnnnnnnnnnnnnnnnnnnnnnnnnnnnnnnnnnnnnnnnnnnnnnnnnnnnnnnnnnnnnnnnnnnnnnnnnnnnnnnnnnnnnnnnnnnnnnnnnnnnnnnnnnnnnnnnnnnnnnnnnnnnnnnnnnnnnnnnnnnnnnnnnnnnnnnnnnnnnnnnnnnnnnnnnnnnnnnnnnnnnnnnnnnnnnnnnnnnnnnnnnnnnnnnnnnnnnnnnnnnnnnnnnnnnnnnnnnnnnnnnnnnnnnnnnnnnnnnnnnnnnnnnnnnnnnnnnnnnnnnnnnnnnnnnnnnnnnnnnnnnnnnnnnnnnnnnnnnnnnnnnnnnnnnnnnnnnnnnnnnnnnnnnnnnnnnnnnnnnnnnnnnnnnnnnnnnnnnnnnnnnnnnnnnnnnnnnnnnnnnnnnnnnnnnnnnnnnnnnnnnnnnnnnnnnnnnnnnnnnnnnnnnnnnnnnnnnnnnnnnnnnnnnnnnnnnnnnnnnnnnnnnnnnnnnnnnnnnnnnnnnnnnnnnnnnnnnnnnnnnnnnnnnnnnnnnnnnnnnnnnnnnnnnnnnnnnnnnnnnnnnnnnnnnnnnnnnnnnnnnnnnnnnnnnnnnnnnnnnnnnnnnnnnnnnnnnnnnnnnnnnnnnnnnnnnnnnnnnnnnnnnnnnnnnnnnnnnnnnnnnnnnnnnnnnnnnnnnnnnnnnnnnnnnnnnnnnnnnnnnnnnnnnnnnnnnnnnnnnnnnnnnnnnnnnnnnnnnnnnnnnnnnnnnnnnnnnnnnnnnnnnnnnnnnnnnnnnnnnnnnnnnnnnnnnnnnnnnnnnnnnnnnnnnnnnnnnnnnnnnnnnnnnnnnnnnnnnnnnnnnnnnnnnnnnnnnnnnnnnnnnnnnnnnnnnnnnnnnnnnnnnnnnnnnnnnnnnnnnnnnnnnnnnnnnnnnnnnnnnnnnnnnnnnnnnnnnnnnnnnnnnnnnnnnnnnnnnnnnnnnnnnnnnnnnnnnnnnnnnnnnnnnnnnnnnnnnnnnnnnnnnnnnnnnnnnnnnnnnnnnnnnnnnnnnnnnnnnnnnnnnnnnnnnnnnnnnnnnnnnnnnnnnnnnnnnnnnnnnnnnnnnnnnnnnnnnnnnnnnnnnnnnnnnnnnnnnnnnnnnnnnnnnnnnnnnnnnnnnnnnnnnnnnnnnnnnnnnnnnnnnnnnnnnnnnnnnnnnnnnnnnnnnnnnnnnnnnnnnnnnnnnnnnnnnnnnnnnnnnnnnnnnnnnnnnnnnnnnnnnnnnnnnnnnnnnnnnnnnnnnnnnnnnnnnnnnnnnnnnnnnnnnnnnnnnnnnnnnnnnnnnnnnnnnnnnnnnnnnnnnnnnnnnnnnnnnnnnnnnnnnnnnnnnnnnnnnnnnnnnnnnnnnnnnnnnnnnnnnnnnnnnnnnnnnnnnnnnnnnnnnnnnnnnnnnnnnnnnnnnnnnnnnnnnnnnnnnnnnnnnnnnnnnnnnnnnnnnnnnnnnnnnnnnnnnnnnnnnnnnnnnnnnnnnnnnnnnnnnnnnnnnnnnnnnnnnnnnnnnnnnnnnnnnnnnnnnnnnnnnnnnnnnnnnnnnnnnnnnnnnnnnnnnnnnnnnnnnnnnnnnnnnnnnnnnnnnnnnnnnnnnnnnnnnnnnnnnnnnnnnnnnnnnnnnnnnnnnnnnnnnnnnnnnnnnnnnnnnnnnnnnnnnnnnnnnnnnnnnnnnnnnnnnnnnnnnnnnnnnnnnnnnnnnnnnnnnnnnnnnnnnnnnnnnnnnnnnnnnnnnnnnnnnnnnnnnnnnnnnnnnnnnnnnnnnnnnnnnnnnnnnnnnnnnnnnnnnnnnnnnnnnnnnnnnnnnnnnnnnnnnnnnnnnnnnnnnnnnnnnnnnnnnnnnnnnnnnnnnnnnnnnnnnnnnnnnnnnnnnnnnnnnnnnnnnnnnnnnnnnnnnnnnnnnnnnnnnnnnnnnnnnnnnnnnnnnnnnnnnnnnnnnnnnnnnnnnnnnnnnnnnnnnnnnnnnnnnnnnnnnnnnnnnnnnnnnnnnnnnnnnnnnnnnnnnnnnnnnnnnnnnnnnnnnnnnnnnnnnnnnnnnnnnnnnnnnnnnnnnnnnnnnnnnnnnnnnnnnnnnnnnnnnnnnnnnnnnnnnnnnnnnnnnnnnnnnnnnnnnnnnnnnnnnnnnnnnnnnnnnnnnnnnnnnnnnnnnnnnnnnnnnnnnnnnnnnnnnnnnnnnnnnnnnnnnnnnnnnnnnnnnnnnnnnnnnnnnnnnnnnnnnnnnnnnnnnnnnnnnnnnnnnnnnnnnnnnnnnnnnnnnnnnnnnnnnnnnnnnnnnnnnnnnnnnnnnnnnnnnnnnnnnnnnnnnnnnnnnnnnnnnnnnnnnnnnnnnnnnnnnnnnnnnnnnnnnnnnnnnnnnnnnnnnnnnnnnnnnnnnnnnnnnnnnnnnnnnnnnnnnnnnnnnnnnnnnnnnnnnnnnnnnnnnnnnnnnnnnnnnnnnnnnnnnnnnnnnnnnnnnnnnnnnnnnnnnnnnnnnnnnnnnnnnnnnnnnnnnnnnnnnnnnnnnnnnnnnnnnnnnnnnnnnnnnnnnnnnnnnnnnnnnnnnnnnnnnnnnnnnnnnnnnnnnnnnnnnnnnnnnnnnnnnnnnnnnnnnnnnnnnnnnnnnnnnnnnnnnnnnnnnnnnnnnnnnnnnnnnnnnnnnnnnnnnnnnnnnnnnnnnnnnnnnnnnnnnnnnnnnnnnnnnnnnnnnnnnnnnnnnnnnnnnnnnnnnnnnnnnnnnnnnnnnnnnnnnnnnnnnnnnnnnnnnnnnnnnnnnnnnnnnnnnnnnnnnnnnnnnnnnnnnnnnnnnnnnnnnnnnnnnnnnnnnnnnnnnnnnnnnnnnnnnnnnnnnnnnnnnnnnnnnnnnnnnnnnnnnnnnnnnnnnnnnnnnnnnnnnnnnnnnnnnnnnnnnnnnnnnnnnnnnnnnnnnnnnnnnnnnnnnnnnnnnnnnnnnnnnnnnnnnnnnnnnnnnnnnnnnnnnnnnnnnnnnnnnnnnnnnnnnnnnnnnnnnnnnnnnnnnnnnnnnnnnnnnnnnnnnnnnnnnnnnnnnnnnnnnnnnnnnnnnnnnnnnnnnnnnnnnnnnnnnnnnnnnnnnnnnnnnnnnnnnnnnnnnnnnnnnnnnnnnnnnnnnnnnnnnnnnnnnnnnnnnnnnnnnnnnnnnnnnnnnnnnnnnnnnnnnnnnnnnnnnnnnnnnnnnnnnnnnnnnnnnnnnnnnnnnnnnnnnnnnnnnnnnnnnnnnnnnnnnnnnnnnnnnnnnnnnnnnnnnnnnnnnnnnnnnnnnnnnnnnnnnnnnnnnnnnnnnnnnnnnnnnnnnnnnnnnnnnnnnnnnnnnnnnnnnnnnnnnnnnnnnnnnnnnnnnnnnnnnnnnnnnnnnnnnnnnnnnnnnnnnnnnnnnnnnnnnnnnnnnnnnnnnnnnnnnnnnnnnnnnnnnnnnnnnnnnnnnnnnnnnnnnnnnnnnnnnnnnnnnnnnnnnnnnnnnnnnnnnnnnnnnnnnnnnnnnnnnnnnnnnnnnnnnnnnnnnnnnnnnnnnnnnnnnnnnnnnnnnnnnnnnnnnnnnnnnnnnnnnnnnnnnnnnnnnnnnnnnnnnnnnnnnnnnnnnnnnnnnnnnnnnnnnnnnnnnnnnnnnnnnnnnnnnnnnnnnnnnnnnnnnnnnnnnnnnnnnnnnnnnnnnnnnnnnnnnnnnnnnnnnnnnnnnnnnnnnnnnnnnnnnnnnnnnnnnnnnnnnnnnnnnnnnnnnnnnnnnnnnnnnnnnnnnnnnnnnnnnnnnnnnnnnnnnnnnnnnnnnnnnnnnnnnnnnnnnnnnnnnnnnnnnnnnnnnnnnnnnnnnnnnnnnnnnnnnnnnnnnnnnnnnnnnnnnnnnnnnnnnnnnnnnnnnnnnnnnnnnnnnnnnnnnnnnnnnnnnnnnnnnnnnnnnnnnnnnnnnnnnnnnnnnnnnnnnnnnnnnnnnnnnnnnnnnnnnnnnnnnnnnnnnnnnnnnnnnnnnnnnnnnnnnnnnnnnnnnnnnnnnnnnnnnnnnnnnnnnnnnnnnnnnnnnnnnnnnnnnnnnnnnnnnnnnnnnnnnnnnnnnnnnnnnnnnnnnnnnnnnnnnnnnnnnnnnnnnnnnnnnnnnnnnnnnnnnnnnnnnnnnnnnnnnnnnnnnnnnnnnnnnnnnnnnnnnnnnnnnnnnnnnnnnnnnnnnnnnnnnnnnnnnnnnnnnnnnnnnnnnnnnnnnnnnnnnnnnnnnnnnnnnnnnnnnnnnnnnnnnnnnnnnnnnnnnnnnnnnnnnnnnnnnnnnnnnnnnnnnnnnnnnnnnnnnnnnnnnnnnnnnnnnnnnnnnnnnnnnnnnnnnnnnnnnnnnnnnnnnnnnnnnnnnnnnnnnnnnnnnnnnnnnnnnnnnnnnnnnnnnnnnnnnnnnnnnnnnnnnnnnnnnnnnnnnnnnnnnnnnnnnnnnnnnnnnnnnnnnnnnnnnnnnnnnnnnnnnnnnnnnnnnnnnnnnnnnnnnnnnnnnnnnnnnnnnnnnnnnnnnnnnnnnnnnnnnnnnnnnnnnnnnnnnnnnnnnnnnnnnnnnnnnnnnnnnnnnnnnnnnnnnnnnnnnnnnnnnnnnnnnnnnnnnnnnnnnnnnnnnnnnnnnnnnnnnnnnnnnnnnnnnnnnnnnnnnnnnnnnnnnnnnnnnnnnnnnnnnnnnnnnnnnnnnnnnnnnnnnnnnnnnnnnnnnnnnnnnnnnnnnnnnnnnnnnnnnnnnnnnnnnnnnnnnnnnnnnnnnnnnnnnnnnnnnnnnnnnnnnnnnnnnnnnnnnnnnnnnnnnnnnnnnnnnnnnnnnnnnnnnnnnnnnnnnnnnnnnnnnnnnnnnnnnnnnnnnnnnnnnnnnnnnnnnnnnnnnnnnnnnnnnnnnnnnnnnnnnnnnnnnnnnnnnnnnnnnnnnnnnnnnnnnnnnnnnnnnnnnnnnnnnnnnnnnnnnnnnnnnnnnnnnnnnnnnnnnnnnnnnnnnnnnnnnnnnnnnnnnnnnnnnnnnnnnnnnnnnnnnnnnnnnnnnnnnnnnnnnnnnnnnnnnnnnnnnnnnnnnnnnnnnnnnnnnnnnnnnnnnnnnnnnnnnnnnnnnnnnnnnnnnnnnnnnnnnnnnnnnnnnnnnnnnnnnnnnnnnnnnnnnnnnnnnnnnnnnnnnnnnnnnnnnnnnnnnnnnnnnnnnnnnnnnnnnnnnnnnnnnnnnnnnnnnnnnnnnnnnnnnnnnnnnnnnnnnnnnnnnnnnnnnnnnnnnnnnnnnnnnnnnnnnnnnnnnnnnnnnnnnnnnnnnnnnnnnnnnnnnnnnnnnnnnnnnnnnnnnnnnnnnnnnnnnnnnnnnnnnnnnnnnnnnnnnnnnnnnnnnnnnnnnnnnnnnnnnnnnnnnnnnnnnnnnnnnnnnnnnnnnnnnnnnnnnnnnnnnnnnnnnnnnnnnnnnnnnnnnnnnnnnnnnnnnnnnnnnnnnnnnnnnnnnnnnnnnnnnnnnnnnnnnnnnnnnnnnnnnnnnnnnnnnnnnnnnnnnnnnnnnnnnnnnnnnnnnnnnnnnnnnnnnnnnnnnnnnnnnnnnnnnnnnnnnnnnnnnnnnnnnnnnnnnnnnnnnnnnnnnnnnnnnnnnnnnnnnnnnnnnnnnnnnnnnnnnnnnnnnnnnnnnnnnnnnnnnnnnnnnnnnnnnnnnnnnnnnnnnnnnnnnnnnnnnnnnnnnnnnnnnnnnnnnnnnnnnnnnnnnnnnnnnnnnnnnnnnnnnnnnnnnnnnnnnnnnnnnnnnnnnnnnnnnnnnnnnnnnnnnnnnnnnnnnnnnnnnnnnnnnnnnnnnnnnnnnnnnnnnnnnnnnnnnnnnnnnnnnnnnnnnnnnnnnnnnnnnnnnnnnnnnnnnnnnnnnnnnnnnnnnnnnnnnnnnnnnnnnnnnnnnnnnnnnnnnnnnnnnnnnnnnnnnnnnnnnnnnnnnnnnnnnnnnnnnnnnnnnnnnnnnnnnnnnnnnnnnnnnnnnnnnnnnnnnnnnnnnnnnnnnnnnnnnnnnnnnnnnnnnnnnnnnnnnnnnnnnnnnnnnnnnnnnnnnnnnnnnnnnnnnnnnnnnnnnnnnnnnnnnnnnnnnnnnnnnnnnnnnnnnnnnnnnnnnnnnnnnnnnnnnnnnnnnnnnnnnnnnnnnnnnnnnnnnnnnnnnnnnnnnnnnnnnnnnnnnnnnnnnnnnnnnnnnnnnnnnnnnnnnnnnnnnnnnnnnnnnnnnnnnnnnnnnnnnnnnnnnnnnnnnnnnnnnnnnnnnnnnnnnnnnnnnnnnnnnnnnnnnnnnnnnnnnnnnnnnnnnnnnnnnnnnnnnnnnnnnnnnnnnnnnnnnnnnnnnnnnnnnnnnnnnnnnnnnnnnnnnnnnnnnnnnnnnnnnnnnnnnnnnnnnnnnnnnnnnnnnnnnnnnnnnnnnnnnnnnnnnnnnnnnnnnnnnnnnnnnnnnnnnnnnnnnnnnnnnnnnnnnnnnnnnnnnnnnnnnnnnnnnnnnnnnnnnnnnnnnnnnnnnnnnnnnnnnnnnnnnnnnnnnnnnnnnnnnnnnnnnnnnnnnnnnnnnnnnnnnnnnnnnnnnnnnnnnnnnnnnnnnnnnnnnnnnnnnnnnnnnnnnnnnnnnnnnnnnnnnnnnnnnnnnnnnnnnnnnnnnnnnnnnnnnnnnnnnnnnnnnnnnnnnnnnnnnnnnnnnnnnnnnnnnnnnnnnnnnnnnnnnnnnnnnnnnnnnnnnnnnnnnnnnnnnnnnnnnnnnnnnnnnnnnnnnnnnnnnnnnnnnnnnnnnnnnnnnnnnnnnnnnnnnnnnnnnnnnnnnnnnnnnnnnnnnnnnnnnnnnnnnnnnnnnnnnnnnnnnnnnnnnnnnnnnnnnnnnnnnnnnnnnnnnnnnnnnnnnnnnnnnnnnnnnnnnnnnnnnnnnnnnnnnnnnnnnnnnnnnnnnnnnnnnnnnnnnnnnnnnnnnnnnnnnnnnnnnnnnnnnnnnnnnnnnnnnnnnnnnnnnnnnnnnnnnnnnnnnnnnnnnnnnnnnnnnnnnnnnnnnnnnnnnnnnnnnnnnnnnnnnnnnnnnnnnnnnnnnnnnnnnnnnnnnnnnnnnnnnnnnnnnnnnnnnnnnnnnnnnnnnnnnnnnnnnnnnnnnnnnnnnnnnnnnnnnnnnnnnnnnnnnnnnnnnnnnnnnnnnnnnnnnnnnnnnnnnnnnnnnnnnnnnnnnnnnnnnnnnnnnnnnnnnnnnnnnnnnnnnnnnnnnnnnnnnnnnnnnnnnnnnnnnnnnnnnnnnnnnnnnnnnnnnnnnnnnnnnnnnnnnnnnnnnnnnnnnnnnnnnnnnnnnnnnnnnnnnnnnnnnnnnnnnnnnnnnnnnnnnnnnnnnnnnnnnnnnnnnnnnnnnnnnnnnnnnnnnnnnnnnnnnnnnnnnnnnnnnnnnnnnnnnnnnnnnnnnnnnnnnnnnnnnnnnnnnnnnnnnnnnnnnnnnnnnnnnnnnnnnnnnnnnnnnnnnnnnnnnnnnnnnnnnnnnnnnnnnnnnnnnnnnnnnnnnnnnnnnnnnnnnnnnnnnnnnnnnnnnnnnnnnnnnnnnnnnnnnnnnnnnnnnnnnnnnnnnnnnnnnnnnnnnnnnnnnnnnnnnnnnnnnnnnnnnnnnnnnnnnnnnnnnnnnnnnnnnnnnnnnnnnnnnnnnnnnnnnnnnnnnnnnnnnnnnnnnnnnnnnnnnnnnnnnnnnnnnnnnnnnnnnnnnnnnnnnnnnnnnnnnnnnnnnnnnnnnnnnnnnnnnnnnnnnnnnnnnnnnnnnnnnnnnnnnnnnnnnnnnnnnnnnnnnnnnnnnnnnnnnnnnnnnnnnnnnnnnnnnnnnnnnnnnnnnnnnnnnnnnnnnnnnnnnnnnnnnnnnnnnnnnnnnnnnnnnnnnnnnnnnnnnnnnnnnnnnnnnnnnnnnnnnnnnnnnnnnnnnnnnnnnnnnnnnnnnnnnnnnnnnnnnnnnnnnnnnnnnnnnnnnnnnnnnnnnnnnnnnnnnnnnnnnnnnnnnnnnnnnnnnnnnnnnnnnnnnnnnnnnnnnnnnnnnnnnnnnnnnnnnnnnnnnnnnnnnnnnnnnnnnnnnnnnnnnnnnnnnnnnnnnnnnnnnnnnnnnnnnnnnnnnnnnnnnnnnnnnnnnnnnnnnnnnnnnnnnnnnnnnnnnnnnnnnnnnnnnnnnnnnnnnnnnnnnnnnnnnnnnnnnnnnnnnnnnnnnnnnnnnnnnnnnnnnnnnnnnnnnnnnnnnnnnnnnnnnnnnnnnnnnnnnnnnnnnnnnnnnnnnnnnnnnnnnnnnnnnnnnnnnnnnnnnnnnnnnnnnnnnnnnnnnnnnnnnnnnnnnnnnnnnnnnnnnnnnnnnnnnnnnnnnnnnnnnnnnnnnnnnnnnnnnnnnnnnnnnnnnnnnnnnnnnnnnnnnnnnnnnnnnnnnnnnnnnnnnnnnnnnnnnnnnnnnnnnnnnnnnnnnnnnnnnnnnnnnnnnnnnnnnnnnnnnnnnnnnnnnnnnnnnnnnnnnnnnnnnnnnnnnnnnnnnnnnnnnnnnnnnnnnnnnnnnnnnnnnnnnnnnnnnnnnnnnnnnnnnnnnnnnnnnnnnnnnnnnnnnnnnnnnnnnnnnnnnnnnnnnnnnnnnnnnnnnnnnnnnnnnnnnnnnnnnnnnnnnnnnnnnnnnnnnnnnnnnnnnnnnnnnnnnnnnnnnnnnnnnnnnnnnnnnnnnnnnnnnnnnnnnnnnnnnnnnnnnnnnnnnnnnnnnnnnnnnnnnnnnnnnnnnnnnnnnnnnnnnnnnnnnnnnnnnnnnnnnnnnnnnnnnnnnnnnnnnnnnnnnnnnnnnnnnnnnnnnnnnnnnnnnnnnnnnnnnnnnnnnnnnnnnnnnnnnnnatacctattatccaccttctcggcgagtcattctacagggaatccacctgttcgtcgcaaaaggttcatgctctccggtagcgcttctaaagccattatgagaaaggcaggctcgcatcagggaatgcccgaacttctggttgtcctgatccaaagtaggcaaggtagccttgataggtgtccatgaagggactgacactaagcaaaggagtgttgaatgtatgatttaaccaacaatgattgggtaagggtgcttcgccgcgatggcactactggccgtataagtctgctgcaggcgctgcgggatgcggacaggctgcatcttgcctacagcaatcccatggaccggttcgcggtcttcaggttcatactcgccttgggctactggtgttttgccaacaccgacagaccgcctgagcccggcaagccgcttccggccccctggatatcctggctagaggaaaacagggaatatttcgagctctatggcaatggcccccggttttatcaggaccctgccgcccggcatgttcgacccgtaactgacctgctgcacgaaatccccaccgggaataatttctctcacttcaagcacagcctggattatgtttccggcctgtgcctgccctgctgcatacagggtttgctgcgtttcaccgtctatgccacctccggactgccgaaactcaaatccagcatcaacggaatgcccccgttctacgcgctaccctggggaaagacactggcggaaacgctatgcctgaactgggagccacgcgacctgatgggaaccccggcctgggttgacaacaccgtggaccccaggaccgatcccgtgccgctgctggtgggcctgaccgcattggccagacgcagccgcctgcatgaacccgtggccggagatgtggcttgtgccggttgcggcgaacggccggggctcttggtccattcctgtgattatcagacggccggagatattgccaatccccattggcaggatcctcacgtctgctacggcggcaaagagaacaagccgctcaaggtggaaaacctgatcgctgaaaaacctctgctgcaggataagaactggcagcgtccgctacgggatgcggacacaaaatcatctcgcaatgaaggcctgagcgtgctctgcataggcgtggccgtgaatcaggccaagatcgacgatgtctgggaaacaacgatcagaattccccacgaagagcccgggaaagacacccacagcgtgcccaactgggcccaggccaaccgtcgcctgatcggggcatatgagcggcacagactgtccagggccgataaagctgtcgcgggcaggcttaaggttccgctcagcgaagctttggtcagcgccatctccccccacctggtccatgctgcggtaaggctgacgggtggattcatcccccgggaaggcgagataccggatcctgtaaaagccctgtaccggcggctgctcacggtgatctcgggggcttatgccccggaagccacggctgctgacgcaagtgccgccagtctggtgcgacacctgcgcccccggctggaacaacctgatgttcaaaacaaagaaacacaggaggaccaaagtgactgacacgcccacagctcaattcgtcaaaaggatctctgagctaaaagcaggcgaccttggccgcctgaggcaactgaaaggctgcgacctgcacgaggacttggacgggttcgacctgttcacgggcctctggtggactctgcgcaggacatcatcaagggtcccccggcgcgagatcgcctggctggtggccaagctctacgcacagttcccgctcgcccaggaagacggtaaaactctgccctctttgctcggccgcatctacggcaccctgcacactaacaaggagagacgcacatttatggcccgaacggacgcgatcctgcgggcaagctccagccagttggaatacccgctcggctgggcgctgcagaccatcgggctgtataactgcgcctccctcgactggataaaacttaccaacgacctttcggcctggcacaatgaactggtgcgccagaaatgggctgaggcctttaatcaagcatcatatgaacacaacaaggagaactaaaatgttgatcgagatccacatgatccagaatcacagcccggccaatctgaaccgggacgatcttggcgcgcccaagacctgttatttcggtggagtgctgcgttcgcgcatctccagccagtgcctcaaacgcagcatcaggaccagcgaagattttcaggctttgctgggcggagttcgcacccgcagactggccgacctgatccagcaggaggccggtgagacagattgccggcaaaaagcccaggagatactcaccaaatgtggcttcaagcatgaggacaacaacagcaaaatgctcgttttcatgtccagggacaaggtaaaggaccttgcccggatcgtccttgatacttccctggagatcacggaagccgcccagcaagttgccgatgtgatcgcccatgcgacctatacccccgacattgccctctgcggcaggatgctggagccagaaggcaaggacaagagtgtgaagtggtcggacaccacggtggaggcagctctgcaggtggcccatgcaatttccacacatgcggcccggccagagatcgactactatgtcgcggctgatgacgtgaagggagcggatgccggtgcgggctacgtggatgaggccatgttcgcctcggcctgtttctacaagtatttttccatcgactgggagcagctggtcgagaacctgaaaggaaacaaagaattggctgcccataccgtcggggcattggtcctggctgccgcgcgcaccaaccccagcggcaaacagaacagcttcgctgcccataacctgcccgacggcatcctggtggagttcaaaagttccccggtcagctatgccaatgccttcgtgcggccggtcaagctggtggcggaatcggacctggtcgaactcagcgtgggacaactggccaactatgtgcaggacatcagcgagggatattttcccggccagatggaaggcaactccttttggttctcacccaacggacgctatcctctgcagccgcagaagggcgggctgcatgccgaacaggtcggccagctggaagaactggtcaggaagaccatccgcaagtgcggttatgattgggaagccatcaaacaactgaaaacagaaggctgacatggctgccaataccttgttcttaaggctggaggggccgcttcaggcctggggcagccatgaggccaaattctccgtgcgccgcacctccgaagctcccaccaaatcaggagtattcgggctgctttgcgctgccctgggtgtgggcagggcagaagccgctaaatactggctgccggaactggccaaactgcgcatgggggtccgcgtagaccgccccggtatacgctggtgggattatcatacggtgggtgcggggataaaaatgcgcatctccaatctggaagcgccgacagacctgagcgatgtgggtgaggccagggaagccaggctgcgacaaaaaaacctcaaatatgacgaccggggtatgctgacccggcgcgaatacttggctgatgccagctttctggtggccttgcagggtgagccaaggatagtggagcagttggccgaagcgttgcgaaaacctgtctgggcgctatatctgggccgtaaatcctgcccgccttcccggccggtgggggaacatccgcccggagaccatgcttcactggaagaagccctggcggccgcgccgatacagaagcgcaaagacggagaacccgatccctcaacgcttcagtgcattctcgactggatacccgcctttgacggagagccagccccggatgaggcagagatccattatgacattcccgtgtccttccagcctccgcggcacctgccccgcttcgtggtcagcagggaactggtcctgagcaatgagttggaggtacatcaggtgctcatcggtaagacctggcatccgccccgcagtcgcgctgattacagtaattcccaatacaaaagggtacgcgccgaacgtttggtgatggatgtgggactctgcatggtctgcaaggccccggccaccaccgtccagcatgtgaattaccgccgggcgggaggtaacgaggagcctgaggacctgcgagccctctgccgcctctgccatgatgcctgcaccatgctggaatacggcagcggcatgaccatggaccgcatcgacccctgcgaccctgactggcgggagcgcattctggccaaacgtgaggagatcatcaaattccgctcgctggaacagcgcaggcgcaagctcgatcccaaggaggagaacggatgatctacctatcccaactactcatcgatacaggcggaaatcccgaccgtccgaggccgggacgcctgtggctcaacaacgtgtacaacatccaccgcaggctctccatggcctttcccatgcgtcagcgcagagatggagatcctaaattcctgcagcctttcgatcctgcagatttggaacaacgccagttcctcttccgggtggacaacaacaccgacggagaggagcaaagggcgatgatattggtgcagtcacaccttaggccggattgggactgggccttccaaaacgccacgggttttctggccgctccgccccaggttaaggaatacgatccgagattctccacaggacagcggctccgctaccgcatcctcatcaatgccagcgtcaaacgcaaaattgacgaggtcagggagagccccgaggggaaagaaaaatccggacaggtcctgcacaaacgggttgcccttacctgggagaccgattccaaccctggcgacgctgtagcccaatggttcgccgccaaggccgacaggctgggcttcacgccccttaacacggagctggtgaacctgggttgggtgtatggctccaagccagagccccagggagatgcgcctcggcgtgagaacaaataccgtcccttgagataccgctccgccttgctggaaggatatttgaaagtggatgatgtcgtgctgttccagtctgcgttggccaaagggatcggcagcgctaaaagcatgggcttcggcctgctctccgtggttccgttaagcgatgcgtaataaagacctgcataccattcccaagatgcgggaccgcgtcagctatctctatgtggaacacgccaaggtggacaaagaggagcaggccatcgcctttcacgatgccatgggctccactccggttccttgcgctggtcttgccttgctgatgctggggcctggcgtttccattacgcacgcggccatcctggtgctggccgattgtggctgcttggtcgcttgggtgggggaacagggggtccgcttttacgcagccgggacggggaccacccgcagttccgccaatctgatgcgtcaggcagccgcctgggcagatcgggaagcgcatctgaggatagtgcgccggatgtatgaactgaggttcaaggataaattggacccatccctcactcttgagcagataagaggaaaggagggggcgagggtgcgggacacctatttcaggttgtccaaagagttcaacgtgcccatggaaaccagaaattacgacaggaacaactggagtaaaaccgaccccatcaaccgggctctttccgtggctaattcctgcctctatggcatctgccacgccgcgatagtggccgccggttattctcccgccctgggtttcgtccatactggcaaacagctatcctttgtttatgacattgccgatctctacaagatggaaacctccgtacccgcggccttcctggctactgccgccgggatcgaaaacctggaccgccggacacgcatggcctgccgggaccagttctatcaatttggcctgctgaagaagatcgtggctgatatccactccctgttcggtatcctggaaacaccggaagatgaaccagaccatgcggatgtcgacccagccgcaccgggcgggctttggaacccggatgagagcgccagcccaggcggcttgtcctggggcctggacgatccaggaggccatgatgatggtcctggtgcttgaaaaagtaccctcttccctgaggggagaaatcactcattggcttctcgaagtaaaagcaggtgtctttgtcggccaagtatcggccatggtgagagaaaagctgtgggacaaggtcagatccggctgtgcgggcggtacctgcctcatgatcttcagcaaacattgcgaacaaggcttcggcattgagttctggggtgcggcggaaaggatcgtgaccgagtgggaaggactaaaacttatgaccaaacatccgtgaaccatacctaaggcagtgtggttagcctgaaaccctttatttactaagggtattccccacatgcgtgggggtgaaccgcctgatgtcccgcctccgctcaaagctcgtgagtattccccacatgcgtgggggtgaaccggtggtcaaccccaaaaccgggaatctgaaaaagtattccccacatgcgtgggggtgaaccgacagattcacgagccaggcgcagatgatctgggtattccccacatgcgtgggggtgaaccgtaagcacaaagacggaggaaaaaagataatgagtattccccacatgcgtgggggtgaaccgttcgtattgatatagttctggctgccgtctgtgtattccccacatgcgtgggggtgaaccgtttgaggccgccgccgccagatattggtggttgtattccccacatgcgtgggggtgaaccggacacgatgtatgtgcggatccattggattgagtattccccacatgcgtgggggtgaaccgaacgcgaaggtgccgtgggacctggacgcaatgtattccccacatgcgtgggggtgaaccgtcccgcaccccgatcaggcagatcccgatgctgtattccccacatgcgtgggggtgaaccgccttgacatcggcgtccacttggtcttgccttgtattccccacatgcgtgggggtgaaccgaatgggacgtgatgtccaaatacgccacgaccgtattccccacatgcgtgggggtgaaccggccctcgtccaggtcaatccctgcaccgtgatgtattccccacatgcgtgggggtgaaccgtccttcatgacgggatcggagccccacttggcgtattccccacatgcgtgggggtgaaccgttttggaagaacgaacagcaatggaaactggagtattccccacatgcgtgggggtgaaccgagtatatcatctacccgaaggcggcatgatacgtattccccacatgcgtgggggtgaaccgcgttgatcgcggccatgacttccggttccacagtattccccacatgcgtgggggtgaaccgaacttcacggcggccaactacgccacgctgaggtattccccacatgcgtgggggtgaaccgctcaagttctaattgatcgccttccgtgtcaagtattccccacatgcgtgggggtgaaccggcgcgcgcattgaaaacagcccggcagatcacgtattccccacatgcgtgggggtgaaccggtctgcctcgccaccatctgggagcgcatcaagtattccccacatgcgtgggggtgaaccggccgcttcgatgccctcatgggacagtatgccgtattccccacatgcgtgggggtgaaccgtcatcatccgctacgacttcaccgacctccgcgtattccccacatgcgtgggggtgaatgtttattagaatcttgcgaaaccttgatctccagtcacatagatataggcataaatccctgtctggtcaaatactcgtaggtctcgtcaagttctggcagttgtggcatgaaaaccaccgtgcaatcacgtcctcgcgtgagcaaaacccgataggcatttatcctgagctgttccgcgtcttttatgcggctgctgttctgatatctcgaggctttcgcatttgaccattttccgtctttaaccataaagtctgtgccccaggccagcagaacggcatccagctcaagcccctgagcgccgaattcagtgacaacgtctctcatcagccggcatgatttctgcctggggtcatcttcggcatcagagtaccaagggccgaaatcgacatttttggtagactgccagtcgttgagaatgccaaacctttttaggtcacgatcacgcgaagatgccacaatgccgtatctggcgtcagggttatccctatatcggtcctgaaggtatttcctggcgaaggaaatgtcccgggtgatcctgagatggtagccctgttgttccagttttatggcaatggatttcaggtcatccagcaaagaggatctattatctatgagttggctcacgaaattatggatatcttctgccaaatggaaacgtatttctttgtccagattgaggtcttcggattctacatagggcaacttggtgctcagcatttcctcacggacctgggcaggaccatgaagaatccactcattagaccgcttcgatttttctatggctttgctccattggctcaggccggcttcttcgccgatatggatctcctggccgctgccgatgaggccgatgaccacacaccagcgcggaaccctttctgcgaagtctatgaacagatcaggctccgatttaccataaacaaaccccgggatatccttgtgtttggcggcaacctgttcggcgtcgaatgccctttgagcctcatcatagatcagcacatgttctgggggtatgtttgctctggtggtggagtaagttctgacgtagttgagcacatcacggacaaaagccttgcctccgccgtttgctccgcgcaattcatactgcagcacccgcaccagtggaccgttgcccgacagaaacactgcgggggcactgggcttgccattgcccctgtcgaccaccaggtcatcgagaaaatgggcgtgggctattctcagcccaaccagggtttttcccgcgcctgggacgccagtgataagaatcagccgtcggctttgagtctcataagcctcatggatgatccggcatatctcgtcaacggcggggtctgtggccgccctggctctttttatggtcctcaatgcgccggtgtgaaacaattctcgggcggcttggatcagggtgggaaggggacggtaggcttcttccgataaaaacctgtcttcgtctacaggctctgtgggtgatgccttgtcgagttcgtccaccaccttgtttagataatcgggccccaccactctgaccccgaagatatagcccatgtcgcctctggccagcatgggaaccaataaagggatgaccggccgggtttcgcagtccctgtgatagcacttcaagtcacgcacataggctgccacctgatcgagatcggcctggttgggcgagtatttgcccttgagctccagtaccacaatattgtgcctcacaaggaatattacatcggtgcgtctggattccaggggtaagcgaaactccattatcgaggagtagtctgacgcgctggggtccgcggccatgatctcggctgcttccctttggatgacggggatcgactggttccaggcattcacctgagcttgctcagcatccccgacaaattcctgcaagcactctctgatgtcttttttagacgttgtgatgaaagcggggaactttgaggaccaacctgcggttttactcacacagcccccctggctcttataatcgaccaattaagcatattgcctccggatcaatgcaggagggatttgatgtggttggctgtgtcggggtcaacgcaatacacatagcagcctctgatgcccctggtcatgaggaccttgtagatgttgcgcacataggcatgaaaattggcggggtctcccctgagcaccggatcatgggtctttgagatgtcaaactccaaggccccggttatcttgttatagaccatgtcggggccgatgatgacaccaacatagtcaaactcgaagccctggggatcagtattgcctgatggcctctatcaccagttccggcatgtcacattcgattgctgccgatagtaattccgctttccgcggtaatcttaatccgcaggatttcaataatgtgagctctcttacccggaaatgggccatgtcacgcacttcgcgggcgacctcttcttcagtatagtacaaccaactggtatcgttaggatagaagtattcaatgtcctgcataaagccttgactgaactcctcggcgtatcggttgacatcgaaaccttgggctatcaagcgttcgcaggttcggcggtcaccaccggaaagcgcggaccagaacaggtcaagttcactcaggtcaggatcatagacaaccgcaccatccgcagggaaaaactcgctcagatcgggaatgggttggggaagcaattctactccttggccatggaacacgtctccggcaacatcgtaccagacctgcctgcctgcgcccaagggggaacccagcagtgaactggccacgataaaccgggcggggtctccaaaaatttctatatcccaccaagcatcttccgggatgtcttctacatgttgccaatggctctcaacgatcttcagctccgggaaaacattgttgcggatgacttggactgcggttgccgcgagatcatcggtatccacgtccacaaagtgcagacccccgccgatttcggcaacttctgcggctgagaccgagaggtaaaaaccatgctttctttctaggggctccatggaatgcacattggctatcatcgattcgtccggcctggcttcgatccacttactgccatcgaagtacgagagacccaccccgccggtccacacgactccggttcggtcgatcgccacggcatttggcacaccaatcagtttcaaatcttcagggctgtagtgtgtccagcttcctccggaataacattcaagcccgctggccagggcagcccacaagcgtccctggtggtctatcgccagatcattcacggagttgccttcaaagtggccgggatatgattcaaatagggggatgtggaggacctcgaccaggctgtcaccggtcaaatgggctatccgacctccgtccagccccagccacaggttcccggtggtagtgtcgaattccagagcctggaccgcagattcagtctcaactgatgtccaagtatcgtcttgcaggcaggacacccccacgtctgtccctacccacagggtacctgtgtcggtgagatccaaacagcttatttcattgcttaacaaccctgagttgtctttcgtgaaaatcgtccaaaccccatcgttccatctggtcaagccctggtccgtgcctgcccagagcagttcctccccgtctgaggccaggcaggacacataatccgatggcaaggctgaattggcggaggtgaatatctccggtttcgccctatccgcgtagttctgcgttctggccaggccaccataaacagctgaccaaagatatgtacccgttaacaaggtggcgaaagtgtcgaaatcgttataatgatgagcgatcactgtctgggcttggcctgaggtaacgcagatcagcaaaagcacaaaaacgacaaaatgtttcatcgatcctccttcatctgatcaagctaatgcttgccatacaaatcacaatgtgaatgattcctgtcaatacttatttcgtgtctgctgtttaacacccactgccgataccactatcgaagtttgcccaagcgacggcgtcaacaggtttcgtccctgcaaggctattaattgatcgattcttggttgttggaacttggcctttggcaatgcgtggaactgcggaatgagatgaatcgcatgaccggcatcagtcgatactacggatgtaactccgatgctgcggttggtcatggcttgtttccagtaaaaaaagcatgattggaatcatgcgctacgctgatgtttcctgtctagataacgttcgttatattgccaattgatctgggattcactcaactgtgccatatggaggatcggagtccggaccgatgatcatccctccgccaaagccaatggggttgaagccagcctggtggtgtgtcgcaggtttaaaaaaagcaggcaaaaggagcctgaattctacctgatctgtgacttcgccgatcccggcctgtcggaactggaaatcacccaacgggcagtctgcgcttaccacaaacgcttgaagatcgaagaagtgcaccggcagatgaaacaagacctgcagtgggagaaaacgcgcctggccagctacgtaaaactgaagaacctcaacatgttgatgaccatctcgctatacttcgtctattcatgcaaagacatgatctacaagatcgcggaggcttttcccaagctcatctgcttccaaaaaaaggactggggcaagttgcaccagttcgtctactacaggctctgccaggtaatcaggatctgcctgaaacgtgtcacccactataacaagtctccatatagagcagatctgaccgaaccatggcagcagtgtcattaaaaaccatgccttgttcctctcaagttttttctacccaccataattgaacttgagccaaaaaaacacttgccaaaattttaccgtctgatttgatagttttgtgagtgtcacagcctccgcacccggacgtgaagcagattagccaagtgaagatggaaagctgattaggccgcatttttgtagtttcgccaagcctggtgggagggggatcccaaaaagcacaaaggagattgcgtgtacgttctgaaggaagccttggcccccgcctgcaagaacagccggcccggagggttgagcttaggttacggtcattccttcggcggaccagccagtagccgggaacaggcaaaggcatgaagaccgcgaaatcacagggcggcacctcagggaaaatgtcagccaggagtagggttgatgggcgttaagatcccttacctaaaactgggtgtgtccatagatgtgggcgtgggcgtgggcagcgattattccttccattccagtttccggggcatctttggtcgggccctgaggcagaccttttgcatccagaaccgcctggactgcgttgactgccccatcagcggctgcctttaccgcagactgttcgaagacgtcggtcacggccacgaaagctaccgcccctacatcatccgccacacagacacccgggaccagagagtggaaatggagctcgtgatctttggccagttggccgaatacggcagttcgatcatgcacctgctcacccggctggaagggcgccaactacggctgcagggcgagaaccatcccgtaagcctggcaggggtacaggacctagacggtaggacgctttataggatgggcgtgcaggagatccgggagccggatatccacactatcagttacagcccccggcggcggaacgagatcggccttaggttcatcacccccctccggctgaagcacgagggcaggctgatgagcggcttcatgctgcagccggtgctgcgcagcgtctaccagcgggtggaatacatctgccgttattttctgcaggaaagtgacccattgccgcctttcgcgccggaatacggggaggtggcggcctccacccactggcaggagatgtaccgcaagagctggaggcagcagcagaagatgagcctgggtggcctgatgggggaagtgaggatcgccgcgccttccgctcaaactgtgggactgctaaaaattggagaattgatccaggccggcaaacagaccaccttcggcctgggcaaatatgagatactttagataaggaggtatgatgatcgacgtgtacgacatggccctggccggcttgctgcatgacatcggcaaggtgatgcagagggcggaggtcgatatcggcaaagccaaatacgaggcgtactgccccagctggaacaatgttcccacccaccagcacgtgatgtggacacggcagtttttcgacggcgtcctgtcccagccggggcgcgactgggaacaggtggccaacctagccgccagccaccataatgccgccgctttcgccaacgtgacggaccccgatttttggctggtccagtgcctgatcaacgcggatcgggtatccgcttcctgggaccggcaacccgatgaggaggccgccgaaaagggggcctacaagaagaaagagcttcacagcgtcctctccgaggtgcatctggggcattcgctggcctctgacagcgtactgccgttgatagaggcggagccaggcgaggctgtgttcccccgggaagcgagccccgacaccctgaagtgcaaggaatacgaagcgatcttcacgggcttcaagggtgaattcggcaaccttctgaacgccctgggctccggcacgatcacgctgccgaacctggttgacgccgtggattcgctgctggaaaaatacttctggagcgtcccctcgaacacccgggaggaaaaacccaccaactccctttattatcacagccgcatcacggcagggatagccagcgtccttcacgcctatttcctggccagaccggaagaacgggagcagcttgagcatctggacaagtccggcaaagacatcctgatgctgatcggcggcgacctcagcgggatccagaaatacctgttcgacctgcatccggagcattcccggaaagccgccaagaccctccgtgcccgctcgttcaagatcaagaccctctgcgacatcgttctgcagaggatctgccgtgaactgggcctgccgcgccagtgcgtcctgatcaacgcgggcggcaagttcatgctcttggcccccaacctgccagaaatggaggcaaagctggagctgatcagacaagaggtcgatgaggagttctaccgccagttcatgggcgcggtgagcctgaacctggattgggcggtgaaagtgcctttcgcggccctgaaaagcgaccggttccccgcaaccctggacagcttcatcgaacgcatggagcaggccaagctccgtaaattttccagttacctgcaggacgggaaaagctggcagagcgggaaattcctgatcgagcaggcggcctatcacagcaacctctgcccccaatgcggaaaacggactgtggaaccggacgccaacggcgagttgcccaattgccaggcctgtgaggatgaggtcaaactaggccagatcctgccccgggccacgcatttcatcatcgggaaggggcagccgcgccacggcttcgccctgaagatgtttgcagaaagctggtacctggaggatttcgatcccaaggccggcgtcaacctgggcgaggacgacttcgccttctgcatccggcaggatgacaggaaaacgcttccctatccctacaagccggtggcctcggtggttcccgtcttcaaagacctcagcgcccaggatgcggggatcatcgatggtctgggggaaaacgaagaaagccccggagacagggaccaatttccgctgtccttcgacgaactggctttgctggccctggaacaaaccgaaggcgacaaattccggggcgtgcccctgaacgcggtgctcaaaggcgacgtggacaacctggggaacatcttcaccctgggcctcaggtacggcaaggacggcaagcttaagcccaacggcttttccgtgacccaatacgccaccctctcagccgagatcgactggttcttttccgcctacctgccaagtttaatccagcgggaggagaggttccgcaaccacgtctatgtggtctatgccggcggggatgatttctgcctgatcggcccctggaacgtgatgctggatctggccgtggcgctggacaaaaagttccgggctttctgcgggcagcatccggacttgcatttctccgccgcgctgaggttggtgcacggcagggcccccatccgcttcggcatcgaaaagacggaagaggacctggggcaggccaagaaatggaagcaggaccccaaccaggaccattacgataaaaacgccctgcagctgttcgacaccaccgtgccttgggaaaagctggaacagacgctcgcctgggcggacagcttcgatgcctggctggggcaaaacgaaaccggagacggagccgccaagggcttcagcgcccagttcctgcaccggctgatgcagtacagcgagatggcagcccgctaccaggaaaagaaagatgtgagggacctgctctacaaaagctacctctcctacgacctcaaacgcaatttcaaagaggtttcggaaacggtggagaagctgcaggagctcgcctggcatgatgaacagatcaggatgatgaaggtcccgatcagcaaaacgctgtataagaacagaaaatacaacaaacatggaggagaccatgaataatcccagacaaaactataataacccccggcaggaggccccgagttggagtgacggctatcagttcttccagggcgatgcggtcaatatccagtgggtgggggagttggcgaagaaattttccaaccacgtcgcagataataggttgtcatcttcgcaactgagggccttttacaacgaattcctcaggatccgcgacatcacggcggacgccacggaaaagaacatcctgatcagactgctggaagcgaagatcagctaccgccacaccgcccggaaaagcgacatgcccgtggccatggtcgatttcatcagcagcttggtgaaccagatcggcgaagaccccgcgaagttcaagcaagcctgctacatcatggaagccgtggttggcttcttccccaagaaatgatcagtttaggaggatacaatgatcaaaatggttaaaatcactggtaagatattgcttctgagcggactgcacatcggcggcagcgatgccggggtcaagatcgggggaatcgacctctccgtgatcaagaatcccatttccggcctgccctacatcccgggttcgtccctgaaagggaaaacgaggttcctactcgagcattattacaacgtggtaccccgcgacggcagcgtgtccaagcccggaagggacgcctccaatcccatcgcagttatcttcgggcacatcgaaaaagacgtccagaccatgcccacccgggtgatctaccgggattccaacatcaccggcgcagtcgaaatcctggacgacctctccgaggaaagcctggcgggcaggatgatgaacgtggaggacgcgaaactgaaaatgaactcgctgttcgtggaaggcaagaccgaagtgacgatcgaccgtaacaccggtactgtgaaccagaagcaaggcggcccgcggcagatcgaacgcgtgccggcagggacggtgttcgacctcgagatcgtgttgcgcgtgtttgaggaccaggagcaggaacagcacctggatatcatcaagaaaggcctgaagctactccagaacgacgccctgggcggatatggcagccggggtggcggccgcgtgaaattctttgacctcaaggtcggtgaccagattctggatctgaacggcatcgccttgtaagccgggagcggacatgctgtataaaattgagtggacgctgcagtctccgatcgagacgcagcttcagagcgataccatcttcggccacctctgctgggccattgccatggaacagggggaagcggcgctgaccgaattcctggaagccatgcaaaagcccgtgctgtcgctctcctcggctttcccccagggaactttgccggtgcccaggctcaacgcccggtatggagaattgccggctgacctccagggcgccctggccaaacgcggaaccgcgaaggcggccaagaaactcagctacctgcccctggagatatggctgcaaaaacacaatgattacgaccacagcgaagtgatccaacgcaacgaggccatccaagccctggtggagaaatcattcaaactggagcaggacgtggtggtgcacaacagcatcaaccgcgtcaccggcactaccaccaaaggcggggccagcctctataccgaaacggtaaccttcgcccgtgagggcacggtcttcgaatcctatctggagacggattacttcagcgctgagcagttgggggccctcttcgatttcgtggaaaactccggtttcggccgcaacaaacacacgggcaggggtaggttcaggatccagctcggggagcatgagttgccccgggtggaggatcccaatgcctggctgctgctttccaacgcggttcccgcgccggacgaccccacctctgcctgttatgacggcttcgtgaaattcggcaggttggggggcagttacgccgccggaagcagaaaccccttcaaaaaaccgctgttcatgctcacgcccggcacggtattctttggagaccggccgcccactggcacgctggtgcggaacatccatccggatgatcccgcgatctgccaactcggctacgccatgtgcgtgggattccatctcaggggaggggacaatgcctgaaatgtacaaacgctggcgtctgcatgtctttccagttactcacctgcacatagcctcgggggagtggctggatcccacccagtatgtgatcaccggcaaccaactccatgtgctcaaccagccgcgcctgatcgcttacctgaatgccaaagacccggccaagctgaaggagatggtcggcctggggcacaatatgatcgccaggttcctgtgtgacagcttcgatccttcacaaaccggcacttgggtccaacgccatccggtggaagaggcttatcagaagcaatatctgcaagacctggacaatcccgccgcgcagcagctggtatcctccttcatcgccaaccggctcaccggcaacccctatcttccgggcagttccatcaaaggcgccctcaggaccgcccttgtggcctggcgcgccaaagacccggccgcccggatcaggagactgtccagcggtgagatcagcgagcgggatttggagcccattctcttcggatatcttaatgactggggaaggccgaacatcaccctcgatcccttcaaagggctcaaggtagccgattgcgaatttcccatggcctccctaggcctgcgcaagatcgaggtgaggaagaagaacccccgcgaggaaagccagcgcgcccacccgggagatgaactctcctacctggcccaggtgctggttaaaggcactccggggttatcaaccatcctcgcggcggaccggcactggctgggtaaattccccatcgagaggatgatcgcttcctgcaacgatttcttccggcaaaaactacgcgaggatgacagcttctacctgccggagcggaagaagctgcacgacaacctggccgggtggctggccaacctgaaacccaaccagttcctactgcgcctgggcaagggcaccggttccctgcacaaatccgtcaacgatccccatcccgccacgcgcagcctggccggcggcatgcccctgggcatctgctgctgcactctggaagaactgccttgaagatcatcgtgaccccggtggggaccagcaccctcaccaaccggtgcgatgagctcgcccgccagttgctggggcaatatgccaatgccaggaagaaagatgagatcccgggggatgagagccgctatcttgcagactatgttacccgccggacacaggagattagcgctatggataccggggaggccaaaaagatctcggccgagctccatagcctgctcatcctgttcgagcagagccctcctgaatccagggacctggtggttctgattcccaccgatacctttatcggccggatcactggcgggatcatccattcctatctggagtcccggcgcatcggaagccagctgctggatatcccgggattgcagaccaaatccagcaccgacctgaggtttgccttcaccagcctgctgagggagatcaccacgttgaaggagatgtacgggccacagggggcgcggatcatcttcaacctcaccggcggcttcaaggcggtgcagggctttctgcagaccctcagttccatctacgccgatgagaccgtctacatattcgaacatgagtccgagctgatgcgcattccccggctgcccttcaagctacagccggaggagtacatcaccgccaacctgtccctctggcggaggctggacctctgcctgagggttggagcagaccacgtggccaagatcccggacgccttctactatccctgcaacggcgaattcggactctccgagtacggtgagctggtatggcaaaacctgcgccccgacatctatgccagagaaatgcatccacctccctccaaccgggtcgtgtttggtcccaattacctgaaatcggtcgcggctctttcaggcgaccgcctggccatgctcaaccggcaggtcgatgaactggcaaggtatctggaaaccggcctcaaggaaatgcccaagagcctgagcttaaagaatatagggaaaaccgtgaaaccgggttccacccacgaattctacgcctggagcgatgctggtgccaaacgggtcttttgccactacggcgatgacggcgtcctggtgttggacgaactgggagaccacctctaagcggaagatgcgttacctggtttcactggccagcgagcaggccattccgaacatcctcctgatcaggacggttaaggatatcgaccgccatgttttcatcactactccgcgcatggcggaattggtggagcggacctgctccatctgcggcataactgatccggtgaagattgaggttgacgaatacgacctggaaggcaatgccgccagcgtggcctcctgcctcgatcgcctgcgcccgtcaggtttggttgtcaacctgaccggcggcaccaagctgatggccctgggtgtgttcagggcgatccaaagctatccggcgcaagccttctatctccctttgggttcgaaccacgcccatctggtctacccttccttcgtgaaaaacttcctgcccatcacccaccgcctggacgcgatcactttcctgcgcgcttacgggatcgaggctgaagtccccaacaggccccttcattcctacggtaggtcggaagcgatattttccctcttcgccaggcaggaggtggaagatctttcccggaaactcaaccagctgggcaaccgccggctggaccttacggcagccaacattgaactcaaggcgatcctggctgcctgcctggatctggcccctgcccgcctggaatcatccgaatggctggattttgtcaagggcggttggttcgaggagtacctctgccactacctgcaaattgtattaccggagggacaggtctgccgcaacgtcgtgactgataaaaacaacgtaaaaaacgaactcgacctctgtttcacccacgccaacgcccttcatgtctgggagctcaaatcatcagttaaggccccggagatcaaggatatcctctacaagctggattccctcaaaaatgactacggcctgcgtccccattgcgttctggcgctcgcctcgcctgccgcggacaggctctggcgccagaatgccttcctccgggagcgggctgccggcatggggatcagggtcctcacctgtccggatctcgcgccggatctgatccaggagtctattcgaagaaccctggactgactttttgccatggaggcactatatgagcaatgttaccgatactgctggattcccctcactgcgggttaatttcaacacggcttttctcaatgaagatatctctgcggctgcagattactgccgccaggcagaaaatatccaaaatctcagctcctcagaacgagaggagctatcacgttttttccttatgttggggaaagtgcggcaggctctgaaccagatagacctggtgttggaatcgcaaccagaaaaccacccccttgcccgcaagaaagctgaaatccttaggcttagtaacgataatcaggcttgccgtgattttttggacaagatgcttgcccaatatccccagcaaactgattactacttggagtacttgcttttggccgcagcagagaatgacggcaataccagggactgtgtcctggagaaagcgaaagccgagggcattgacctttcccaattgctgccaaaggaacagcaatcagcccagtcacccgcgaggcctgaaccgcctgaggtttatcaggatggcgatctgagggcttttcaggaccttttttcaggaagggagaactgtcatgcccgccagtgggttggcgaggaaggaaaacacggctatgccttggtcaacgagcccttgaatcctttgctgcttcgcaaccatctcctcggcatccacactcttgggatatatcaacttgaccttgccaacaaggtgaaatggatcatgttcgacctggacgcggataaatcatacttgaacgatttccatgaccctgacgtccgcgcttggattgacgcggcgctgcataaagccgctagccagttgaaagacatcctttcagcgtatcaggtacctgtcaacatggagtttagcggctacaaaggctatcatctgtgggtgttgctccaggataagatatctgccgcctttgcccgcagcttcgcgcagcgcgtcgcggcgcaggtgaatctggaaggtttgcccatccatattgagattttcccaaaacaatcccgaatcagcgccaacagctatggaaacctcgtgaagctaccctatgggctgcatcggctgagcggtttgcccagttccatgcttgccgaggatggcagtttaattccctttcaggattttattcgagctccgaaactgatatctaaccaggttttcatttcagccctatactccttggacccaaatttcaacatcctgaatggcctttctggcaatcaggaggattacatccagcacgaaaacgatgaccacggccttccccttcccgatccggaaacagatcctgaatggctctgcctcaggcaaaactgccatgctctctggatcgtggataatctgatcaaaactcgttcaatcctaacagttgagcaaaagaatgtgctcaaattcactgccggatacctgaaacagggcccaactatagtgaacgcgcttctccgcagatgctctaatctggacccatctgatttgatgaagtctggcttcaagggtaattccatcagttgtgccaagatccgttcccatcttgcggacgtgattgatctcaatcaatgcgcatgcgatttttccctctcaccgggcatgtatccgactcccattctccatttgaaaaaactcagcagtgatgccaccgccgctgtccaatggaacgaactgaagcttaaagacctgatcgccacttatctaaaactcaaaaaggaagtcaacgaaacgctggaactcctggaacagaaagaaaaacagatcatggcggcttttgacgagatcggtgtaacggagataacttcgccttggggcgttttacggaaaaccgaccaggatggctttgtcaggctcacccttgacctgaagtgaggtgaagatgctgccggaagatttttccgagaagctcaggcaggcctttaccctcaagcaaaatggcaactggcagggtgccctggacctgtacgaaagtgcatatgtcgatgaaagtaagcaatttgaccaaaatttggtgttatccctcctgtcttgtctgaaaaaactggagcgcttcgaccgggcgatagaaatcggccttacggcttgtgaacatgaaggccattgggaggcggttgctagtttaaccgcctggtgcgtctattacagatatttccggcaggaaaaccgtctgcctgcggaacaggctgtcgaatggctggagaccatcaaacgcatttcaccgcttaagcaaggcctgcatcctcttcccttggctgtcttttcctttctcgcgaaatcgcctgacctgttacctgcgttggttatccaaatctgcggcctgcttgacaccgacctgctggaaaccacaccccagccctcgaacaaaccaggggtgctctatccctcccacagggaaaaacacgcctccctcctctccaaggcccttttcaacctcggcgattatgcctcctgcctcgatctatgcagtaacacactgaatcgaaacctgaaactatccaccaacgccgatgtttggttcaaacgccgctccgccctctgcctggcaaaacttggcgattacagaacggctctggatctgtatgaggaaatcttgaaacgcaagcgtgactggttcatcctttacgaagctgctctggcagcctatcggctggatttgttcgaccgttctttggcgctcgcccttcaggcggctaatgcctacggtgagcccgataccaagatccacctctgggaacttctgcaaaacctaatggccaggaacaaggagttcgatcgttccatcgaaatgctcaggctctgcgcggcgatacgcaaacagaggcaatggagcctggacagaaacctgctgttggacctgcaagcccataacatagatcctgacaaattgcctccttacaaggaaattttggctaattgccggtcctggctagcccccaggcagtccgaaggccagaaagagcttagcggtatagtaactaaattgctgcctcacggcaaagcgggtttcctgaaatcgggtgctgacagctattactttctggtttcccaatgccaattccatgctgaagatgtccagcccggtatgaaggtctgttttcgcactcaacccagcttcgacaaaaagaaacagcaggcaagcctcatggctgtccgcatccgcaaaatcaaggactaaccgtgcccgttgtttacgtggctgatcagggctgttcgatcgcaaaaaaaggtgaccggctgtatgtttacaagggggctaacctgctgcgctggttccataccaaagacatctcccaactcattattgtgggtaatgtcgcgattacttcccctgccctcacatatcttttgaaacacaagatcgataccgtgttcctctcctattacggaaagttcaagggtcgtctggtgggggagtttggcaaaaatgtggagctgcgggcaaaccaatatgcattcctctctgaggcaggccacagggaacttctggcggctgtttacgtttcggggaaggtgcaaaacatgcagacacatctcttgaaacgcattaaacgaaacaaacaccctttgctgccagccgcctatttgcagaatcaggccattctggaaaagatcaccggctcttaccttgatctccaggtcatccgcggttacgaagggattactgcgaaaaactacttctcaacctttcctgccatgatcttccaagctgaattccctttttccggaagaaaccggaggcctcccaaagatgaggtcaatgccctgctctccctcggttatacttttctcatgaaccaggtcatggcagcagccaacattgtgggcttggaccctttttttggtgcgcttcatgatgttgcctacggcaggcagtcccttgtgctggatctcatggaagaattccgccccctgattgacaaccttgtcattaccctcataaaccgcaaggggatcaggcttgaacactttgcctacaatcttctccccgatgatgagagctccgaggaagacatcgacagaagttcaaagctattgccggtctcactcaagccggaaggcatgaaaatcatcattgctgcctttgccaaaatggtaaactcccgtttctccattaccaaacctgatggcgattggaccctcagggatattttcgagatccaggcccgccggctggcgaactacatccagggccgtgaccagtaccgaccctttgcatggaactgaaaactgcagcctcctcaaactcagttgcgatcgtcaaaccatggcttgcgaaaaggttgaaatccttgtggcttcatcggtatgtaccataaagttacgtcactcaactcccgaaacgctgattggcatcacttgttcttgttgcataagcgaagcgggcacagataatgaaacacctgtacctagtctgttttgacattgtatcggataagatcaggtatcgcgtggtcaagacgcttctaaaattcggtattagggtccaaaaaagcgtctttgaatgccacctgaacgacaagcagtatctggacatgaaaaaagaactggaaaaacaccttgacttcacccaggatagcgtgcgctattacctcctgtgcaagaactgcgccgataacatccagatctccggtctcggggtcttcaccggggatgaagatttgataatcatctgaattggtttgggctgataggctgtcgtgcctaatcatttttggggccgccccagtgcaaacttttgcttgacttgtccagatacttttttttaatgattcaaaggtgaagaaggacaatgattactgttgtatccgcttacaaaacccaagccgataccggacagagagttaagctctggcagcccgggaatcgctgtccgttttgtaacaataagcttcgcaaggagttacgggccagtaaaaaacataccccccaccccccttgcactgtttgcacgccattgtcctttttagctttgtatcttagtttgttttcaagcggatagaacgccagctatagaaacaccgttgacccgatttaggggattgagaccgatacgcacgatcttgacttgaattgtacccatgatagaaacaccgttgacccgatttaggggattgagacagcaggatttcggcgctgataggggcgtcggcgtcacatagaaacaccgttgacccgatttaggggattgagacatagttttatcttattaagaatgagaacatcttcttatagaaacaccgttgacccgatttaggggattgagacatggcaagtcgccaagccctaggtctttccgagcgctatagaaacaccgttgacccgatttaggggattgagactatccctcggcattgagaagttcttcatcacgaaaatagaaacaccgttgacccgatttaggggattgagacttagctaatcggggatgtattcaggtctcaattaatagaaacaccgttgacccgatttaggggattgagacattgccaatagcgatgtatggaatctctttcacttatagaaacaccgttgacccgatttaggggattgagacaggtcgaaggggtaaccttccggtctgatggcgatctgatagaaacaccgttgacccgatttaggggattgagacctcattgtctcgtgattcatccttcctgcctcattatagaaacaccgttgacccgatttaggggattgagacatatgctggccaagacagcgtccatgtcggcaagtatgcatagaaacaccgttgacccgatttaggggattgagacgattatcttcgttccatcgttattaagaatcatatagaaacaccgttgacccgatttaggggattgagacttttcggctttggtgaaagtggatttttcgggttgggggatagaaacaccgttgacccgatttaggggattgagactattgctgacaacacaagggctattattgctatgatagaaacaccgttgacccgatttaggggattgagacatgggcgaaggtccgctcgtgaagacacaacacctgcatagaaacaccgttgacccgatttaggggattgagacaattccgattattcttcataaatctacgctcctcggtatagaaacaccgttgacccgatttaggggattgagacctcactgcggccatctccgcatttaccaatgcggtagccttgatagaaacaccgttgacccgatttaggggattgagacatccggcgccttgcctgatgcttgttccccttgtgatagaaacaccgttgacccgatttaggggattgagacttagtgaatcaatcatagatgaattgacagagaaatagaaacaccgttgacccgatttaggggattgagacaagagcggcaaagagcgtaagcaattcctctggatattatagaaacaccgttgacccgatttaggggattgagacttttcttcattcttttctctaattcgaacaattttctatagaaacaccgttgacccgatttaggggattgagacgtcctgcgcactgaattttacatgtgaaccctttggtccaatagaaacaccgttgacccgatttaggggattgagacatcagaccttttgaggttccctgtcttcttctgctctatagaaacaccgttgacccgatttaggggattgagacatcgtctttcgacgtgggggcgtgctgatggctacgatagaaacaccgttgacccgatttaggggattgagacaacctccgttatcgttgttgttgtatgttaagcctaatatagaaacaccgttgacccgatttaggggattgagacattgcgggtgacaacattaccacaaatgaggcagataaatagaaacaccgttgacccgatttaggggattgagaccttgcgggcgtggacgtgggccgttgtttcgtatatagaaacaccgttgacccgatttaggggattgagactggattacagtctgtcaagctcagcttgcagcgcagtatagaaacaccgttgacccgatttaggggattgagacttcagaaaatccgacaacagctgtacgccattgtatagaaacaccgttgacccgatttaggggattgagacttccaaactacgct

SEQ ID NO: 984 - DNA, 105118 bp, Artificial Sequence
  Synthetic Oligonucleotide
  misc_feature (1)..(81647): n is a, c, g, or t
nnnnnnnnnnnnnnnnnnnnnnnnnnnnnnnnnnnnnnnnnnnnnnnnnnnnnnnnnnnnnnnnnnnnnnnnnnnnnnnnnnnnnnnnnnnnnnnnnnnnnnnnnnnnnnnnnnnnnnnnnnnnnnnnnnnnnnnnnnnnnnnnnnnnnnnnnnnnnnnnnnnnnnnnnnnnnnnnnnnnnnnnnnnnnnnnnnnnnnnnnnnnnnnnnnnnnnnnnnnnnnnnnnnnnnnnnnnnnnnnnnnnnnnnnnnnnnnnnnnnnnnnnnnnnnnnnnnnnnnnnnnnnnnnnnnnnnnnnnnnnnnnnnnnnnnnnnnnnnnnnnnnnnnnnnnnnnnnnnnnnnnnnnnnnnnnnnnnnnnnnnnnnnnnnnnnnnnnnnnnnnnnnnnnnnnnnnnnnnnnnnnnnnnnnnnnnnnnnnnnnnnnnnnnnnnnnnnnnnnnnnnnnnnnnnnnnnnnnnnnnnnnnnnnnnnnnnnnnnnnnnnnnnnnnnnnnnnnnnnnnnnnnnnnnnnnnnnnnnnnnnnnnnnnnnnnnnnnnnnnnnnnnnnnnnnnnnnnnnnnnnnnnnnnnnnnnnnnnnnnnnnnnnnnnnnnnnnnnnnnnnnnnnnnnnnnnnnnnnnnnnnnnnnnnnnnnnnnnnnnnnnnnnnnnnnnnnnnnnnnnnnnnnnnnnnnnnnnnnnnnnnnnnnnnnnnnnnnnnnnnnnnnnnnnnnnnnnnnnnnnnnnnnnnnnnnnnnnnnnnnnnnnnnnnnnnnnnnnnnnnnnnnnnnnnnnnnnnnnnnnnnnnnnnnnnnnnnnnnnnnnnnnnnnnnnnnnnnnnnnnnnnnnnnnnnnnnnnnnnnnnnnnnnnnnnnnnnnnnnnnnnnnnnnnnnnnnnnnnnnnnnnnnnnnnnnnnnnnnnnnnnnnnnnnnnnnnnnnnnnnnnnnnnnnnnnnnnnnnnnnnnnnnnnnnnnnnnnnnnnnnnnnnnnnnnnnnnnnnnnnnnnnnnnnnnnnnnnnnnnnnnnnnnnnnnnnnnnnnnnnnnnnnnnnnnnnnnnnnnnnnnnnnnnnnnnnnnnnnnnnnnnnnnnnnnnnnnnnnnnnnnnnnnnnnnnnnnnnnnnnnnnnnnnnnnnnnnnnnnnnnnnnnnnnnnnnnnnnnnnnnnnnnnnnnnnnnnnnnnnnnnnnnnnnnnnnnnnnnnnnnnnnnnnnnnnnnnnnnnnnnnnnnnnnnnnnnnnnnnnnnnnnnnnnnnnnnnnnnnnnnnnnnnnnnnnnnnnnnnnnnnnnnnnnnnnnnnnnnnnnnnnnnnnnnnnnnnnnnnnnnnnnnnnnnnnnnnnnnnnnnnnnnnnnnnnnnnnnnnnnnnnnnnnnnnnnnnnnnnnnnnnnnnnnnnnnnnnnnnnnnnnnnnnnnnnnnnnnnnnnnnnnnnnnnnnnnnnnnnnnnnnnnnnnnnnnnnnnnnnnnnnnnnnnnnnnnnnnnnnnnnnnnnnnnnnnnnnnnnnnnnnnnnnnnnnnnnnnnnnnnnnnnnnnnnnnnnnnnnnnnnnnnnnnnnnnnnnnnnnnnnnnnnnnnnnnnnnnnnnnnnnnnnnnnnnnnnnnnnnnnnnnnnnnnnnnnnnnnnnnnnnnnnnnnnnnnnnnnnnnnnnnnnnnnnnnnnnnnnnnnnnnnnnnnnnnnnnnnnnnnnnnnnnnnnnnnnnnnnnnnnnnnnnnnnnnnnnnnnnnnnnnnnnnnnnnnnnnnnnnnnnnnnnnnnnnnnnnnnnnnnnnnnnnnnnnnnnnnnnnnnnnnnnnnnnnnnnnnnnnnnnnnnnnnnnnnnnnnnnnnnnnnnnnnnnnnnnnnnnnnnnnnnnnnnnnnnnnnnnnnnnnnnnnnnnnnnnnnnnnnnnnnnnnnnnnnnnnnnnnnnnnnnnnnnnnnnnnnnnnnnnnnnnnnnnnnnnnnnnnnnnnnnnnnnnnnnnnnnnnnnnnnnnnnnnnnnnnnnnnnnnnnnnnnnnnnnnnnnnnnnnnnnnnnnnnnnnnnnnnnnnnnnnnnnnnnnnnnnnnnnnnnnnnnnnnnnnnnnnnnnnnnnnnnnnnnnnnnnnnnnnnnnnnnnnnnnnnnnnnnnnnnnnnnnnnnnnnnnnnnnnnnnnnnnnnnnnnnnnnnnnnnnnnnnnnnnnnnnnnnnnnnnnnnnnnnnnnnnnnnnnnnnnnnnnnnnnnnnnnnnnnnnnnnnnnnnnnnnnnnnnnnnnnnnnnnnnnnnnnnnnnnnnnnnnnnnnnnnnnnnnnnnnnnnnnnnnnnnnnnnnnnnnnnnnnnnnnnnnnnnnnnnnnnnnnnnnnnnnnnnnnnnnnnnnnnnnnnnnnnnnnnnnnnnnnnnnnnnnnnnnnnnnnnnnnnnnnnnnnnnnnnnnnnnnnnnnnnnnnnnnnnnnnnnnnnnnnnnnnnnnnnnnnnnnnnnnnnnnnnnnnnnnnnnnnnnnnnnnnnnnnnnnnnnnnnnnnnnnnnnnnnnnnnnnnnnnnnnnnnnnnnnnnnnnnnnnnnnnnnnnnnnnnnnnnnnnnnnnnnnnnnnnnnnnnnnnnnnnnnnnnnnnnnnnnnnnnnnnnnnnnnnnnnnnnnnnnnnnnnnnnnnnnnnnnnnnnnnnnnnnnnnnnnnnnnnnnnnnnnnnnnnnnnnnnnnnnnnnnnnnnnnnnnnnnnnnnnnnnnnnnnnnnnnnnnnnnnnnnnnnnnnnnnnnnnnnnnnnnnnnnnnnnnnnnnnnnnnnnnnnnnnnnnnnnnnnnnnnnnnnnnnnnnnnnnnnnnnnnnnnnnnnnnnnnnnnnnnnnnnnnnnnnnnnnnnnnnnnnnnnnnnnnnnnnnnnnnnnnnnnnnnnnnnnnnnnnnnnnnnnnnnnnnnnnnnnnnnnnnnnnnnnnnnnnnnnnnnnnnnnnnnnnnnnnnnnnnnnnnnnnnnnnnnnnnnnnnnnnnnnnnnnnnnnnnnnnnnnnnnnnnnnnnnnnnnnnnnnnnnnnnnnnnnnnnnnnnnnnnnnnnnnnnnnnnnnnnnnnnnnnnnnnnnnnnnnnnnnnnnnnnnnnnnnnnnnnnnnnnnnnnnnnnnnnnnnnnnnnnnnnnnnnnnnnnnnnnnnnnnnnnnnnnnnnnnnnnnnnnnnnnnnnnnnnnnnnnnnnnnnnnnnnnnnnnnnnnnnnnnnnnnnnnnnnnnnnnnnnnnnnnnnnnnnnnnnnnnnnnnnnnnnnnnnnnnnnnnnnnnnnnnnnnnnnnnnnnnnnnnnnnnnnnnnnnnnnnnnnnnnnnnnnnnnnnnnnnnnnnnnnnnnnnnnnnnnnnnnnnnnnnnnnnnnnnnnnnnnnnnnnnnnnnnnnnnnnnnnnnnnnnnnnnnnnnnnnnnnnnnnnnnnnnnnnnnnnnnnnnnnnnnnnnnnnnnnnnnnnnnnnnnnnnnnnnnnnnnnnnnnnnnnnnnnnnnnnnnnnnnnnnnnnnnnnnnnnnnnnnnnnnnnnnnnnnnnnnnnnnnnnnnnnnnnnnnnnnnnnnnnnnnnnnnnnnnnnnnnnnnnnnnnnnnnnnnnnnnnnnnnnnnnnnnnnnnnnnnnnnnnnnnnnnnnnnnnnnnnnnnnnnnnnnnnnnnnnnnnnnnnnnnnnnnnnnnnnnnnnnnnnnnnnnnnnnnnnnnnnnnnnnnnnnnnnnnnnnnnnnnnnnnnnnnnnnnnnnnnnnnnnnnnnnnnnnnnnnnnnnnnnnnnnnnnnnnnnnnnnnnnnnnnnnnnnnnnnnnnnnnnnnnnnnnnnnnnnnnnnnnnnnnnnnnnnnnnnnnnnnnnnnnnnnnnnnnnnnnnnnnnnnnnnnnnnnnnnnnnnnnnnnnnnnnnnnnnnnnnnnnnnnnnnnnnnnnnnnnnnnnnnnnnnnnnnnnnnnnnnnnnnnnnnnnnnnnnnnnnnnnnnnnnnnnnnnnnnnnnnnnnnnnnnnnnnnnnnnnnnnnnnnnnnnnnnnnnnnnnnnnnnnnnnnnnnnnnnnnnnnnnnnnnnnnnnnnnnnnnnnnnnnnnnnnnnnnnnnnnnnnnnnnnnnnnnnnnnnnnnnnnnnnnnnnnnnnnnnnnnnnnnnnnnnnnnnnnnnnnnnnnnnnnnnnnnnnnnnnnnnnnnnnnnnnnnnnnnnnnnnnnnnnnnnnnnnnnnnnnnnnnnnnnnnnnnnnnnnnnnnnnnnnnnnnnnnnnnnnnnnnnnnnnnnnnnnnnnnnnnnnnnnnnnnnnnnnnnnnnnnnnnnnnnnnnnnnnnnnnnnnnnnnnnnnnnnnnnnnnnnnnnnnnnnnnnnnnnnnnnnnnnnnnnnnnnnnnnnnnnnnnnnnnnnnnnnnnnnnnnnnnnnnnnnnnnnnnnnnnnnnnnnnnnnnnnnnnnnnnnnnnnnnnnnnnnnnnnnnnnnnnnnnnnnnnnnnnnnnnnnnnnnnnnnnnnnnnnnnnnnnnnnnnnnnnnnnnnnnnnnnnnnnnnnnnnnnnnnnnnnnnnnnnnnnnnnnnnnnnnnnnnnnnnnnnnnnnnnnnnnnnnnnnnnnnnnnnnnnnnnnnnnnnnnnnnnnnnnnnnnnnnnnnnnnnnnnnnnnnnnnnnnnnnnnnnnnnnnnnnnnnnnnnnnnnnnnnnnnnnnnnnnnnnnnnnnnnnnnnnnnnnnnnnnnnnnnnnnnnnnnnnnnnnnnnnnnnnnnnnnnnnnnnnnnnnnnnnnnnnnnnnnnnnnnnnnnnnnnnnnnnnnnnnnnnnnnnnnnnnnnnnnnnnnnnnnnnnnnnnnnnnnnnnnnnnnnnnnnnnnnnnnnnnnnnnnnnnnnnnnnnnnnnnnnnnnnnnnnnnnnnnnnnnnnnnnnnnnnnnnnnnnnnnnnnnnnnnnnnnnnnnnnnnnnnnnnnnnnnnnnnnnnnnnnnnnnnnnnnnnnnnnnnnnnnnnnnnnnnnnnnnnnnnnnnnnnnnnnnnnnnnnnnnnnnnnnnnnnnnnnnnnnnnnnnnnnnnnnnnnnnnnnnnnnnnnnnnnnnnnnnnnnnnnnnnnnnnnnnnnnnnnnnnnnnnnnnnnnnnnnnnnnnnnnnnnnnnnnnnnnnnnnnnnnnnnnnnnnnnnnnnnnnnnnnnnnnnnnnnnnnnnnnnnnnnnnnnnnnnnnnnnnnnnnnnnnnnnnnnnnnnnnnnnnnnnnnnnnnnnnnnnnnnnnnnnnnnnnnnnnnnnnnnnnnnnnnnnnnnnnnnnnnnnnnnnnnnnnnnnnnnnnnnnnnnnnnnnnnnnnnnnnnnnnnnnnnnnnnnnnnnnnnnnnnnnnnnnnnnnnnnnnnnnnnnnnnnnnnnnnnnnnnnnnnnnnnnnnnnnnnnnnnnnnnnnnnnnnnnnnnnnnnnnnnnnnnnnnnnnnnnnnnnnnnnnnnnnnnnnnnnnnnnnnnnnnnnnnnnnnnnnnnnnnnnnnnnnnnnnnnnnnnnnnnnnnnnnnnnnnnnnnnnnnnnnnnnnnnnnnnnnnnnnnnnnnnnnnnnnnnnnnnnnnnnnnnnnnnnnnnnnnnnnnnnnnnnnnnnnnnnnnnnnnnnnnnnnnnnnnnnnnnnnnnnnnnnnnnnnnnnnnnnnnnnnnnnnnnnnnnnnnnnnnnnnnnnnnnnnnnnnnnnnnnnnnnnnnnnnnnnnnnnnnnnnnnnnnnnnnnnnnnnnnnnnnnnnnnnnnnnnnnnnnnnnnnnnnnnnnnnnnnnnnnnnnnnnnnnnnnnnnnnnnnnnnnnnnnnnnnnnnnnnnnnnnnnnnnnnnnnnnnnnnnnnnnnnnnnnnnnnnnnnnnnnnnnnnnnnnnnnnnnnnnnnnnnnnnnnnnnnnnnnnnnnnnnnnnnnnnnnnnnnnnnnnnnnnnnnnnnnnnnnnnnnnnnnnnnnnnnnnnnnnnnnnnnnnnnnnnnnnnnnnnnnnnnnnnnnnnnnnnnnnnnnnnnnnnnnnnnnnnnnnnnnnnnnnnnnnnnnnnnnnnnnnnnnnnnnnnnnnnnnnnnnnnnnnnnnnnnnnnnnnnnnnnnnnnnnnnnnnnnnnnnnnnnnnnnnnnnnnnnnnnnnnnnnnnnnnnnnnnnnnnnnnnnnnnnnnnnnnnnnnnnnnnnnnnnnnnnnnnnnnnnnnnnnnnnnnnnnnnnnnnnnnnnnnnnnnnnnnnnnnnnnnnnnnnnnnnnnnnnnnnnnnnnnnnnnnnnnnnnnnnnnnnnnnnnnnnnnnnnnnnnnnnnnnnnnnnnnnnnnnnnnnnnnnnnnnnnnnnnnnnnnnnnnnnnnnnnnnnnnnnnnnnnnnnnnnnnnnnnnnnnnnnnnnnnnnnnnnnnnnnnnnnnnnnnnnnnnnnnnnnnnnnnnnnnnnnnnnnnnnnnnnnnnnnnnnnnnnnnnnnnnnnnnnnnnnnnnnnnnnnnnnnnnnnnnnnnnnnnnnnnnnnnnnnnnnnnnnnnnnnnnnnnnnnnnnnnnnnnnnnnnnnnnnnnnnnnnnnnnnnnnnnnnnnnnnnnnnnnnnnnnnnnnnnnnnnnnnnnnnnnnnnnnnnnnnnnnnnnnnnnnnnnnnnnnnnnnnnnnnnnnnnnnnnnnnnnnnnnnnnnnnnnnnnnnnnnnnnnnnnnnnnnnnnnnnnnnnnnnnnnnnnnnnnnnnnnnnnnnnnnnnnnnnnnnnnnnnnnnnnnnnnnnnnnnnnnnnnnnnnnnnnnnnnnnnnnnnnnnnnnnnnnnnnnnnnnnnnnnnnnnnnnnnnnnnnnnnnnnnnnnnnnnnnnnnnnnnnnnnnnnnnnnnnnnnnnnnnnnnnnnnnnnnnnnnnnnnnnnnnnnnnnnnnnnnnnnnnnnnnnnnnnnnnnnnnnnnnnnnnnnnnnnnnnnnnnnnnnnnnnnnnnnnnnnnnnnnnnnnnnnnnnnnnnnnnnnnnnnnnnnnnnnnnnnnnnnnnnnnnnnnnnnnnnnnnnnnnnnnnnnnnnnnnnnnnnnnnnnnnnnnnnnnnnnnnnnnnnnnnnnnnnnnnnnnnnnnnnnnnnnnnnnnnnnnnnnnnnnnnnnnnnnnnnnnnnnnnnnnnnnnnnnnnnnnnnnnnnnnnnnnnnnnnnnnnnnnnnnnnnnnnnnnnnnnnnnnnnnnnnnnnnnnnnnnnnnnnnnnnnnnnnnnnnnnnnnnnnnnnnnnnnnnnnnnnnnnnnnnnnnnnnnnnnnnnnnnnnnnnnnnnnnnnnnnnnnnnnnnnnnnnnnnnnnnnnnnnnnnnnnnnnnnnnnnnnnnnnnnnnnnnnnnnnnnnnnnnnnnnnnnnnnnnnnnnnnnnnnnnnnnnnnnnnnnnnnnnnnnnnnnnnnnnnnnnnnnnnnnnnnnnnnnnnnnnnnnnnnnnnnnnnnnnnnnnnnnnnnnnnnnnnnnnnnnnnnnnnnnnnnnnnnnnnnnnnnnnnnnnnnnnnnnnnnnnnnnnnnnnnnnnnnnnnnnnnnnnnnnnnnnnnnnnnnnnnnnnnnnnnnnnnnnnnnnnnnnnnnnnnnnnnnnnnnnnnnnnnnnnnnnnnnnnnnnnnnnnnnnnnnnnnnnnnnnnnnnnnnnnnnnnnnnnnnnnnnnnnnnnnnnnnnnnnnnnnnnnnnnnnnnnnnnnnnnnnnnnnnnnnnnnnnnnnnnnnnnnnnnnnnnnnnnnnnnnnnnnnnnnnnnnnnnnnnnnnnnnnnnnnnnnnnnnnnnnnnnnnnnnnnnnnnnnnnnnnnnnnnnnnnnnnnnnnnnnnnnnnnnnnnnnnnnnnnnnnnnnnnnnnnnnnnnnnnnnnnnnnnnnnnnnnnnnnnnnnnnnnnnnnnnnnnnnnnnnnnnnnnnnnnnnnnnnnnnnnnnnnnnnnnnnnnnnnnnnnnnnnnnnnnnnnnnnnnnnnnnnnnnnnnnnnnnnnnnnnnnnnnnnnnnnnnnnnnnnnnnnnnnnnnnnnnnnnnnnnnnnnnnnnnnnnnnnnnnnnnnnnnnnnnnnnnnnnnnnnnnnnnnnnnnnnnnnnnnnnnnnnnnnnnnnnnnnnnnnnnnnnnnnnnnnnnnnnnnnnnnnnnnnnnnnnnnnnnnnnnnnnnnnnnnnnnnnnnnnnnnnnnnnnnnnnnnnnnnnnnnnnnnnnnnnnnnnnnnnnnnnnnnnnnnnnnnnnnnnnnnnnnnnnnnnnnnnnnnnnnnnnnnnnnnnnnnnnnnnnnnnnnnnnnnnnnnnnnnnnnnnnnnnnnnnnnnnnnnnnnnnnnnnnnnnnnnnnnnnnnnnnnnnnnnnnnnnnnnnnnnnnnnnnnnnnnnnnnnnnnnnnnnnnnnnnnnnnnnnnnnnnnnnnnnnnnnnnnnnnnnnnnnnnnnnnnnnnnnnnnnnnnnnnnnnnnnnnnnnnnnnnnnnnnnnnnnnnnnnnnnnnnnnnnnnnnnnnnnnnnnnnnnnnnnnnnnnnnnnnnnnnnnnnnnnnnnnnnnnnnnnnnnnnnnnnnnnnnnnnnnnnnnnnnnnnnnnnnnnnnnnnnnnnnnnnnnnnnnnnnnnnnnnnnnnnnnnnnnnnnnnnnnnnnnnnnnnnnnnnnnnnnnnnnnnnnnnnnnnnnnnnnnnnnnnnnnnnnnnnnnnnnnnnnnnnnnnnnnnnnnnnnnnnnnnnnnnnnnnnnnnnnnnnnnnnnnnnnnnnnnnnnnnnnnnnnnnnnnnnnnnnnnnnnnnnnnnnnnnnnnnnnnnnnnnnnnnnnnnnnnnnnnnnnnnnnnnnnnnnnnnnnnnnnnnnnnnnnnnnnnnnnnnnnnnnnnnnnnnnnnnnnnnnnnnnnnnnnnnnnnnnnnnnnnnnnnnnnnnnnnnnnnnnnnnnnnnnnnnnnnnnnnnnnnnnnnnnnnnnnnnnnnnnnnnnnnnnnnnnnnnnnnnnnnnnnnnnnnnnnnnnnnnnnnnnnnnnnnnnnnnnnnnnnnnnnnnnnnnnnnnnnnnnnnnnnnnnnnnnnnnnnnnnnnnnnnnnnnnnnnnnnnnnnnnnnnnnnnnnnnnnnnnnnnnnnnnnnnnnnnnnnnnnnnnnnnnnnnnnnnnnnnnnnnnnnnnnnnnnnnnnnnnnnnnnnnnnnnnnnnnnnnnnnnnnnnnnnnnnnnnnnnnnnnnnnnnnnnnnnnnnnnnnnnnnnnnnnnnnnnnnnnnnnnnnnnnnnnnnnnnnnnnnnnnnnnnnnnnnnnnnnnnnnnnnnnnnnnnnnnnnnnnnnnnnnnnnnnnnnnnnnnnnnnnnnnnnnnnnnnnnnnnnnnnnnnnnnnnnnnnnnnnnnnnnnnnnnnnnnnnnnnnnnnnnnnnnnnnnnnnnnnnnnnnnnnnnnnnnnnnnnnnnnnnnnnnnnnnnnnnnnnnnnnnnnnnnnnnnnnnnnnnnnnnnnnnnnnnnnnnnnnnnnnnnnnnnnnnnnnnnnnnnnnnnnnnnnnnnnnnnnnnnnnnnnnnnnnnnnnnnnnnnnnnnnnnnnnnnnnnnnnnnnnnnnnnnnnnnnnnnnnnnnnnnnnnnnnnnnnnnnnnnnnnnnnnnnnnnnnnnnnnnnnnnnnnnnnnnnnnnnnnnnnnnnnnnnnnnnnnnnnnnnnnnnnnnnnnnnnnnnnnnnnnnnnnnnnnnnnnnnnnnnnnnnnnnnnnnnnnnnnnnnnnnnnnnnnnnnnnnnnnnnnnnnnnnnnnnnnnnnnnnnnnnnnnnnnnnnnnnnnnnnnnnnnnnnnnnnnnnnnnnnnnnnnnnnnnnnnnnnnnnnnnnnnnnnnnnnnnnnnnnnnnnnnnnnnnnnnnnnnnnnnnnnnnnnnnnnnnnnnnnnnnnnnnnnnnnnnnnnnnnnnnnnnnnnnnnnnnnnnnnnnnnnnnnnnnnnnnnnnnnnnnnnnnnnnnnnnnnnnnnnnnnnnnnnnnnnnnnnnnnnnnnnnnnnnnnnnnnnnnnnnnnnnnnnnnnnnnnnnnnnnnnnnnnnnnnnnnnnnnnnnnnnnnnnnnnnnnnnnnnnnnnnnnnnnnnnnnnnnnnnnnnnnnnnnnnnnnnnnnnnnnnnnnnnnnnnnnnnnnnnnnnnnnnnnnnnnnnnnnnnnnnnnnnnnnnnnnnnnnnnnnnnnnnnnnnnnnnnnnnnnnnnnnnnnnnnnnnnnnnnnnnnnnnnnnnnnnnnnnnnnnnnnnnnnnnnnnnnnnnnnnnnnnnnnnnnnnnnnnnnnnnnnnnnnnnnnnnnnnnnnnnnnnnnnnnnnnnnnnnnnnnnnnnnnnnnnnnnnnnnnnnnnnnnnnnnnnnnnnnnnnnnnnnnnnnnnnnnnnnnnnnnnnnnnnnnnnnnnnnnnnnnnnnnnnnnnnnnnnnnnnnnnnnnnnnnnnnnnnnnnnnnnnnnnnnnnnnnnnnnnnnnnnnnnnnnnnnnnnnnnnnnnnnnnnnnnnnnnnnnnnnnnnnnnnnnnnnnnnnnnnnnnnnnnnnnnnnnnnnnnnnnnnnnnnnnnnnnnnnnnnnnnnnnnnnnnnnnnnnnnnnnnnnnnnnnnnnnnnnnnnnnnnnnnnnnnnnnnnnnnnnnnnnnnnnnnnnnnnnnnnnnnnnnnnnnnnnnnnnnnnnnnnnnnnnnnnnnnnnnnnnnnnnnnnnnnnnnnnnnnnnnnnnnnnnnnnnnnnnnnnnnnnnnnnnnnnnnnnnnnnnnnnnnnnnnnnnnnnnnnnnnnnnnnnnnnnnnnnnnnnnnnnnnnnnnnnnnnnnnnnnnnnnnnnnnnnnnnnnnnnnnnnnnnnnnnnnnnnnnnnnnnnnnnnnnnnnnnnnnnnnnnnnnnnnnnnnnnnnnnnnnnnnnnnnnnnnnnnnnnnnnnnnnnnnnnnnnnnnnnnnnnnnnnnnnnnnnnnnnnnnnnnnnnnnnnnnnnnnnnnnnnnnnnnnnnnnnnnnnnnnnnnnnnnnnnnnnnnnnnnnnnnnnnnnnnnnnnnnnnnnnnnnnnnnnnnnnnnnnnnnnnnnnnnnnnnnnnnnnnnnnnnnnnnnnnnnnnnnnnnnnnnnnnnnnnnnnnnnnnnnnnnnnnnnnnnnnnnnnnnnnnnnnnnnnnnnnnnnnnnnnnnnnnnnnnnnnnnnnnnnnnnnnnnnnnnnnnnnnnnnnnnnnnnnnnnnnnnnnnnnnnnnnnnnnnnnnnnnnnnnnnnnnnnnnnnnnnnnnnnnnnnnnnnnnnnnnnnnnnnnnnnnnnnnnnnnnnnnnnnnnnnnnnnnnnnnnnnnnnnnnnnnnnnnnnnnnnnnnnnnnnnnnnnnnnnnnnnnnnnnnnnnnnnnnnnnnnnnnnnnnnnnnnnnnnnnnnnnnnnnnnnnnnnnnnnnnnnnnnnnnnnnnnnnnnnnnnnnnnnnnnnnnnnnnnnnnnnnnnnnnnnnnnnnnnnnnnnnnnnnnnnnnnnnnnnnnnnnnnnnnnnnnnnnnnnnnnnnnnnnnnnnnnnnnnnnnnnnnnnnnnnnnnnnnnnnnnnnnnnnnnnnnnnnnnnnnnnnnnnnnnnnnnnnnnnnnnnnnnnnnnnnnnnnnnnnnnnnnnnnnnnnnnnnnnnnnnnnnnnnnnnnnnnnnnnnnnnnnnnnnnnnnnnnnnnnnnnnnnnnnnnnnnnnnnnnnnnnnnnnnnnnnnnnnnnnnnnnnnnnnnnnnnnnnnnnnnnnnnnnnnnnnnnnnnnnnnnnnnnnnnnnnnnnnnnnnnnnnnnnnnnnnnnnnnnnnnnnnnnnnnnnnnnnnnnnnnnnnnnnnnnnnnnnnnnnnnnnnnnnnnnnnnnnnnnnnnnnnnnnnnnnnnnnnnnnnnnnnnnnnnnnnnnnnnnnnnnnnnnnnnnnnnnnnnnnnnnnnnnnnnnnnnnnnnnnnnnnnnnnnnnnnnnnnnnnnnnnnnnnnnnnnnnnnnnnnnnnnnnnnnnnnnnnnnnnnnnnnnnnnnnnnnnnnnnnnnnnnnnnnnnnnnnnnnnnnnnnnnnnnnnnnnnnnnnnnnnnnnnnnnnnnnnnnnnnnnnnnnnnnnnnnnnnnnnnnnnnnnnnnnnnnnnnnnnnnnnnnnnnnnnnnnnnnnnnnnnnnnnnnnnnnnnnnnnnnnnnnnnnnnnnnnnnnnnnnnnnnnnnnnnnnnnnnnnnnnnnnnnnnnnnnnnnnnnnnnnnnnnnnnnnnnnnnnnnnnnnnnnnnnnnnnnnnnnnnnnnnnnnnnnnnnnnnnnnnnnnnnnnnnnnnnnnnnnnnnnnnnnnnnnnnnnnnnnnnnnnnnnnnnnnnnnnnnnnnnnnnnnnnnnnnnnnnnnnnnnnnnnnnnnnnnnnnnnnnnnnnnnnnnnnnnnnnnnnnnnnnnnnnnnnnnnnnnnnnnnnnnnnnnnnnnnnnnnnnnnnnnnnnnnnnnnnnnnnnnnnnnnnnnnnnnnnnnnnnnnnnnnnnnnnnnnnnnnnnnnnnnnnnnnnnnnnnnnnnnnnnnnnnnnnnnnnnnnnnnnnnnnnnnnnnnnnnnnnnnnnnnnnnnnnnnnnnnnnnnnnnnnnnnnnnnnnnnnnnnnnnnnnnnnnnnnnnnnnnnnnnnnnnnnnnnnnnnnnnnnnnnnnnnnnnnnnnnnnnnnnnnnnnnnnnnnnnnnnnnnnnnnnnnnnnnnnnnnnnnnnnnnnnnnnnnnnnnnnnnnnnnnnnnnnnnnnnnnnnnnnnnnnnnnnnnnnnnnnnnnnnnnnnnnnnnnnnnnnnnnnnnnnnnnnnnnnnnnnnnnnnnnnnnnnnnnnnnnnnnnnnnnnnnnnnnnnnnnnnnnnnnnnnnnnnnnnnnnnnnnnnnnnnnnnnnnnnnnnnnnnnnnnnnnnnnnnnnnnnnnnnnnnnnnnnnnnnnnnnnnnnnnnnnnnnnnnnnnnnnnnnnnnnnnnnnnnnnnnnnnnnnnnnnnnnnnnnnnnnnnnnnnnnnnnnnnnnnnnnnnnnnnnnnnnnnnnnnnnnnnnnnnnnnnnnnnnnnnnnnnnnnnnnnnnnnnnnnnnnnnnnnnnnnnnnnnnnnnnnnnnnnnnnnnnnnnnnnnnnnnnnnnnnnnnnnnnnnnnnnnnnnnnnnnnnnnnnnnnnnnnnnnnnnnnnnnnnnnnnnnnnnnnnnnnnnnnnnnnnnnnnnnnnnnnnnnnnnnnnnnnnnnnnnnnnnnnnnnnnnnnnnnnnnnnnnnnnnnnnnnnnnnnnnnnnnnnnnnnnnnnnnnnnnnnnnnnnnnnnnnnnnnnnnnnnnnnnnnnnnnnnnnnnnnnnnnnnnnnnnnnnnnnnnnnnnnnnnnnnnnnnnnnnnnnnnnnnnnnnnnnnnnnnnnnnnnnnnnnnnnnnnnnnnnnnnnnnnnnnnnnnnnnnnnnnnnnnnnnnnnnnnnnnnnnnnnnnnnnnnnnnnnnnnnnnnnnnnnnnnnnnnnnnnnnnnnnnnnnnnnnnnnnnnnnnnnnnnnnnnnnnnnnnnnnnnnnnnnnnnnnnnnnnnnnnnnnnnnnnnnnnnnnnnnnnnnnnnnnnnnnnnnnnnnnnnnnnnnnnnnnnnnnnnnnnnnnnnnnnnnnnnnnnnnnnnnnnnnnnnnnnnnnnnnnnnnnnnnnnnnnnnnnnnnnnnnnnnnnnnnnnnnnnnnnnnnnnnnnnnnnnnnnnnnnnnnnnnnnnnnnnnnnnnnnnnnnnnnnnnnnnnnnnnnnnnnnnnnnnnnnnnnnnnnnnnnnnnnnnnnnnnnnnnnnnnnnnnnnnnnnnnnnnnnnnnnnnnnnnnnnnnnnnnnnnnnnnnnnnnnnnnnnnnnnnnnnnnnnnnnnnnnnnnnnnnnnnnnnnnnnnnnnnnnnnnnnnnnnnnnnnnnnnnnnnnnnnnnnnnnnnnnnnnnnnnnnnnnnnnnnnnnnnnnnnnnnnnnnnnnnnnnnnnnnnnnnnnnnnnnnnnnnnnnnnnnnnnnnnnnnnnnnnnnnnnnnnnnnnnnnnnnnnnnnnnnnnnnnnnnnnnnnnnnnnnnnnnnnnnnnnnnnnnnnnnnnnnnnnnnnnnnnnnnnnnnnnnnnnnnnnnnnnnnnnnnnnnnnnnnnnnnnnnnnnnnnnnnnnnnnnnnnnnnnnnnnnnnnnnnnnnnnnnnnnnnnnnnnnnnnnnnnnnnnnnnnnnnnnnnnnnnnnnnnnnnnnnnnnnnnnnnnnnnnnnnnnnnnnnnnnnnnnnnnnnnnnnnnnnnnnnnnnnnnnnnnnnnnnnnnnnnnnnnnnnnnnnnnnnnnnnnnnnnnnnnnnnnnnnnnnnnnnnnnnnnnnnnnnnnnnnnnnnnnnnnnnnnnnnnnnnnnnnnnnnnnnnnnnnnnnnnnnnnnnnnnnnnnnnnnnnnnnnnnnnnnnnnnnnnnnnnnnnnnnnnnnnnnnnnnnnnnnnnnnnnnnnnnnnnnnnnnnnnnnnnnnnnnnnnnnnnnnnnnnnnnnnnnnnnnnnnnnnnnnnnnnnnnnnnnnnnnnnnnnnnnnnnnnnnnnnnnnnnnnnnnnnnnnnnnnnnnnnnnnnnnnnnnnnnnnnnnnnnnnnnnnnnnnnnnnnnnnnnnnnnnnnnnnnnnnnnnnnnnnnnnnnnnnnnnnnnnnnnnnnnnnnnnnnnnnnnnnnnnnnnnnnnnnnnnnnnnnnnnnnnnnnnnnnnnnnnnnnnnnnnnnnnnnnnnnnnnnnnnnnnnnnnnnnnnnnnnnnnnnnnnnnnnnnnnnnnnnnnnnnnnnnnnnnnnnnnnnnnnnnnnnnnnnnnnnnnnnnnnnnnnnnnnnnnnnnnnnnnnnnnnnnnnnnnnnnnnnnnnnnnnnnnnnnnnnnnnnnnnnnnnnnnnnnnnnnnnnnnnnnnnnnnnnnnnnnnnnnnnnnnnnnnnnnnnnnnnnnnnnnnnnnnnnnnnnnnnnnnnnnnnnnnnnnnnnnnnnnnnnnnnnnnnnnnnnnnnnnnnnnnnnnnnnnnnnnnnnnnnnnnnnnnnnnnnnnnnnnnnnnnnnnnnnnnnnnnnnnnnnnnnnnnnnnnnnnnnnnnnnnnnnnnnnnnnnnnnnnnnnnnnnnnnnnnnnnnnnnnnnnnnnnnnnnnnnnnnnnnnnnnnnnnnnnnnnnnnnnnnnnnnnnnnnnnnnnnnnnnnnnnnnnnnnnnnnnnnnnnnnnnnnnnnnnnnnnnnnnnnnnnnnnnnnnnnnnnnnnnnnnnnnnnnnnnnnnnnnnnnnnnnnnnnnnnnnnnnnnnnnnnnnnnnnnnnnnnnnnnnnnnnnnnnnnnnnnnnnnnnnnnnnnnnnnnnnnnnnnnnnnnnnnnnnnnnnnnnnnnnnnnnnnnnnnnnnnnnnnnnnnnnnnnnnnnnnnnnnnnnnnnnnnnnnnnnnnnnnnnnnnnnnnnnnnnnnnnnnnnnnnnnnnnnnnnnnnnnnnnnnnnnnnnnnnnnnnnnnnnnnnnnnnnnnnnnnnnnnnnnnnnnnnnnnnnnnnnnnnnnnnnnnnnnnnnnnnnnnnnnnnnnnnnnnnnnnnnnnnnnnnnnnnnnnnnnnnnnnnnnnnnnnnnnnnnnnnnnnnnnnnnnnnnnnnnnnnnnnnnnnnnnnnnnnnnnnnnnnnnnnnnnnnnnnnnnnnnnnnnnnnnnnnnnnnnnnnnnnnnnnnnnnnnnnnnnnnnnnnnnnnnnnnnnnnnnnnnnnnnnnnnnnnnnnnnnnnnnnnnnnnnnnnnnnnnnnnnnnnnnnnnnnnnnnnnnnnnnnnnnnnnnnnnnnnnnnnnnnnnnnnnnnnnnnnnnnnnnnnnnnnnnnnnnnnnnnnnnnnnnnnnnnnnnnnnnnnnnnnnnnnnnnnnnnnnnnnnnnnnnnnnnnnnnnnnnnnnnnnnnnnnnnnnnnnnnnnnnnnnnnnnnnnnnnnnnnnnnnnnnnnnnnnnnnnnnnnnnnnnnnnnnnnnnnnnnnnnnnnnnnnnnnnnnnnnnnnnnnnnnnnnnnnnnnnnnnnnnnnnnnnnnnnnnnnnnnnnnnnnnnnnnnnnnnnnnnnnnnnnnnnnnnnnnnnnnnnnnnnnnnnnnnnnnnnnnnnnnnnnnnnnnnnnnnnnnnnnnnnnnnnnnnnnnnnnnnnnnnnnnnnnnnnnnnnnnnnnnnnnnnnnnnnnnnnnnnnnnnnnnnnnnnnnnnnnnnnnnnnnnnnnnnnnnnnnnnnnnnnnnnnnnnnnnnnnnnnnnnnnnnnnnnnnnnnnnnnnnnnnnnnnnnnnnnnnnnnnnnnnnnnnnnnnnnnnnnnnnnnnnnnnnnnnnnnnnnnnnnnnnnnnnnnnnnnnnnnnnnnnnnnnnnnnnnnnnnnnnnnnnnnnnnnnnnnnnnnnnnnnnnnnnnnnnnnnnnnnnnnnnnnnnnnnnnnnnnnnnnnnnnnnnnnnnnnnnnnnnnnnnnnnnnnnnnnnnnnnnnnnnnnnnnnnnnnnnnnnnnnnnnnnnnnnnnnnnnnnnnnnnnnnnnnnnnnnnnnnnnnnnnnnnnnnnnnnnnnnnnnnnnnnnnnnnnnnnnnnnnnnnnnnnnnnnnnnnnnnnnnnnnnnnnnnnnnnnnnnnnnnnnnnnnnnnnnnnnnnnnnnnnnnnnnnnnnnnnnnnnnnnnnnnnnnnnnnnnnnnnnnnnnnnnnnnnnnnnnnnnnnnnnnnnnnnnnnnnnnnnnnnnnnnnnnnnnnnnnnnnnnnnnnnnnnnnnnnnnnnnnnnnnnnnnnnnnnnnnnnnnnnnnnnnnnnnnnnnnnnnnnnnnnnnnnnnnnnnnnnnnnnnnnnnnnnnnnnnnnnnnnnnnnnnnnnnnnnnnnnnnnnnnnnnnnnnnnnnnnnnnnnnnnnnnnnnnnnnnnnnnnnnnnnnnnnnnnnnnnnnnnnnnnnnnnnnnnnnnnnnnnnnnnnnnnnnnnnnnnnnnnnnnnnnnnnnnnnnnnnnnnnnnnnnnnnnnnnnnnnnnnnnnnnnnnnnnnnnnnnnnnnnnnnnnnnnnnnnnnnnnnnnnnnnnnnnnnnnnnnnnnnnnnnnnnnnnnnnnnnnnnnnnnnnnnnnnnnnnnnnnnnnnnnnnnnnnnnnnnnnnnnnnnnnnnnnnnnnnnnnnnnnnnnnnnnnnnnnnnnnnnnnnnnnnnnnnnnnnnnnnnnnnnnnnnnnnnnnnnnnnnnnnnnnnnnnnnnnnnnnnnnnnnnnnnnnnnnnnnnnnnnnnnnnnnnnnnnnnnnnnnnnnnnnnnnnnnnnnnnnnnnnnnnnnnnnnnnnnnnnnnnnnnnnnnnnnnnnnnnnnnnnnnnnnnnnnnnnnnnnnnnnnnnnnnnnnnnnnnnnnnnnnnnnnnnnnnnnnnnnnnnnnnnnnnnnnnnnnnnnnnnnnnnnnnnnnnnnnnnnnnnnnnnnnnnnnnnnnnnnnnnnnnnnnnnnnnnnnnnnnnnnnnnnnnnnnnnnnnnnnnnnnnnnnnnnnnnnnnnnnnnnnnnnnnnnnnnnnnnnnnnnnnnnnnnnnnnnnnnnnnnnnnnnnnnnnnnnnnnnnnnnnnnnnnnnnnnnnnnnnnnnnnnnnnnnnnnnnnnnnnnnnnnnnnnnnnnnnnnnnnnnnnnnnnnnnnnnnnnnnnnnnnnnnnnnnnnnnnnnnnnnnnnnnnnnnnnnnnnnnnnnnnnnnnnnnnnnnnnnnnnnnnnnnnnnnnnnnnnnnnnnnnnnnnnnnnnnnnnnnnnnnnnnnnnnnnnnnnnnnnnnnnnnnnnnnnnnnnnnnnnnnnnnnnnnnnnnnnnnnnnnnnnnnnnnnnnnnnnnnnnnnnnnnnnnnnnnnnnnnnnnnnnnnnnnnnnnnnnnnnnnnnnnnnnnnnnnnnnnnnnnnnnnnnnnnnnnnnnnnnnnnnnnnnnnnnnnnnnnnnnnnnnnnnnnnnnnnnnnnnnnnnnnnnnnnnnnnnnnnnnnnnnnnnnnnnnnnnnnnnnnnnnnnnnnnnnnnnnnnnnnnnnnnnnnnnnnnnnnnnnnnnnnnnnnnnnnnnnnnnnnnnnnnnnnnnnnnnnnnnnnnnnnnnnnnnnnnnnnnnnnnnnnnnnnnnnnnnnnnnnnnnnnnnnnnnnnnnnnnnnnnnnnnnnnnnnnnnnnnnnnnnnnnnnnnnnnnnnnnnnnnnnnnnnnnnnnnnnnnnnnnnnnnnnnnnnnnnnnnnnnnnnnnnnnnnnnnnnnnnnnnnnnnnnnnnnnnnnnnnnnnnnnnnnnnnnnnnnnnnnnnnnnnnnnnnnnnnnnnnnnnnnnnnnnnnnnnnnnnnnnnnnnnnnnnnnnnnnnnnnnnnnnnnnnnnnnnnnnnnnnnnnnnnnnnnnnnnnnnnnnnnnnnnnnnnnnnnnnnnnnnnnnnnnnnnnnnnnnnnnnnnnnnnnnnnnnnnnnnnnnnnnnnnnnnnnnnnnnnnnnnnnnnnnnnnnnnnnnnnnnnnnnnnnnnnnnnnnnnnnnnnnnnnnnnnnnnnnnnnnnnnnnnnnnnnnnnnnnnnnnnnnnnnnnnnnnnnnnnnnnnnnnnnnnnnnnnnnnnnnnnnnnnnnnnnnnnnnnnnnnnnnnnnnnnnnnnnnnnnnnnnnnnnnnnnnnnnnnnnnnnnnnnnnnnnnnnnnnnnnnnnnnnnnnnnnnnnnnnnnnnnnnnnnnnnnnnnnnnnnnnnnnnnnnnnnnnnnnnnnnnnnnnnnnnnnnnnnnnnnnnnnnnnnnnnnnnnnnnnnnnnnnnnnnnnnnnnnnnnnnnnnnnnnnnnnnnnnnnnnnnnnnnnnnnnnnnnnnnnnnnnnnnnnnnnnnnnnnnnnnnnnnnnnnnnnnnnnnnnnnnnnnnnnnnnnnnnnnnnnnnnnnnnnnnnnnnnnnnnnnnnnnnnnnnnnnnnnnnnnnnnnnnnnnnnnnnnnnnnnnnnnnnnnnnnnnnnnnnnnnnnnnnnnnnnnnnnnnnnnnnnnnnnnnnnnnnnnnnnnnnnnnnnnnnnnnnnnnnnnnnnnnnnnnnnnnnnnnnnnnnnnnnnnnnnnnnnnnnnnnnnnnnnnnnnnnnnnnnnnnnnnnnnnnnnnnnnnnnnnnnnnnnnnnnnnnnnnnnnnnnnnnnnnnnnnnnnnnnnnnnnnnnnnnnnnnnnnnnnnnnnnnnnnnnnnnnnnnnnnnnnnnnnnnnnnnnnnnnnnnnnnnnnnnnnnnnnnnnnnnnnnnnnnnnnnnnnnnnnnnnnnnnnnnnnnnnnnnnnnnnnnnnnnnnnnnnnnnnnnnnnnnnnnnnnnnnnnnnnnnnnnnnnnnnnnnnnnnnnnnnnnnnnnnnnnnnnnnnnnnnnnnnnnnnnnnnnnnnnnnnnnnnnnnnnnnnnnnnnnnnnnnnnnnnnnnnnnnnnnnnnnnnnnnnnnnnnnnnnnnnnnnnnnnnnnnnnnnnnnnnnnnnnnnnnnnnnnnnnnnnnnnnnnnnnnnnnnnnnnnnnnnnnnnnnnnnnnnnnnnnnnnnnnnnnnnnnnnnnnnnnnnnnnnnnnnnnnnnnnnnnnnnnnnnnnnnnnnnnnnnnnnnnnnnnnnnnnnnnnnnnnnnnnnnnnnnnnnnnnnnnnnnnnnnnnnnnnnnnnnnnnnnnnnnnnnnnnnnnnnnnnnnnnnnnnnnnnnnnnnnnnnnnnnnnnnnnnnnnnnnnnnnnnnnnnnnnnnnnnnnnnnnnnnnnnnnnnnnnnnnnnnnnnnnnnnnnnnnnnnnnnnnnnnnnnnnnnnnnnnnnnnnnnnnnnnnnnnnnnnnnnnnnnnnnnnnnnnnnnnnnnnnnnnnnnnnnnnnnnnnnnnnnnnnnnnnnnnnnnnnnnnnnnnnnnnnnnnnnnnnnnnnnnnnnnnnnnnnnnnnnnnnnnnnnnnnnnnnnnnnnnnnnnnnnnnnnnnnnnnnnnnnnnnnnnnnnnnnnnnnnnnnnnnnnnnnnnnnnnnnnnnnnnnnnnnnnnnnnnnnnnnnnnnnnnnnnnnnnnnnnnnnnnnnnnnnnnnnnnnnnnnnnnnnnnnnnnnnnnnnnnnnnnnnnnnnnnnnnnnnnnnnnnnnnnnnnnnnnnnnnnnnnnnnnnnnnnnnnnnnnnnnnnnnnnnnnnnnnnnnnnnnnnnnnnnnnnnnnnnnnnnnnnnnnnnnnnnnnnnnnnnnnnnnnnnnnnnnnnnnnnnnnnnnnnnnnnnnnnnnnnnnnnnnnnnnnnnnnnnnnnnnnnnnnnnnnnnnnnnnnnnnnnnnnnnnnnnnnnnnnnnnnnnnnnnnnnnnnnnnnnnnnnnnnnnnnnnnnnnnnnnnnnnnnnnnnnnnnnnnnnnnnnnnnnnnnnnnnnnnnnnnnnnnnnnnnnnnnnnnnnnnnnnnnnnnnnnnnnnnnnnnnnnnnnnnnnnnnnnnnnnnnnnnnnnnnnnnnnnnnnnnnnnnnnnnnnnnnnnnnnnnnnnnnnnnnnnnnnnnnnnnnnnnnnnnnnnnnnnnnnnnnnnnnnnnnnnnnnnnnnnnnnnnnnnnnnnnnnnnnnnnnnnnnnnnnnnnnnnnnnnnnnnnnnnnnnnnnnnnnnnnnnnnnnnnnnnnnnnnnnnnnnnnnnnnnnnnnnnnnnnnnnnnnnnnnnnnnnnnnnnnnnnnnnnnnnnnnnnnnnnnnnnnnnnnnnnnnnnnnnnnnnnnnnnnnnnnnnnnnnnnnnnnnnnnnnnnnnnnnnnnnnnnnnnnnnnnnnnnnnnnnnnnnnnnnnnnnnnnnnnnnnnnnnnnnnnnnnnnnnnnnnnnnnnnnnnnnnnnnnnnnnnnnnnnnnnnnnnnnnnnnnnnnnnnnnnnnnnnnnnnnnnnnnnnnnnnnnnnnnnnnnnnnnnnnnnnnnnnnnnnnnnnnnnnnnnnnnnnnnnnnnnnnnnnnnnnnnnnnnnnnnnnnnnnnnnnnnnnnnnnnnnnnnnnnnnnnnnnnnnnnnnnnnnnnnnnnnnnnnnnnnnnnnnnnnnnnnnnnnnnnnnnnnnnnnnnnnnnnnnnnnnnnnnnnnnnnnnnnnnnnnnnnnnnnnnnnnnnnnnnnnnnnnnnnnnnnnnnnnnnnnnnnnnnnnnnnnnnnnnnnnnnnnnnnnnnnnnnnnnnnnnnnnnnnnnnnnnnnnnnnnnnnnnnnnnnnnnnnnnnnnnnnnnnnnnnnnnnnnnnnnnnnnnnnnnnnnnnnnnnnnnnnnnnnnnnnnnnnnnnnnnnnnnnnnnnnnnnnnnnnnnnnnnnnnnnnnnnnnnnnnnnnnnnnnnnnnnnnnnnnnnnnnnnnnnnnnnnnnnnnnnnnnnnnnnnnnnnnnnnnnnnnnnnnnnnnnnnnnnnnnnnnnnnnnnnnnnnnnnnnnnnnnnnnnnnnnnnnnnnnnnnnnnnnnnnnnnnnnnnnnnnnnnnnnnnnnnnnnnnnnnnnnnnnnnnnnnnnnnnnnnnnnnnnnnnnnnnnnnnnnnnnnnnnnnnnnnnnnnnnnnnnnnnnnnnnnnnnnnnnnnnnnnnnnnnnnnnnnnnnnnnnnnnnnnnnnnnnnnnnnnnnnnnnnnnnnnnnnnnnnnnnnnnnnnnnnnnnnnnnnnnnnnnnnnnnnnnnnnnnnnnnnnnnnnnnnnnnnnnnnnnnnnnnnnnnnnnnnnnnnnnnnnnnnnnnnnnnnnnnnnnnnnnnnnnnnnnnnnnnnnnnnnnnnnnnnnnnnnnnnnnnnnnnnnnnnnnnnnnnnnnnnnnnnnnnnnnnnnnnnnnnnnnnnnnnnnnnnnnnnnnnnnnnnnnnnnnnnnnnnnnnnnnnnnnnnnnnnnnnnnnnnnnnnnnnnnnnnnnnnnnnnnnnnnnnnnnnnnnnnnnnnnnnnnnnnnnnnnnnnnnnnnnnnnnnnnnnnnnnnnnnnnnnnnnnnnnnnnnnnnnnnnnnnnnnnnnnnnnnnnnnnnnnnnnnnnnnnnnnnnnnnnnnnnnnnnnnnnnnnnnnnnnnnnnnnnnnnnnnnnnnnnnnnnnnnnnnnnnnnnnnnnnnnnnnnnnnnnnnnnnnnnnnnnnnnnnnnnnnnnnnnnnnnnnnnnnnnnnnnnnnnnnnnnnnnnnnnnnnnnnnnnnnnnnnnnnnnnnnnnnnnnnnnnnnnnnnnnnnnnnnnnnnnnnnnnnnnnnnnnnnnnnnnnnnnnnnnnnnnnnnnnnnnnnnnnnnnnnnnnnnnnnnnnnnnnnnnnnnnnnnnnnnnnnnnnnnnnnnnnnnnnnnnnnnnnnnnnnnnnnnnnnnnnnnnnnnnnnnnnnnnnnnnnnnnnnnnnnnnnnnnnnnnnnnnnnnnnnnnnnnnnnnnnnnnnnnnnnnnnnnnnnnnnnnnnnnnnnnnnnnnnnnnnnnnnnnnnnnnnnnnnnnnnnnnnnnnnnnnnnnnnnnnnnnnnnnnnnnnnnnnnnnnnnnnnnnnnnnnnnnnnnnnnnnnnnnnnnnnnnnnnnnnnnnnnnnnnnnnnnnnnnnnnnnnnnnnnnnnnnnnnnnnnnnnnnnnnnnnnnnnnnnnnnnnnnnnnnnnnnnnnnnnnnnnnnnnnnnnnnnnnnnnnnnnnnnnnnnnnnnnnnnnnnnnnnnnnnnnnnnnnnnnnnnnnnnnnnnnnnnnnnnnnnnnnnnnnnnnnnnnnnnnnnnnnnnnnnnnnnnnnnnnnnnnnnnnnnnnnnnnnnnnnnnnnnnnnnnnnnnnnnnnnnnnnnnnnnnnnnnnnnnnnnnnnnnnnnnnnnnnnnnnnnnnnnnnnnnnnnnnnnnnnnnnnnnnnnnnnnnnnnnnnnnnnnnnnnnnnnnnnnnnnnnnnnnnnnnnnnnnnnnnnnnnnnnnnnnnnnnnnnnnnnnnnnnnnnnnnnnnnnnnnnnnnnnnnnnnnnnnnnnnnnnnnnnnnnnnnnnnnnnnnnnnnnnnnnnnnnnnnnnnnnnnnnnnnnnnnnnnnnnnnnnnnnnnnnnnnnnnnnnnnnnnnnnnnnnnnnnnnnnnnnnnnnnnnnnnnnnnnnnnnnnnnnnnnnnnnnnnnnnnnnnnnnnnnnnnnnnnnnnnnnnnnnnnnnnnnnnnnnnnnnnnnnnnnnnnnnnnnnnnnnnnnnnnnnnnnnnnnnnnnnnnnnnnnnnnnnnnnnnnnnnnnnnnnnnnnnnnnnnnnnnnnnnnnnnnnnnnnnnnnnnnnnnnnnnnnnnnnnnnnnnnnnnnnnnnnnnnnnnnnnnnnnnnnnnnnnnnnnnnnnnnnnnnnnnnnnnnnnnnnnnnnnnnnnnnnnnnnnnnnnnnnnnnnnnnnnnnnnnnnnnnnnnnnnnnnnnnnnnnnnnnnnnnnnnnnnnnnnnnnnnnnnnnnnnnnnnnnnnnnnnnnnnnnnnnnnnnnnnnnnnnnnnnnnnnnnnnnnnnnnnnnnnnnnnnnnnnnnnnnnnnnnnnnnnnnnnnnnnnnnnnnnnnnnnnnnnnnnnnnnnnnnnnnnnnnnnnnnnnnnnnnnnnnnnnnnnnnnnnnnnnnnnnnnnnnnnnnnnnnnnnnnnnnnnnnnnnnnnnnnnnnnnnnnnnnnnnnnnnnnnnnnnnnnnnnnnnnnnnnnnnnnnnnnnnnnnnnnnnnnnnnnnnnnnnnnnnnnnnnnnnnnnnnnnnnnnnnnnnnnnnnnnnnnnnnnnnnnnnnnnnnnnnnnnnnnnnnnnnnnnnnnnnnnnnnnnnnnnnnnnnnnnnnnnnnnnnnnnnnnnnnnnnnnnnnnnnnnnnnnnnnnnnnnnnnnnnnnnnnnnnnnnnnnnnnnnnnnnnnnnnnnnnnnnnnnnnnnnnnnnnnnnnnnnnnnnnnnnnnnnnnnnnnnnnnnnnnnnnnnnnnnnnnnnnnnnnnnnnnnnnnnnnnnnnnnnnnnnnnnnnnnnnnnnnnnnnnnnnnnnnnnnnnnnnnnnnnnnnnnnnnnnnnnnnnnnnnnnnnnnnnnnnnnnnnnnnnnnnnnnnnnnnnnnnnnnnnnnnnnnnnnnnnnnnnnnnnnnnnnnnnnnnnnnnnnnnnnnnnnnnnnnnnnnnnnnnnnnnnnnnnnnnnnnnnnnnnnnnnnnnnnnnnnnnnnnnnnnnnnnnnnnnnnnnnnnnnnnnnnnnnnnnnnnnnnnnnnnnnnnnnnnnnnnnnnnnnnnnnnnnnnnnnnnnnnnnnnnnnnnnnnnnnnnnnnnnnnnnnnnnnnnnnnnnnnnnnnnnnnnnnnnnnnnnnnnnnnnnnnnnnnnnnnnnnnnnnnnnnnnnnnnnnnnnnnnnnnnnnnnnnnnnnnnnnnnnnnnnnnnnnnnnnnnnnnnnnnnnnnnnnnnnnnnnnnnnnnnnnnnnnnnnnnnnnnnnnnnnnnnnnnnnnnnnnnnnnnnnnnnnnnnnnnnnnnnnnnnnnnnnnnnnnnnnnnnnnnnnnnnnnnnnnnnnnnnnnnnnnnnnnnnnnnnnnnnnnnnnnnnnnnnnnnnnnnnnnnnnnnnnnnnnnnnnnnnnnnnnnnnnnnnnnnnnnnnnnnnnnnnnnnnnnnnnnnnnnnnnnnnnnnnnnnnnnnnnnnnnnnnnnnnnnnnnnnnnnnnnnnnnnnnnnnnnnnnnnnnnnnnnnnnnnnnnnnnnnnnnnnnnnnnnnnnnnnnnnnnnnnnnnnnnnnnnnnnnnnnnnnnnnnnnnnnnnnnnnnnnnnnnnnnnnnnnnnnnnnnnnnnnnnnnnnnnnnnnnnnnnnnnnnnnnnnnnnnnnnnnnnnnnnnnnnnnnnnnnnnnnnnnnnnnnnnnnnnnnnnnnnnnnnnnnnnnnnnnnnnnnnnnnnnnnnnnnnnnnnnnnnnnnnnnnnnnnnnnnnnnnnnnnnnnnnnnnnnnnnnnnnnnnnnnnnnnnnnnnnnnnnnnnnnnnnnnnnnnnnnnnnnnnnnnnnnnnnnnnnnnnnnnnnnnnnnnnnnnnnnnnnnnnnnnnnnnnnnnnnnnnnnnnnnnnnnnnnnnnnnnnnnnnnnnnnnnnnnnnnnnnnnnnnnnnnnnnnnnnnnnnnnnnnnnnnnnnnnnnnnnnnnnnnnnnnnnnnnnnnnnnnnnnnnnnnnnnnnnnnnnnnnnnnnnnnnnnnnnnnnnnnnnnnnnnnnnnnnnnnnnnnnnnnnnnnnnnnnnnnnnnnnnnnnnnnnnnnnnnnnnnnnnnnnnnnnnnnnnnnnnnnnnnnnnnnnnnnnnnnnnnnnnnnnnnnnnnnnnnnnnnnnnnnnnnnnnnnnnnnnnnnnnnnnnnnnnnnnnnnnnnnnnnnnnnnnnnnnnnnnnnnnnnnnnnnnnnnnnnnnnnnnnnnnnnnnnnnnnnnnnnnnnnnnnnnnnnnnnnnnnnnnnnnnnnnnnnnnnnnnnnnnnnnnnnnnnnnnnnnnnnnnnnnnnnnnnnnnnnnnnnnnnnnnnnnnnnnnnnnnnnnnnnnnnnnnnnnnnnnnnnnnnnnnnnnnnnnnnnnnnnnnnnnnnnnnnnnnnnnnnnnnnnnnnnnnnnnnnnnnnnnnnnnnnnnnnnnnnnnnnnnnnnnnnnnnnnnnnnnnnnnnnnnnnnnnnnnnnnnnnnnnnnnnnnnnnnnnnnnnnnnnnnnnnnnnnnnnnnnnnnnnnnnnnnnnnnnnnnnnnnnnnnnnnnnnnnnnnnnnnnnnnnnnnnnnnnnnnnnnnnnnnnnnnnnnnnnnnnnnnnnnnnnnnnnnnnnnnnnnnnnnnnnnnnnnnnnnnnnnnnnnnnnnnnnnnnnnnnnnnnnnnnnnnnnnnnnnnnnnnnnnnnnnnnnnnnnnnnnnnnnnnnnnnnnnnnnnnnnnnnnnnnnnnnnnnnnnnnnnnnnnnnnnnnnnnnnnnnnnnnnnnnnnnnnnnnnnnnnnnnnnnnnnnnnnnnnnnnnnnnnnnnnnnnnnnnnnnnnnnnnnnnnnnnnnnnnnnnnnnnnnnnnnnnnnnnnnnnnnnnnnnnnnnnnnnnnnnnnnnnnnnnnnnnnnnnnnnnnnnnnnnnnnnnnnnnnnnnnnnnnnnnnnnnnnnnnnnnnnnnnnnnnnnnnnnnnnnnnnnnnnnnnnnnnnnnnnnnnnnnnnnnnnnnnnnnnnnnnnnnnnnnnnnnnnnnnnnnnnnnnnnnnnnnnnnnnnnnnnnnnnnnnnnnnnnnnnnnnnnnnnnnnnnnnnnnnnnnnnnnnnnnnnnnnnnnnnnnnnnnnnnnnnnnnnnnnnnnnnnnnnnnnnnnnnnnnnnnnnnnnnnnnnnnnnnnnnnnnnnnnnnnnnnnnnnnnnnnnnnnnnnnnnnnnnnnnnnnnnnnnnnnnnnnnnnnnnnnnnnnnnnnnnnnnnnnnnnnnnnnnnnnnnnnnnnnnnnnnnnnnnnnnnnnnnnnnnnnnnnnnnnnnnnnnnnnnnnnnnnnnnnnnnnnnnnnnnnnnnnnnnnnnnnnnnnnnnnnnnnnnnnnnnnnnnnnnnnnnnnnnnnnnnnnnnnnnnnnnnnnnnnnnnnnnnnnnnnnnnnnnnnnnnnnnnnnnnnnnnnnnnnnnnnnnnnnnnnnnnnnnnnnnnnnnnnnnnnnnnnnnnnnnnnnnnnnnnnnnnnnnnnnnnnnnnnnnnnnnnnnnnnnnnnnnnnnnnnnnnnnnnnnnnnnnnnnnnnnnnnnnnnnnnnnnnnnnnnnnnnnnnnnnnnnnnnnnnnnnnnnnnnnnnnnnnnnnnnnnnnnnnnnnnnnnnnnnnnnnnnnnnnnnnnnnnnnnnnnnnnnnnnnnnnnnnnnnnnnnnnnnnnnnnnnnnnnnnnnnnnnnnnnnnnnnnnnnnnnnnnnnnnnnnnnnnnnnnnnnnnnnnnnnnnnnnnnnnnnnnnnnnnnnnnnnnnnnnnnnnnnnnnnnnnnnnnnnnnnnnnnnnnnnnnnnnnnnnnnnnnnnnnnnnnnnnnnnnnnnnnnnnnnnnnnnnnnnnnnnnnnnnnnnnnnnnnnnnnnnnnnnnnnnnnnnnnnnnnnnnnnnnnnnnnnnnnnnnnnnnnnnnnnnnnnnnnnnnnnnnnnnnnnnnnnnnnnnnnnnnnnnnnnnnnnnnnnnnnnnnnnnnnnnnnnnnnnnnnnnnnnnnnnnnnnnnnnnnnnnnnnnnnnnnnnnnnnnnnnnnnnnnnnnnnnnnnnnnnnnnnnnnnnnnnnnnnnnnnnnnnnnnnnnnnnnnnnnnnnnnnnnnnnnnnnnnnnnnnnnnnnnnnnnnnnnnnnnnnnnnnnnnnnnnnnnnnnnnnnnnnnnnnnnnnnnnnnnnnnnnnnnnnnnnnnnnnnnnnnnnnnnnnnnnnnnnnnnnnnnnnnnnnnnnnnnnnnnnnnnnnnnnnnnnnnnnnnnnnnnnnnnnnnnnnnnnnnnnnnnnnnnnnnnnnnnnnnnnnnnnnnnnnnnnnnnnnnnnnnnnnnnnnnnnnnnnnnnnnnnnnnnnnnnnnnnnnnnnnnnnnnnnnnnnnnnnnnnnnnnnnnnnnnnnnnnnnnnnnnnnnnnnnnnnnnnnnnnnnnnnnnnnnnnnnnnnnnnnnnnnnnnnnnnnnnnnnnnnnnnnnnnnnnnnnnnnnnnnnnnnnnnnnnnnnnnnnnnnnnnnnnnnnnnnnnnnnnnnnnnnnnnnnnnnnnnnnnnnnnnnnnnnnnnnnnnnnnnnnnnnnnnnnnnnnnnnnnnnnnnnnnnnnnnnnnnnnnnnnnnnnnnnnnnnnnnnnnnnnnnnnnnnnnnnnnnnnnnnnnnnnnnnnnnnnnnnnnnnnnnnnnnnnnnnnnnnnnnnnnnnnnnnnnnnnnnnnnnnnnnnnnnnnnnnnnnnnnnnnnnnnnnnnnnnnnnnnnnnnnnnnnnnnnnnnnnnnnnnnnnnnnnnnnnnnnnnnnnnnnnnnnnnnnnnnnnnnnnnnnnnnnnnnnnnnnnnnnnnnnnnnnnnnnnnnnnnnnnnnnnnnnnnnnnnnnnnnnnnnnnnnnnnnnnnnnnnnnnnnnnnnnnnnnnnnnnnnnnnnnnnnnnnnnnnnnnnnnnnnnnnnnnnnnnnnnnnnnnnnnnnnnnnnnnnnnnnnnnnnnnnnnnnnnnnnnnnnnnnnnnnnnnnnnnnnnnnnnnnnnnnnnnnnnnnnnnnnnnnnnnnnnnnnnnnnnnnnnnnnnnnnnnnnnnnnnnnnnnnnnnnnnnnnnnnnnnnnnnnnnnnnnnnnnnnnnnnnnnnnnnnnnnnnnnnnnnnnnnnnnnnnnnnnnnnnnnnnnnnnnnnnnnnnnnnnnnnnnnnnnnnnnnnnnnnnnnnnnnnnnnnnnnnnnnnnnnnnnnnnnnnnnnnnnnnnnnnnnnnnnnnnnnnnnnnnnnnnnnnnnnnnnnnnnnnnnnnnnnnnnnnnnnnnnnnnnnnnnnnnnnnnnnnnnnnnnnnnnnnnnnnnnnnnnnnnnnnnnnnnnnnnnnnnnnnnnnnnnnnnnnnnnnnnnnnnnnnnnnnnnnnnnnnnnnnnnnnnnnnnnnnnnnnnnnnnnnnnnnnnnnnnnnnnnnnnnnnnnnnnnnnnnnnnnnnnnnnnnnnnnnnnnnnnnnnnnnnnnnnnnnnnnnnnnnnnnnnnnnnnnnnnnnnnnnnnnnnnnnnnnnnnnnnnnnnnnnnnnnnnnnnnnnnnnnnnnnnnnnnnnnnnnnnnnnnnnnnnnnnnnnnnnnnnnnnnnnnnnnnnnnnnnnnnnnnnnnnnnnnnnnnnnnnnnnnnnnnnnnnnnnnnnnnnnnnnnnnnnnnnnnnnnnnnnnnnnnnnnnnnnnnnnnnnnnnnnnnnnnnnnnnnnnnnnnnnnnnnnnnnnnnnnnnnnnnnnnnnnnnnnnnnnnnnnnnnnnnnnnnnnnnnnnnnnnnnnnnnnnnnnnnnnnnnnnnnnnnnnnnnnnnnnnnnnnnnnnnnnnnnnnnnnnnnnnnnnnnnnnnnnnnnnnnnnnnnnnnnnnnnnnnnnnnnnnnnnnnnnnnnnnnnnnnnnnnnnnnnnnnnnnnnnnnnnnnnnnnnnnnnnnnnnnnnnnnnnnnnnnnnnnnnnnnnnnnnnnnnnnnnnnnnnnnnnnnnnnnnnnnnnnnnnnnnnnnnnnnnnnnnnnnnnnnnnnnnnnnnnnnnnnnnnnnnnnnnnnnnnnnnnnnnnnnnnnnnnnnnnnnnnnnnnnnnnnnnnnnnnnnnnnnnnnnnnnnnnnnnnnnnnnnnnnnnnnnnnnnnnnnnnnnnnnnnnnnnnnnnnnnnnnnnnnnnnnnnnnnnnnnnnnnnnnnnnnnnnnnnnnnnnnnnnnnnnnnnnnnnnnnnnnnnnnnnnnnnnnnnnnnnnnnnnnnnnnnnnnnnnnnnnnnnnnnnnnnnnnnnnnnnnnnnnnnnnnnnnnnnnnnnnnnnnnnnnnnnnnnnnnnnnnnnnnnnnnnnnnnnnnnnnnnnnnnnnnnnnnnnnnnnnnnnnnnnnnnnnnnnnnnnnnnnnnnnnnnnnnnnnnnnnnnnnnnnnnnnnnnnnnnnnnnnnnnnnnnnnnnnnnnnnnnnnnnnnnnnnnnnnnnnnnnnnnnnnnnnnnnnnnnnnnnnnnnnnnnnnnnnnnnnnnnnnnnnnnnnnnnnnnnnnnnnnnnnnnnnnnnnnnnnnnnnnnnnnnnnnnnnnnnnnnnnnnnnnnnnnnnnnnnnnnnnnnnnnnnnnnnnnnnnnnnnnnnnnnnnnnnnnnnnnnnnnnnnnnnnnnnnnnnnnnnnnnnnnnnnnnnnnnnnnnnnnnnnnnnnnnnnnnnnnnnnnnnnnnnnnnnnnnnnnnnnnnnnnnnnnnnnnnnnnnnnnnnnnnnnnnnnnnnnnnnnnnnnnnnnnnnnnnnnnnnnnnnnnnnnnnnnnnnnnnnnnnnnnnnnnnnnnnnnnnnnnnnnnnnnnnnnnnnnnnnnnnnnnnnnnnnnnnnnnnnnnnnnnnnnnnnnnnnnnnnnnnnnnnnnnnnnnnnnnnnnnnnnnnnnnnnnnnnnnnnnnnnnnnnnnnnnnnnnnnnnnnnnnnnnnnnnnnnnnnnnnnnnnnnnnnnnnnnnnnnnnnnnnnnnnnnnnnnnnnnnnnnnnnnnnnnnnnnnnnnnnnnnnnnnnnnnnnnnnnnnnnnnnnnnnnnnnnnnnnnnnnnnnnnnnnnnnnnnnnnnnnnnnnnnnnnnnnnnnnnnnnnnnnnnnnnnnnnnnnnnnnnnnnnnnnnnnnnnnnnnnnnnnnnnnnnnnnnnnnnnnnnnnnnnnnnnnnnnnnnnnnnnnnnnnnnnnnnnnnnnnnnnnnnnnnnnnnnnnnnnnnnnnnnnnnnnnnnnnnnnnnnnnnnnnnnnnnnnnnnnnnnnnnnnnnnnnnnnnnnnnnnnnnnnnnnnnnnnnnnnnnnnnnnnnnnnnnnnnnnnnnnnnnnnnnnnnnnnnnnnnnnnnnnnnnnnnnnnnnnnnnnnnnnnnnnnnnnnnnnnnnnnnnnnnnnnnnnnnnnnnnnnnnnnnnnnnnnnnnnnnnnnnnnnnnnnnnnnnnnnnnnnnnnnnnnnnnnnnnnnnnnnnnnnnnnnnnnnnnnnnnnnnnnnnnnnnnnnnnnnnnnnnnnnnnnnnnnnnnnnnnnnnnnnnnnnnnnnnnnnnnnnnnnnnnnnnnnnnnnnnnnnnnnnnnnnnnnnnnnnnnnnnnnnnnnnnnnnnnnnnnnnnnnnnnnnnnnnnnnnnnnnnnnnnnnnnnnnnnnnnnnnnnnnnnnnnnnnnnnnnnnnnnnnnnnnnnnnnnnnnnnnnnnnnnnnnnnnnnnnnnnnnnnnnnnnnnnnnnnnnnnnnnnnnnnnnnnnnnnnnnnnnnnnnnnnnnnnnnnnnnnnnnnnnnnnnnnnnnnnnnnnnnnnnnnnnnnnnnnnnnnnnnnnnnnnnnnnnnnnnnnnnnnnnnnnnnnnnnnnnnnnnnnnnnnnnnnnnnnnnnnnnnnnnnnnnnnnnnnnnnnnnnnnnnnnnnnnnnnnnnnnnnnnnnnnnnnnnnnnnnnnnnnnnnnnnnnnnnnnnnnnnnnnnnnnnnnnnnnnnnnnnnnnnnnnnnnnnnnnnnnnnnnnnnnnnnnnnnnnnnnnnnnnnnnnnnnnnnnnnnnnnnnnnnnnnnnnnnnnnnnnnnnnnnnnnnnnnnnnnnnnnnnnnnnnnnnnnnnnnnnnnnnnnnnnnnnnnnnnnnnnnnnnnnnnnnnnnnnnnnnnnnnnnnnnnnnnnnnnnnnnnnnnnnnnnnnnnnnnnnnnnnnnnnnnnnnnnnnnnnnnnnnnnnnnnnnnnnnnnnnnnnnnnnnnnnnnnnnnnnnnnnnnnnnnnnnnnnnnnnnnnnnnnnnnnnnnnnnnnnnnnnnnnnnnnnnnnnnnnnnnnnnnnnnnnnnnnnnnnnnnnnnnnnnnnnnnnnnnnnnnnnnnnnnnnnnnnnnnnnnnnnnnnnnnnnnnnnnnnnnnnnnnnnnnnnnnnnnnnnnnnnnnnnnnnnnnnnnnnnnnnnnnnnnnnnnnnnnnnnnnnnnnnnnnnnnnnnnnnnnnnnnnnnnnnnnnnnnnnnnnnnnnnnnnnnnnnnnnnnnnnnnnnnnnnnnnnnnnnnnnnnnnnnnnnnnnnnnnnnnnnnnnnnnnnnnnnnnnnnnnnnnnnnnnnnnnnnnnnnnnnnnnnnnnnnnnnnnnnnnnnnnnnnnnnnnnnnnnnnnnnnnnnnnnnnnnnnnnnnnnnnnnnnnnnnnnnnnnnnnnnnnnnnnnnnnnnnnnnnnnnnnnnnnnnnnnnnnnnnnnnnnnnnnnnnnnnnnnnnnnnnnnnnnnnnnnnnnnnnnnnnnnnnnnnnnnnnnnnnnnnnnnnnnnnnnnnnnnnnnnnnnnnnnnnnnnnnnnnnnnnnnnnnnnnnnnnnnnnnnnnnnnnnnnnnnnnnnnnnnnnnnnnnnnnnnnnnnnnnnnnnnnnnnnnnnnnnnnnnnnnnnnnnnnnnnnnnnnnnnnnnnnnnnnnnnnnnnnnnnnnnnnnnnnnnnnnnnnnnnnnnnnnnnnnnnnnnnnnnnnnnnnnnnnnnnnnnnnnnnnnnnnnnnnnnnnnnnnnnnnnnnnnnnnnnnnnnnnnnnnnnnnnnnnnnnnnnnnnnnnnnnnnnnnnnnnnnnnnnnnnnnnnnnnnnnnnnnnnnnnnnnnnnnnnnnnnnnnnnnnnnnnnnnnnnnnnnnnnnnnnnnnnnnnnnnnnnnnnnnnnnnnnnnnnnnnnnnnnnnnnnnnnnnnnnnnnnnnnnnnnnnnnnnnnnnnnnnnnnnnnnnnnnnnnnnnnnnnnnnnnnnnnnnnnnnnnnnnnnnnnnnnnnnnnnnnnnnnnnnnnnnnnnnnnnnnnnnnnnnnnnnnnnnnnnnnnnnnnnnnnnnnnnnnnnnnnnnnnnnnnnnnnnnnnnnnnnnnnnnnnnnnnnnnnnnnnnnnnnnnnnnnnnnnnnnnnnnnnnnnnnnnnnnnnnnnnnnnnnnnnnnnnnnnnnnnnnnnnnnnnnnnnnnnnnnnnnnnnnnnnnnnnnnnnnnnnnnnnnnnnnnnnnnnnnnnnnnnnnnnnnnnnnnnnnnnnnnnnnnnnnnnnnnnnnnnnnnnnnnnnnnnnnnnnnnnnnnnnnnnnnnnnnnnnnnnnnnnnnnnnnnnnnnnnnnnnnnnnnnnnnnnnnnnnnnnnnnnnnnnnnnnnnnnnnnnnnnnnnnnnnnnnnnnnnnnnnnnnnnnnnnnnnnnnnnnnnnnnnnnnnnnnnnnnnnnnnnnnnnnnnnnnnnnnnnnnnnnnnnnnnnnnnnnnnnnnnnnnnnnnnnnnnnnnnnnnnnnnnnnnnnnnnnnnnnnnnnnnnnnnnnnnnnnnnnnnnnnnnnnnnnnnnnnnnnnnnnnnnnnnnnnnnnnnnnnnnnnnnnnnnnnnnnnnnnnnnnnnnnnnnnnnnnnnnnnnnnnnnnnnnnnnnnnnnnnnnnnnnnnnnnnnnnnnnnnnnnnnnnnnnnnnnnnnnnnnnnnnnnnnnnnnnnnnnnnnnnnnnnnnnnnnnnnnnnnnnnnnnnnnnnnnnnnnnnnnnnnnnnnnnnnnnnnnnnnnnnnnnnnnnnnnnnnnnnnnnnnnnnnnnnnnnnnnnnnnnnnnnnnnnnnnnnnnnnnnnnnnnnnnnnnnnnnnnnnnnnnnnnnnnnnnnnnnnnnnnnnnnnnnnnnnnnnnnnnnnnnnnnnnnnnnnnnnnnnnnnnnnnnnnnnnnnnnnnnnnnnnnnnnnnnnnnnnnnnnnnnnnnnnnnnnnnnnnnnnnnnnnnnnnnnnnnnnnnnnnnnnnnnnnnnnnnnnnnnnnnnnnnnnnnnnnnnnnnnnnnnnnnnnnnnnnnnnnnnnnnnnnnnnnnnnnnnnnnnnnnnnnnnnnnnnnnnnnnnnnnnnnnnnnnnnnnnnnnnnnnnnnnnnnnnnnnnnnnnnnnnnnnnnnnnnnnnnnnnnnnnnnnnnnnnnnnnnnnnnnnnnnnnnnnnnnnnnnnnnnnnnnnnnnnnnnnnnnnnnnnnnnnnnnnnnnnnnnnnnnnnnnnnnnnnnnnnnnnnnnnnnnnnnnnnnnnnnnnnnnnnnnnnnnnnnnnnnnnnnnnnnnnnnnnnnnnnnnnnnnnnnnnnnnnnnnnnnnnnnnnnnnnnnnnnnnnnnnnnnnnnnnnnnnnnnnnnnnnnnnnnnnnnnnnnnnnnnnnnnnnnnnnnnnnnnnnnnnnnnnnnnnnnnnnnnnnnnnnnnnnnnnnnnnnnnnnnnnnnnnnnnnnnnnnnnnnnnnnnnnnnnnnnnnnnnnnnnnnnnnnnnnnnnnnnnnnnnnnnnnnnnnnnnnnnnnnnnnnnnnnnnnnnnnnnnnnnnnnnnnnnnnnnnnnnnnnnnnnnnnnnnnnnnnnnnnnnnnnnnnnnnnnnnnnnnnnnnnnnnnnnnnnnnnnnnnnnnnnnnnnnnnnnnnnnnnnnnnnnnnnnnnnnnnnnnnnnnnnnnnnnnnnnnnnnnnnnnnnnnnnnnnnnnnnnnnnnnnnnnnnnnnnnnnnnnnnnnnnnnnnnnnnnnnnnnnnnnnnnnnnnnnnnnnnnnnnnnnnnnnnnnnnnnnnnnnnnnnnnnnnnnnnnnnnnnnnnnnnnnnnnnnnnnnnnnnnnnnnnnnnnnnnnnnnnnnnnnnnnnnnnnnnnnnnnnnnnnnnnnnnnnnnnnnnnnnnnnnnnnnnnnnnnnnnnnnnnnnnnnnnnnnnnnnnnnnnnnnnnnnnnnnnnnnnnnnnnnnnnnnnnnnnnnnnnnnnnnnnnnnnnnnnnnnnnnnnnnnnnnnnnnnnnnnnnnnnnnnnnnnnnnnnnnnnnnnnnnnnnnnnnnnnnnnnnnnnnnnnnnnnnnnnnnnnnnnnnnnnnnnnnnnnnnnnnnnnnnnnnnnnnnnnnnnnnnnnnnnnnnnnnnnnnnnnnnnnnnnnnnnnnnnnnnnnnnnnnnnnnnnnnnnnnnnnnnnnnnnnnnnnnnnnnnnnnnnnnnnnnnnnnnnnnnnnnnnnnnnnnnnnnnnnnnnnnnnnnnnnnnnnnnnnnnnnnnnnnnnnnnnnnnnnnnnnnnnnnnnnnnnnnnnnnnnnnnnnnnnnnnnnnnnnnnnnnnnnnnnnnnnnnnnnnnnnnnnnnnnnnnnnnnnnnnnnnnnnnnnnnnnnnnnnnnnnnnnnnnnnnnnnnnnnnnnnnnnnnnnnnnnnnnnnnnnnnnnnnnnnnnnnnnnnnnnnnnnnnnnnnnnnnnnnnnnnnnnnnnnnnnnnnnnnnnnnnnnnnnnnnnnnnnnnnnnnnnnnnnnnnnnnnnnnnnnnnnnnnnnnnnnnnnnnnnnnnnnnnnnnnnnnnnnnnnnnnnnnnnnnnnnnnnnnnnnnnnnnnnnnnnnnnnnnnnnnnnnnnnnnnnnnnnnnnnnnnnnnnnnnnnnnnnnnnnnnnnnnnnnnnnnnnnnnnnnnnnnnnnnnnnnnnnnnnnnnnnnnnnnnnnnnnnnnnnnnnnnnnnnnnnnnnnnnnnnnnnnnnnnnnnnnnnnnnnnnnnnnnnnnnnnnnnnnnnnnnnnnnnnnnnnnnnnnnnnnnnnnnnnnnnnnnnnnnnnnnnnnnnnnnnnnnnnnnnnnnnnnnnnnnnnnnnnnnnnnnnnnnnnnnnnnnnnnnnnnnnnnnnnnnnnnnnnnnnnnnnnnnnnnnnnnnnnnnnnnnnnnnnnnnnnnnnnnnnnnnnnnnnnnnnnnnnnnnnnnnnnnnnnnnnnnnnnnnnnnnnnnnnnnnnnnnnnnnnnnnnnnnnnnnnnnnnnnnnnnnnnnnnnnnnnnnnnnnnnnnnnnnnnnnnnnnnnnnnnnnnnnnnnnnnnnnnnnnnnnnnnnnnnnnnnnnnnnnnnnnnnnnnnnnnnnnnnnnnnnnnnnnnnnnnnnnnnnnnnnnnnnnnnnnnnnnnnnnnnnnnnnnnnnnnnnnnnnnnnnnnnnnnnnnnnnnnnnnnnnnnnnnnnnnnnnnnnnnnnnnnnnnnnnnnnnnnnnnnnnnnnnnnnnnnnnnnnnnnnnnnnnnnnnnnnnnnnnnnnnnnnnnnnnnnnnnnnnnnnnnnnnnnnnnnnnnnnnnnnnnnnnnnnnnnnnnnnnnnnnnnnnnnnnnnnnnnnnnnnnnnnnnnnnnnnnnnnnnnnnnnnnnnnnnnnnnnnnnnnnnnnnnnnnnnnnnnnnnnnnnnnnnnnnnnnnnnnnnnnnnnnnnnnnnnnnnnnnnnnnnnnnnnnnnnnnnnnnnnnnnnnnnnnnnnnnnnnnnnnnnnnnnnnnnnnnnnnnnnnnnnnnnnnnnnnnnnnnnnnnnnnnnnnnnnnnnnnnnnnnnnnnnnnnnnnnnnnnnnnnnnnnnnnnnnnnnnnnnnnnnnnnnnnnnnnnnnnnnnnnnnnnnnnnnnnnnnnnnnnnnnnnnnnnnnnnnnnnnnnnnnnnnnnnnnnnnnnnnnnnnnnnnnnnnnnnnnnnnnnnnnnnnnnnnnnnnnnnnnnnnnnnnnnnnnnnnnnnnnnnnnnnnnnnnnnnnnnnnnnnnnnnnnnnnnnnnnnnnnnnnnnnnnnnnnnnnnnnnnnnnnnnnnnnnnnnnnnnnnnnnnnnnnnnnnnnnnnnnnnnnnnnnnnnnnnnnnnnnnnnnnnnnnnnnnnnnnnnnnnnnnnnnnnnnnnnnnnnnnnnnnnnnnnnnnnnnnnnnnnnnnnnnnnnnnnnnnnnnnnnnnnnnnnnnnnnnnnnnnnnnnnnnnnnnnnnnnnnnnnnnnnnnnnnnnnnnnnnnnnnnnnnnnnnnnnnnnnnnnnnnnnnnnnnnnnnnnnnnnnnnnnnnnnnnnnnnnnnnnnnnnnnnnnnnnnnnnnnnnnnnnnnnnnnnnnnnnnnnnnnnnnnnnnnnnnnnnnnnnnnnnnnnnnnnnnnnnnnnnnnnnnnnnnnnnnnnnnnnnnnnnnnnnnnnnnnnnnnnnnnnnnnnnnnnnnnnnnnnnnnnnnnnnnnnnnnnnnnnnnnnnnnnnnnnnnnnnnnnnnnnnnnnnnnnnnnnnnnnnnnnnnnnnnnnnnnnnnnnnnnnnnnnnnnnnnnnnnnnnnnnnnnnnnnnnnnnnnnnnnnnnnnnnnnnnnnnnnnnnnnnnnnnnnnnnnnnnnnnnnnnnnnnnnnnnnnnnnnnnnnnnnnnnnnnnnnnnnnnnnnnnnnnnnnnnnnnnnnnnnnnnnnnnnnnnnnnnnnnnnnnnnnnnnnnnnnnnnnnnnnnnnnnnnnnnnnnnnnnnnnnnnnnnnnnnnnnnnnnnnnnnnnnnnnnnnnnnnnnnnnnnnnnnnnnnnnnnnnnnnnnnnnnnnnnnnnnnnnnnnnnnnnnnnnnnnnnnnnnnnnnnnnnnnnnnnnnnnnnnnnnnnnnnnnnnnnnnnnnnnnnnnnnnnnnnnnnnnnnnnnnnnnnnnnnnnnnnnnnnnnnnnnnnnnnnnnnnnnnnnnnnnnnnnnnnnnnnnnnnnnnnnnnnnnnnnnnnnnnnnnnnnnnnnnnnnnnnnnnnnnnnnnnnnnnnnnnnnnnnnnnnnnnnnnnnnnnnnnnnnnnnnnnnnnnnnnnnnnnnnnnnnnnnnnnnnnnnnnnnnnnnnnnnnnnnnnnnnnnnnnnnnnnnnnnnnnnnnnnnnnnnnnnnnnnnnnnnnnnnnnnnnnnnnnnnnnnnnnnnnnnnnnnnnnnnnnnnnnnnnnnnnnnnnnnnnnnnnnnnnnnnnnnnnnnnnnnnnnnnnnnnnnnnnnnnnnnnnnnnnnnnnnnnnnnnnnnnnnnnnnnnnnnnnnnnnnnnnnnnnnnnnnnnnnnnnnnnnnnnnnnnnnnnnnnnnnnnnnnnnnnnnnnnnnnnnnnnnnnnnnnnnnnnnnnnnnnnnnnnnnnnnnnnnnnnnnnnnnnnnnnnnnnnnnnnnnnnnnnnnnnnnnnnnnnnnnnnnnnnnnnnnnnnnnnnnnnnnnnnnnnnnnnnnnnnnnnnnnnnnnnnnnnnnnnnnnnnnnnnnnnnnnnnnnnnnnnnnnnnnnnnnnnnnnnnnnnnnnnnnnnnnnnnnnnnnnnnnnnnnnnnnnnnnnnnnnnnnnnnnnnnnnnnnnnnnnnnnnnnnnnnnnnnnnnnnnnnnnnnnnnnnnnnnnnnnnnnnnnnnnnnnnnnnnnnnnnnnnnnnnnnnnnnnnnnnnnnnnnnnnnnnnnnnnnnnnnnnnnnnnnnnnnnnnnnnnnnnnnnnnnnnnnnnnnnnnnnnnnnnnnnnnnnnnnnnnnnnnnnnnnnnnnnnnnnnnnnnnnnnnnnnnnnnnnnnnnnnnnnnnnnnnnnnnnnnnnnnnnnnnnnnnnnnnnnnnnnnnnnnnnnnnnnnnnnnnnnnnnnnnnnnnnnnnnnnnnnnnnnnnnnnnnnnnnnnnnnnnnnnnnnnnnnnnnnnnnnnnnnnnnnnnnnnnnnnnnnnnnnnnnnnnnnnnnnnnnnnnnnnnnnnnnnnnnnnnnnnnnnnnnnnnnnnnnnnnnnnnnnnnnnnnnnnnnnnnnnnnnnnnnnnnnnnnnnnnnnnnnnnnnnnnnnnnnnnnnnnnnnnnnnnnnnnnnnnnnnnnnnnnnnnnnnnnnnnnnnnnnnnnnnnnnnnnnnnnnnnnnnnnnnnnnnnnnnnnnnnnnnnnnnnnnnnnnnnnnnnnnnnnnnnnnnnnnnnnnnnnnnnnnnnnnnnnnnnnnnnnnnnnnnnnnnnnnnnnnnnnnnnnnnnnnnnnnnnnnnnnnnnnnnnnnnnnnnnnnnnnnnnnnnnnnnnnnnnnnnnnnnnnnnnnnnnnnnnnnnnnnnnnnnnnnnnnnnnnnnnnnnnnnnnnnnnnnnnnnnnnnnnnnnnnnnnnnnnnnnnnnnnnnnnnnnnnnnnnnnnnnnnnnnnnnnnnnnnnnnnnnnnnnnnnnnnnnnnnnnnnnnnnnnnnnnnnnnnnnnnnnnnnnnnnnnnnnnnnnnnnnnnnnnnnnnnnnnnnnnnnnnnnnnnnnnnnnnnnnnnnnnnnnnnnnnnnnnnnnnnnnnnnnnnnnnnnnnnnnnnnnnnnnnnnnnnnnnnnnnnnnnnnnnnnnnnnnnnnnnnnnnnnnnnnnnnnnnnnnnnnnnnnnnnnnnnnnnnnnnnnnnnnnnnnnnnnnnnnnnnnnnnnnnnnnnnnnnnnnnnnnnnnnnnnnnnnnnnnnnnnnnnnnnnnnnnnnnnnnnnnnnnnnnnnnnnnnnnnnnnnnnnnnnnnnnnnnnnnnnnnnnnnnnnnnnnnnnnnnnnnnnnnnnnnnnnnnnnnnnnnnnnnnnnnnnnnnnnnnnnnnnnnnnnnnnnnnnnnnnnnnnnnnnnnnnnnnnnnnnnnnnnnnnnnnnnnnnnnnnnnnnnnnnnnnnnnnnnnnnnnnnnnnnnnnnnnnnnnnnnnnnnnnnnnnnnnnnnnnnnnnnnnnnnnnnnnnnnnnnnnnnnnnnnnnnnnnnnnnnnnnnnnnnnnnnnnnnnnnnnnnnnnnnnnnnnnnnnnnnnnnnnnnnnnnnnnnnnnnnnnnnnnnnnnnnnnnnnnnnnnnnnnnnnnnnnnnnnnnnnnnnnnnnnnnnnnnnnnnnnnnnnnnnnnnnnnnnnnnnnnnnnnnnnnnnnnnnnnnnnnnnnnnnnnnnnnnnnnnnnnnnnnnnnnnnnnnnnnnnnnnnnnnnnnnnnnnnnnnnnnnnnnnnnnnnnnnnnnnnnnnnnnnnnnnnnnnnnnnnnnnnnnnnnnnnnnnnnnnnnnnnnnnnnnnnnnnnnnnnnnnnnnnnnnnnnnnnnnnnnnnnnnnnnnnnnnnnnnnnnnnnnnnnnnnnnnnnnnnnnnnnnnnnnnnnnnnnnnnnnnnnnnnnnnnnnnnnnnnnnnnnnnnnnnnnnnnnnnnnnnnnnnnnnnnnnnnnnnnnnnnnnnnnnnnnnnnnnnnnnnnnnnnnnnnnnnnnnnnnnnnnnnnnnnnnnnnnnnnnnnnnnnnnnnnnnnnnnnnnnnnnnnnnnnnnnnnnnnnnnnnnnnnnnnnnnnnnnnnnnnnnnnnnnnnnnnnnnnnnnnnnnnnnnnnnnnnnnnnnnnnnnnnnnnnnnnnnnnnnnnnnnnnnnnnnnnnnnnnnnnnnnnnnnnnnnnnnnnnnnnnnnnnnnnnnnnnnnnnnnnnnnnnnnnnnnnnnnnnnnnnnnnnnnnnnnnnnnnnnnnnnnnnnnnnnnnnnnnnnnnnnnnnnnnnnnnnnnnnnnnnnnnnnnnnnnnnnnnnnnnnnnnnnnnnnnnnnnnnnnnnnnnnnnnnnnnnnnnnnnnnnnnnnnnnnnnnnnnnnnnnnnnnnnnnnnnnnnnnnnnnnnnnnnnnnnnnnnnnnnnnnnnnnnnnnnnnnnnnnnnnnnnnnnnnnnnnnnnnnnnnnnnnnnnnnnnnnnnnnnnnnnnnnnnnnnnnnnnnnnnnnnnnnnnnnnnnnnnnnnnnnnnnnnnnnnnnnnnnnnnnnnnnnnnnnnnnnnnnnnnnnnnnnnnnnnnnnnnnnnnnnnnnnnnnnnnnnnnnnnnnnnnnnnnnnnnnnnnnnnnnnnnnnnnnnnnnnnnnnnnnnnnnnnnnnnnnnnnnnnnnnnnnnnnnnnnnnnnnnnnnnnnnnnnnnnnnnnnnnnnnnnnnnnnnnnnnnnnnnnnnnnnnnnnnnnnnnnnnnnnnnnnnnnnnnnnnnnnnnnnnnnnnnnnnnnnnnnnnnnnnnnnnnnnnnnnnnnnnnnnnnnnnnnnnnnnnnnnnnnnnnnnnnnnnnnnnnnnnnnnnnnnnnnnnnnnnnnnnnnnnnnnnnnnnnnnnnnnnnnnnnnnnnnnnnnnnnnnnnnnnnnnnnnnnnnnnnnnnnnnnnnnnnnnnnnnnnnnnnnnnnnnnnnnnnnnnnnnnnnnnnnnnnnnnnnnnnnnnnnnnnnnnnnnnnnnnnnnnnnnnnnnnnnnnnnnnnnnnnnnnnnnnnnnnnnnnnnnnnnnnnnnnnnnnnnnnnnnnnnnnnnnnnnnnnnnnnnnnnnnnnnnnnnnnnnnnnnnnnnnnnnnnnnnnnnnnnnnnnnnnnnnnnnnnnnnnnnnnnnnnnnnnnnnnnnnnnnnnnnnnnnnnnnnnnnnnnnnnnnnnnnnnnnnnnnnnnnnnnnnnnnnnnnnnnnnnnnnnnnnnnnnnnnnnnnnnnnnnnnnnnnnnnnnnnnnnnnnnnnnnnnnnnnnnnnnnnnnnnnnnnnnnnnnnnnnnnnnnnnnnnnnnnnnnnnnnnnnnnnnnnnnnnnnnnnnnnnnnnnnnnnnnnnnnnnnnnnnnnnnnnnnnnnnnnnnnnnnnnnnnnnnnnnnnnnnnnnnnnnnnnnnnnnnnnnnnnnnnnnnnnnnnnnnnnnnnnnnnnnnnnnnnnnnnnnnnnnnnnnnnnnnnnnnnnnnnnnnnnnnnnnnnnnnnnnnnnnnnnnnnnnnnnnnnnnnnnnnnnnnnnnnnnnnnnnnnnnnnnnnnnnnnnnnnnnnnnnnnnnnnnnnnnnnnnnnnnnnnnnnnnnnnnnnnnnnnnnnnnnnnnnnnnnnnnnnnnnnnnnnnnnnnnnnnnnnnnnnnnnnnnnnnnnnnnnnnnnnnnnnnnnnnnnnnnnnnnnnnnnnnnnnnnnnnnnnnnnnnnnnnnnnnnnnnnnnnnnnnnnnnnnnnnnnnnnnnnnnnnnnnnnnnnnnnnnnnnnnnnnnnnnnnnnnnnnnnnnnnnnnnnnnnnnnnnnnnnnnnnnnnnnnnnnnnnnnnnnnnnnnnnnnnnnnnnnnnnnnnnnnnnnnnnnnnnnnnnnnnnnnnnnnnnnnnnnnnnnnnnnnnnnnnnnnnnnnnnnnnnnnnnnnnnnnnnnnnnnnnnnnnnnnnnnnnnnnnnnnnnnnnnnnnnnnnnnnnnnnnnnnnnnnnnnnnnnnnnnnnnnnnnnnnnnnnnnnnnnnnnnnnnnnnnnnnnnnnnnnnnnnnnnnnnnnnnnnnnnnnnnnnnnnnnnnnnnnnnnnnnnnnnnnnnnnnnnnnnnnnnnnnnnnnnnnnnnnnnnnnnnnnnnnnnnnnnnnnnnnnnnnnnnnnnnnnnnnnnnnnnnnnnnnnnnnnnnnnnnnnnnnnnnnnnnnnnnnnnnnnnnnnnnnnnnnnnnnnnnnnnnnnnnnnnnnnnnnnnnnnnnnnnnnnnnnnnnnnnnnnnnnnnnnnnnnnnnnnnnnnnnnnnnnnnnnnnnnnnnnnnnnnnnnnnnnnnnnnnnnnnnnnnnnnnnnnnnnnnnnnnnnnnnnnnnnnnnnnnnnnnnnnnnnnnnnnnnnnnnnnnnnnnnnnnnnnnnnnnnnnnnnnnnnnnnnnnnnnnnnnnnnnnnnnnnnnnnnnnnnnnnnnnnnnnnnnnnnnnnnnnnnnnnnnnnnnnnnnnnnnnnnnnnnnnnnnnnnnnnnnnnnnnnnnnnnnnnnnnnnnnnnnnnnnnnnnnnnnnnnnnnnnnnnnnnnnnnnnnnnnnnnnnnnnnnnnnnnnnnnnnnnnnnnnnnnnnnnnnnnnnnnnnnnnnnnnnnnnnnnnnnnnnnnnnnnnnnnnnnnnnnnnnnnnnnnnnnnnnnnnnnnnnnnnnnnnnnnnnnnnnnnnnnnnnnnnnnnnnnnnnnnnnnnnnnnnnnnnnnnnnnnnnnnnnnnnnnnnnnnnnnnnnnnnnnnnnnnnnnnnnnnnnnnnnnnnnnnnnnnnnnnnnnnnnnnnnnnnnnnnnnnnnnnnnnnnnnnnnnnnnnnnnnnnnnnnnnnnnnnnnnnnnnnnnnnnnnnnnnnnnnnnnnnnnnnnnnnnnnnnnnnnnnnnnnnnnnnnnnnnnnnnnnnnnnnnnnnnnnnnnnnnnnnnnnnnnnnnnnnnnnnnnnnnnnnnnnnnnnnnnnnnnnnnnnnnnnnnnnnnnnnnnnnnnnnnnnnnnnnnnnnnnnnnnnnnnnnnnnnnnnnnnnnnnnnnnnnnnnnnnnnnnnnnnnnnnnnnnnnnnnnnnnnnnnnnnnnnnnnnnnnnnnnnnnnnnnnnnnnnnnnnnnnnnnnnnnnnnnnnnnnnnnnnnnnnnnnnnnnnnnnnnnnnnnnnnnnnnnnnnnnnnnnnnnnnnnnnnnnnnnnnnnnnnnnnnnnnnnnnnnnnnnnnnnnnnnnnnnnnnnnnnnnnnnnnnnnnnnnnnnnnnnnnnnnnnnnnnnnnnnnnnnnnnnnnnnnnnnnnnnnnnnnnnnnnnnnnnnnnnnnnnnnnnnnnnnnnnnnnnnnnnnnnnnnnnnnnnnnnnnnnnnnnnnnnnnnnnnnnnnnnnnnnnnnnnnnnnnnnnnnnnnnnnnnnnnnnnnnnnnnnnnnnnnnnnnnnnnnnnnnnnnnnnnnnnnnnnnnnnnnnnnnnnnnnnnnnnnnnnnnnnnnnnnnnnnnnnnnnnnnnnnnnnnnnnnnnnnnnnnnnnnnnnnnnnnnnnnnnnnnnnnnnnnnnnnnnnnnnnnnnnnnnnnnnnnnnnnnnnnnnnnnnnnnnnnnnnnnnnnnnnnnnnnnnnnnnnnnnnnnnnnnnnnnnnnnnnnnnnnnnnnnnnnnnnnnnnnnnnnnnnnnnnnnnnnnnnnnnnnnnnnnnnnnnnnnnnnnnnnnnnnnnnnnnnnnnnnnnnnnnnnnnnnnnnnnnnnnnnnnnnnnnnnnnnnnnnnnnnnnnnnnnnnnnnnnnnnnnnnnnnnnnnnnnnnnnnnnnnnnnnnnnnnnnnnnnnnnnnnnnnnnnnnnnnnnnnnnnnnnnnnnnnnnnnnnnnnnnnnnnnnnnnnnnnnnnnnnnnnnnnnnnnnnnnnnnnnnnnnnnnnnnnnnnnnnnnnnnnnnnnnnnnnnnnnnnnnnnnnnnnnnnnnnnnnnnnnnnnnnnnnnnnnnnnnnnnnnnnnnnnnnnnnnnnnnnnnnnnnnnnnnnnnnnnnnnnnnnnnnnnnnnnnnnnnnnnnnnnnnnnnnnnnnnnnnnnnnnnnnnnnnnnnnnnnnnnnnnnnnnnnnnnnnnnnnnnnnnnnnnnnnnnnnnnnnnnnnnnnnnnnnnnnnnnnnnnnnnnnnnnnnnnnnnnnnnnnnnnnnnnnnnnnnnnnnnnnnnnnnnnnnnnnnnnnnnnnnnnnnnnnnnnnnnnnnnnnnnnnnnnnnnnnnnnnnnnnnnnnnnnnnnnnnnnnnnnnnnnnnnnnnnnnnnnnnnnnnnnnnnnnnnnnnnnnnnnnnnnnnnnnnnnnnnnnnnnnnnnnnnnnnnnnnnnnnnnnnnnnnnnnnnnnnnnnnnnnnnnnnnnnnnnnnnnnnnnnnnnnnnnnnnnnnnnnnnnnnnnnnnnnnnnnnnnnnnnnnnnnnnnnnnnnnnnnnnnnnnnnnnnnnnnnnnnnnnnnnnnnnnnnnnnnnnnnnnnnnnnnnnnnnnnnnnnnnnnnnnnnnnnnnnnnnnnnnnnnnnnnnnnnnnnnnnnnnnnnnnnnnnnnnnnnnnnnnnnnnnnnnnnnnnnnnnnnnnnnnnnnnnnnnnnnnnnnnnnnnnnnnnnnnnnnnnnnnnnnnnnnnnnnnnnnnnnnnnnnnnnnnnnnnnnnnnnnnnnnnnnnnnnnnnnnnnnnnnnnnnnnnnnnnnnnnnnnnnnnnnnnnnnnnnnnnnnnnnnnnnnnnnnnnnnnnnnnnnnnnnnnnnnnnnnnnnnnnnnnnnnnnnnnnnnnnnnnnnnnnnnnnnnnnnnnnnnnnnnnnnnnnnnnnnnnnnnnnnnnnnnnnnnnnnnnnnnnnnnnnnnnnnnnnnnnnnnnnnnnnnnnnnnnnnnnnnnnnnnnnnnnnnnnnnnnnnnnnnnnnnnnnnnnnnnnnnnnnnnnnnnnnnnnnnnnnnnnnnnnnnnnnnnnnnnnnnnnnnnnnnnnnnnnnnnnnnnnnnnnnnnnnnnnnnnnnnnnnnnnnnnnnnnnnnnnnnnnnnnnnnnnnnnnnnnnnnnnnnnnnnnnnnnnnnnnnnnnnnnnnnnnnnnnnnnnnnnnnnnnnnnnnnnnnnnnnnnnnnnnnnnnnnnnnnnnnnnnnnnnnnnnnnnnnnnnnnnnnnnnnnnnnnnnnnnnnnnnnnnnnnnnnnnnnnnnnnnnnnnnnnnnnnnnnnnnnnnnnnnnnnnnnnnnnnnnnnnnnnnnnnnnnnnnnnnnnnnnnnnnnnnnnnnnnnnnnnnnnnnnnnnnnnnnnnnnnnnnnnnnnnnnnnnnnnnnnnnnnnnnnnnnnnnnnnnnnnnnnnnnnnnnnnnnnnnnnnnnnnnnnnnnnnnnnnnnnnnnnnnnnnnnnnnnnnnnnnnnnnnnnnnnnnnnnnnnnnnnnnnnnnnnnnnnnnnnnnnnnnnnnnnnnnnnnnnnnnnnnnnnnnnnnnnnnnnnnnnnnnnnnnnnnnnnnnnnnnnnnnnnnnnnnnnnnnnnnnnnnnnnnnnnnnnnnnnnnnnnnnnnnnnnnnnnnnnnnnnnnnnnnnnnnnnnnnnnnnnnnnnnnnnnnnnnnnnnnnnnnnnnnnnnnnnnnnnnnnnnnnnnnnnnnnnnnnnnnnnnnnnnnnnnnnnnnnnnnnnnnnnnnnnnnnnnnnnnnnnnnnnnnnnnnnnnnnnnnnnnnnnnnnnnnnnnnnnnnnnnnnnnnnnnnnnnnnnnnnnnnnnnnnnnnnnnnnnnnnnnnnnnnnnnnnnnnnnnnnnnnnnnnnnnnnnnnnnnnnnnnnnnnnnnnnnnnnnnnnnnnnnnnnnnnnnnnnnnnnnnnnnnnnnnnnnnnnnnnnnnnnnnnnnnnnnnnnnnnnnnnnnnnnnnnnnnnnnnnnnnnnnnnnnnnnnnnnnnnnnnnnnnnnnnnnnnnnnnnnnnnnnnnnnnnnnnnnnnnnnnnnnnnnnnnnnnnnnnnnnnnnnnnnnnnnnnnnnnnnnnnnnnnnnnnnnnnnnnnnnnnnnnnnnnnnnnnnnnnnnnnnnnnnnnnnnnnnnnnnnnnnnnnnnnnnnnnnnnnnnnnnnnnnnnnnnnnnnnnnnnnnnnnnnnnnnnnnnnnnnnnnnnnnnnnnnnnnnnnnnnnnnnnnnnnnnnnnnnnnnnnnnnnnnnnnnnnnnnnnnnnnnnnnnnnnnnnnnnnnnnnnnnnnnnnnnnnnnnnnnnnnnnnnnnnnnnnnnnnnnnnnnnnnnnnnnnnnnnnnnnnnnnnnnnnnnnnnnnnnnnnnnnnnnnnnnnnnnnnnnnnnnnnnnnnnnnnnnnnnnnnnnnnnnnnnnnnnnnnnnnnnnnnnnnnnnnnnnnnnnnnnnnnnnnnnnnnnnnnnnnnnnnnnnnnnnnnnnnnnnnnnnnnnnnnnnnnnnnnnnnnnnnnnnnnnnnnnnnnnnnnnnnnnnnnnnnnnnnnnnnnnnnnnnnnnnnnnnnnnnnnnnnnnnnnnnnnnnnnnnnnnnnnnnnnnnnnnnnnnnnnnnnnnnnnnnnnnnnnnnnnnnnnnnnnnnnnnnnnnnnnnnnnnnnnnnnnnnnnnnnnnnnnnnnnnnnnnnnnnnnnnnnnnnnnnnnnnnnnnnnnnnnnnnnnnnnnnnnnnnnnnnnnnnnnnnnnnnnnnnnnnnnnnnnnnnnnnnnnnnnnnnnnnnnnnnnnnnnnnnnnnnnnnnnnnnnnnnnnnnnnnnnnnnnnnnnnnnnnnnnnnnnnnnnnnnnnnnnnnnnnnnnnnnnnnnnnnnnnnnnnnnnnnnnnnnnnnnnnnnnnnnnnnnnnnnnnnnnnnnnnnnnnnnnnnnnnnnnnnnnnnnnnnnnnnnnnnnnnnnnnnnnnnnnnnnnnnnnnnnnnnnnnnnnnnnnnnnnnnnnnnnnnnnnnnnnnnnnnnnnnnnnnnnnnnnnnnnnnnnnnnnnnnnnnnnnnnnnnnnnnnnnnnnnnnnnnnnnnnnnnnnnnnnnnnnnnnnnnnnnnnnnnnnnnnnnnnnnnnnnnnnnnnnnnnnnnnnnnnnnnnnnnnnnnnnnnnnnnnnnnnnnnnnnnnnnnnnnnnnnnnnnnnnnnnnnnnnnnnnnnnnnnnnnnnnnnnnnnnnnnnnnnnnnnnnnnnnnnnnnnnnnnnnnnnnnnnnnnnnnnnnnnnnnnnnnnnnnnnnnnnnnnnnnnnnnnnnnnnnnnnnnnnnnnnnnnnnnnnnnnnnnnnnnnnnnnnnnnnnnnnnnnnnnnnnnnnnnnnnnnnnnnnnnnnnnnnnnnnnnnnnnnnnnnnnnnnnnnnnnnnnnnnnnnnnnnnnnnnnnnnnnnnnnnnnnnnnnnnnnnnnnnnnnnnnnnnnnnnnnnnnnnnnnnnnnnnnnnnnnnnnnnnnnnnnnnnnnnnnnnnnnnnnnnnnnnnnnnnnnnnnnnnnnnnnnnnnnnnnnnnnnnnnnnnnnnnnnnnnnnnnnnnnnnnnnnnnnnnnnnnnnnnnnnnnnnnnnnnnnnnnnnnnnnnnnnnnnnnnnnnnnnnnnnnnnnnnnnnnnnnnnnnnnnnnnnnnnnnnnnnnnnnnnnnnnnnnnnnnnnnnnnnnnnnnnnnnnnnnnnnnnnnnnnnnnnnnnnnnnnnnnnnnnnnnnnnnnnnnnnnnnnnnnnnnnnnnnnnnnnnnnnnnnnnnnnnnnnnnnnnnnnnnnnnnnnnnnnnnnnnnnnnnnnnnnnnnnnnnnnnnnnnnnnnnnnnnnnnnnnnnnnnnnnnnnnnnnnnnnnnnnnnnnnnnnnnnnnnnnnnnnnnnnnnnnnnnnnnnnnnnnnnnnnnnnnnnnnnnnnnnnnnnnnnnnnnnnnnnnnnnnnnnnnnnnnnnnnnnnnnnnnnnnnnnnnnnnnnnnnnnnnnnnnnnnnnnnnnnnnnnnnnnnnnnnnnnnnnnnnnnnnnnnnnnnnnnnnnnnnnnnnnnnnnnnnnnnnnnnnnnnnnnnnnnnnnnnnnnnnnnnnnnnnnnnnnnnnnnnnnnnnnnnnnnnnnnnnnnnnnnnnnnnnnnnnnnnnnnnnnnnnnnnnnnnnnnnnnnnnnnnnnnnnnnnnnnnnnnnnnnnnnnnnnnnnnnnnnnnnnnnnnnnnnnnnnnnnnnnnnnnnnnnnnnnnnnnnnnnnnnnnnnnnnnnnnnnnnnnnnnnnnnnnnnnnnnnnnnnnnnnnnnnnnnnnnnnnnnnnnnnnnnnnnnnnnnnnnnnnnnnnnnnnnnnnnnnnnnnnnnnnnnnnnnnnnnnnnnnnnnnnnnnnnnnnnnnnnnnnnnnnnnnnnnnnnnnnnnnnnnnnnnnnnnnnnnnnnnnnnnnnnnnnnnnnnnnnnnnnnnnnnnnnnnnnnnnnnnnnnnnnnnnnnnnnnnnnnnnnnnnnnnnnnnnnnnnnnnnnnnnnnnnnnnnnnnnnnnnnnnnnnnnnnnnnnnnnnnnnnnnnnnnnnnnnnnnnnnnnnnnnnnnnnnnnnnnnnnnnnnnnnnnnnnnnnnnnnnnnnnnnnnnnnnnnnnnnnnnnnnnnnnnnnnnnnnnnnnnnnnnnnnnnnnnnnnnnnnnnnnnnnnnnnnnnnnnnnnnnnnnnnnnnnnnnnnnnnnnnnnnnnnnnnnnnnnnnnnnnnnnnnnnnnnnnnnnnnnnnnnnnnnnnnnnnnnnnnnnnnnnnnnnnnnnnnnnnnnnnnnnnnnnnnnnnnnnnnnnnnnnnnnnnnnnnnnnnnnnnnnnnnnnnnnnnnnnnnnnnnnnnnnnnnnnnnnnnnnnnnnnnnnnnnnnnnnnnnnnnnnnnnnnnnnnnnnnnnnnnnnnnnnnnnnnnnnnnnnnnnnnnnnnnnnnnnnnnnnnnnnnnnnnnnnnnnnnnnnnnnnnnnnnnnnnnnnnnnnnnnnnnnnnnnnnnnnnnnnnnnnnnnnnnnnnnnnnnnnnnnnnnnnnnnnnnnnnnnnnnnnnnnnnnnnnnnnnnnnnnnnnnnnnnnnnnnnnnnnnnnnnnnnnnnnnnnnnnnnnnnnnnnnnnnnnnnnnnnnnnnnnnnnnnnnnnnnnnnnnnnnnnnnnnnnnnnnnnnnnnnnnnnnnnnnnnnnnnnnnnnnnnnnnnnnnnnnnnnnnnnnnnnnnnnnnnnnnnnnnnnnnnnnnnnnnnnnnnnnnnnnnnnnnnnnnnnnnnnnnnnnnnnnnnnnnnnnnnnnnnnnnnnnnnnnnnnnnnnnnnnnnnnnnnnnnnnnnnnnnnnnnnnnnnnnnnnnnnnnnnnnnnnnnnnnnnnnnnnnnnnnnnnnnnnnnnnnnnnnnnnnnnnnnnnnnnnnnnnnnnnnnnnnnnnnnnnnnnnnnnnnnnnnnnnnnnnnnnnnnnnnnnnnnnnnnnnnnnnnnnnnnnnnnnnnnnnnnnnnnnnnnnnnnnnnnnnnnnnnnnnnnnnnnnnnnnnnnnnnnnnnnnnnnnnnnnnnnnnnnnnnnnnnnnnnnnnnnnnnnnnnnnnnnnnnnnnnnnnnnnnnnnnnnnnnnnnnnnnnnnnnnnnnnnnnnnnnnnnnnnnnnnnnnnnnnnnnnnnnnnnnnnnnnnnnnnnnnnnnnnnnnnnnnnnnnnnnnnnnnnnnnnnnnnnnnnnnnnnnnnnnnnnnnnnnnnnnnnnnnnnnnnnnnnnnnnnnnnnnnnnnnnnnnnnnnnnnnnnnnnnnnnnnnnnnnnnnnnnnnnnnnnnnnnnnnnnnnnnnnnnnnnnnnnnnnnnnnnnnnnnnnnnnnnnnnnnnnnnnnnnnnnnnnnnnnnnnnnnnnnnnnnnnnnnnnnnnnnnnnnnnnnnnnnnnnnnnnnnnnnnnnnnnnnnnnnnnnnnnnnnnnnnnnnnnnnnnnnnnnnnnnnnnnnnnnnnnnnnnnnnnnnnnnnnnnnnnnnnnnnnnnnnnnnnnnnnnnnnnnnnnnnnnnnnnnnnnnnnnnnnnnnnnnnnnnnnnnnnnnnnnnnnnnnnnnnnnnnnnnnnnnnnnnnnnnnnnnnnnnnnnnnnnnnnnnnnnnnnnnnnnnnnnnnnnnnnnnnnnnnnnnnnnnnnnnnnnnnnnnnnnnnnnnnnnnnnnnnnnnnnnnnnnnnnnnnnnnnnnnnnnnnnnnnnnnnnnnnnnnnnnnnnnnnnnnnnnnnnnnnnnnnnnnnnnnnnnnnnnnnnnnnnnnnnnnnnnnnnnnnnnnnnnnnnnnnnnnnnnnnnnnnnnnnnnnnnnnnnnnnnnnnnnnnnnnnnnnnnnnnnnnnnnnnnnnnnnnnnnnnnnnnnnnnnnnnnnnnnnnnnnnnnnnnnnnnnnnnnnnnnnnnnnnnnnnnnnnnnnnnnnnnnnnnnnnnnnnnnnnnnnnnnnnnnnnnnnnnnnnnnnnnnnnnnnnnnnnnnnnnnnnnnnnnnnnnnnnnnnnnnnnnnnnnnnnnnnnnnnnnnnnnnnnnnnnnnnnnnnnnnnnnnnnnnnnnnnnnnnnnnnnnnnnnnnnnnnnnnnnnnnnnnnnnnnnnnnnnnnnnnnnnnnnnnnnnnnnnnnnnnnnnnnnnnnnnnnnnnnnnnnnnnnnnnnnnnnnnnnnnnnnnnnnnnnnnnnnnnnnnnnnnnnnnnnnnnnnnnnnnnnnnnnnnnnnnnnnnnnnnnnnnnnnnnnnnnnnnnnnnnnnnnnnnnnnnnnnnnnnnnnnnnnnnnnnnnnnnnnnnnnnnnnnnnnnnnnnnnnnnnnnnnnnnnnnnnnnnnnnnnnnnnnnnnnnnnnnnnnnnnnnnnnnnnnnnnnnnnnnnnnnnnnnnnnnnnnnnnnnnnnnnnnnnnnnnnnnnnnnnnnnnnnnnnnnnnnnnnnnnnnnnnnnnnnnnnnnnnnnnnnnnnnnnnnnnnnnnnnnnnnnnnnnnnnnnnnnnnnnnnnnnnnnnnnnnnnnnnnnnnnnnnnnnnnnnnnnnnnnnnnnnnnnnnnnnnnnnnnnnnnnnnnnnnnnnnnnnnnnnnnnnnnnnnnnnnnnnnnnnnnnnnnnnnnnnnnnnnnnnnnnnnnnnnnnnnnnnnnnnnnnnnnnnnnnnnnnnnnnnnnnnnnnnnnnnnnnnnnnnnnnnnnnnnnnnnnnnnnnnnnnnnnnnnnnnnnnnnnnnnnnnnnnnnnnnnnnnnnnnnnnnnnnnnnnnnnnnnnnnnnnnnnnnnnnnnnnnnnnnnnnnnnnnnnnnnnnnnnnnnnnnnnnnnnnnnnnnnnnnnnnnnnnnnnnnnnnnnnnnnnnnnnnnnnnnnnnnnnnnnnnnnnnnnnnnnnnnnnnnnnnnnnnnnnnnnnnnnnnnnnnnnnnnnnnnnnnnnnnnnnnnnnnnnnnnnnnnnnnnnnnnnnnnnnnnnnnnnnnnnnnnnnnnnnnnnnnnnnnnnnnnnnnnnnnnnnnnnnnnnnnnnnnnnnnnnnnnnnnnnnnnnnnnnnnnnnnnnnnnnnnnnnnnnnnnnnnnnnnnnnnnnnnnnnnnnnnnnnnnnnnnnnnnnnnnnnnnnnnnnnnnnnnnnnnnnnnnnnnnnnnnnnnnnnnnnnnnnnnnnnnnnnnnnnnnnnnnnnnnnnnnnnnnnnnnnnnnnnnnnnnnnnnnnnnnnnnnnnnnnnnnnnnnnnnnnnnnnnnnnnnnnnnnnnnnnnnnnnnnnnnnnnnnnnnnnnnnnnnnnnnnnnnnnnnnnnnnnnnnnnnnnnnnnnnnnnnnnnnnnnnnnnnnnnnnnnnnnnnnnnnnnnnnnnnnnnnnnnnnnnnnnnnnnnnnnnnnnnnnnnnnnnnnnnnnnnnnnnnnnnnnnnnnnnnnnnnnnnnnnnnnnnnnnnnnnnnnnnnnnnnnnnnnnnnnnnnnnnnnnnnnnnnnnnnnnnnnnnnnnnnnnnnnnnnnnnnnnnnnnnnnnnnnnnnnnnnnnnnnnnnnnnnnnnnnnnnnnnnnnnnnnnnnnnnnnnnnnnnnnnnnnnnnnnnnnnnnnnnnnnnnnnnnnnnnnnnnnnnnnnnnnnnnnnnnnnnnnnnnnnnnnnnnnnnnnnnnnnnnnnnnnnnnnnnnnnnnnnnnnnnnnnnnnnnnnnnnnnnnnnnnnnnnnnnnnnnnnnnnnnnnnnnnnnnnnnnnnnnnnnnnnnnnnnnnnnnnnnnnnnnnnnnnnnnnnnnnnnnnnnnnnnnnnnnnnnnnnnnnnnnnnnnnnnnnnnnnnnnnnnnnnnnnnnnnnnnnnnnnnnnnnnnnnnnnnnnnnnnnnnnnnnnnnnnnnnnnnnnnnnnnnnnnnnnnnnnnnnnnnnnnnnnnnnnnnnnnnnnnnnnnnnnnnnnnnnnnnnnnnnnnnnnnnnnnnnnnnnnnnnnnnnnnnnnnnnnnnnnnnnnnnnnnnnnnnnnnnnnnnnnnnnnnnnnnnnnnnnnnnnnnnnnnnnnnnnnnnnnnnnnnnnnnnnnnnnnnnnnnnnnnnnnnnnnnnnnnnnnnnnnnnnnnnnnnnnnnnnnnnnnnnnnnnnnnnnnnnnnnnnnnnnnnnnnnnnnnnnnnnnnnnnnnnnnnnnnnnnnnnnnnnnnnnnnnnnnnnnnnnnnnnnnnnnnnnnnnnnnnnnnnnnnnnnnnnnnnnnnnnnnnnnnnnnnnnnnnnnnnnnnnnnnnnnnnnnnnnnnnnnnnnnnnnnnnnnnnnnnnnnnnnnnnnnnnnnnnnnnnnnnnnnnnnnnnnnnnnnnnnnnnnnnnnnnnnnnnnnnnnnnnnnnnnnnnnnnnnnnnnnnnnnnnnnnnnnnnnnnnnnnnnnnnnnnnnnnnnnnnnnnnnnnnnnnnnnnnnnnnnnnnnnnnnnnnnnnnnnnnnnnnnnnnnnnnnnnnnnnnnnnnnnnnnnnnnnnnnnnnnnnnnnnnnnnnnnnnnnnnnnnnnnnnnnnnnnnnnnnnnnnnnnnnnnnnnnnnnnnnnnnnnnnnnnnnnnnnnnnnnnnnnnnnnnnnnnnnnnnnnnnnnnnnnnnnnnnnnnnnnnnnnnnnnnnnnnnnnnnnnnnnnnnnnnnnnnnnnnnnnnnnnnnnnnnnnnnnnnnnnnnnnnnnnnnnnnnnnnnnnnnnnnnnnnnnnnnnnnnnnnnnnnnnnnnnnnnnnnnnnnnnnnnnnnnnnnnnnnnnnnnnnnnnnnnnnnnnnnnnnnnnnnnnnnnnnnnnnnnnnnnnnnnnnnnnnnnnnnnnnnnnnnnnnnnnnnnnnnnnnnnnnnnnnnnnnnnnnnnnnnnnnnnnnnnnnnnnnnnnnnnnnnnnnnnnnnnnnnnnnnnnnnnnnnnnnnnnnnnnnnnnnnnnnnnnnnnnnnnnnnnnnnnnnnnnnnnnnnnnnnnnnnnnnnnnnnnnnnnnnnnnnnnnnnnnnnnnnnnnnnnnnnnnnnnnnnnnnnnnnnnnnnnnnnnnnnnnnnnnnnnnnnnnnnnnnnnnnnnnnnnnnnnnnnnnnnnnnnnnnnnnnnnnnnnnnnnnnnnnnnnnnnnnnnnnnnnnnnnnnnnnnnnnnnnnnnnnnnnnnnnnnnnnnnnnnnnnnnnnnnnnnnnnnnnnnnnnnnnnnnnnnnnnnnnnnnnnnnnnnnnnnnnnnnnnnnnnnnnnnnnnnnnnnnnnnnnnnnnnnnnnnnnnnnnnnnnnnnnnnnnnnnnnnnnnnnnnnnnnnnnnnnnnnnnnnnnnnnnnnnnnnnnnnnnnnnnnnnnnnnnnnnnnnnnnnnnnnnnnnnnnnnnnnnnnnnnnnnnnnnnnnnnnnnnnnnnnnnnnnnnnnnnnnnnnnnnnnnnnnnnnnnnnnnnnnnnnnnnnnnnnnnnnnnnnnnnnnnnnnnnnnnnnnnnnnnnnnnnnnnnnnnnnnnnnnnnnnnnnnnnnnnnnnnnnnnnnnnnnnnnnnnnnnnnnnnnnnnnnnnnnnnnnnnnnnnnnnnnnnnnnnnnnnnnnnnnnnnnnnnnnnnnnnnnnnnnnnnnnnnnnnnnnnnnnnnnnnnnnnnnnnnnnnnnnnnnnnnnnnnnnnnnnnnnnnnnnnnnnnnnnnnnnnnnnnnnnnnnnnnnnnnnnnnnnnnnnnnnnnnnnnnnnnnnnnnnnnnnnnnnnnnnnnnnnnnnnnnnnnnnnnnnnnnnnnnnnnnnnnnnnnnnnnnnnnnnnnnnnnnnnnnnnnnnnnnnnnnnnnnnnnnnnnnnnnnnnnnnnnnnnnnnnnnnnnnnnnnnnnnnnnnnnnnnnnnnnnnnnnnnnnnnnnnnnnnnnnnnnnnnnnnnnnnnnnnnnnnnnnnnnnnnnnnnnnnnnnnnnnnnnnnnnnnnnnnnnnnnnnnnnnnnnnnnnnnnnnnnnnnnnnnnnnnnnnnnnnnnnnnnnnnnnnnnnnnnnnnnnnnnnnnnnnnnnnnnnnnnnnnnnnnnnnnnnnnnnnnnnnnnnnnnnnnnnnnnnnnnnnnnnnnnnnnnnnnnnnnnnnnnnnnnnnnnnnnnnnnnnnnnnnnnnnnnnnnnnnnnnnnnnnnnnnnnnnnnnnnnnnnnnnnnnnnnnnnnnnnnnnnnnnnnnnnnnnnnnnnnnnnnnnnnnnnnnnnnnnnnnnnnnnnnnnnnnnnnnnnnnnnnnnnnnnnnnnnnnnnnnnnnnnnnnnnnnnnnnnnnnnnnnnnnnnnnnnnnnnnnnnnnnnnnnnnnnnnnnnnnnnnnnnnnnnnnnnnnnnnnnnnnnnnnnnnnnnnnnnnnnnnnnnnnnnnnnnnnnnnnnnnnnnnnnnnnnnnnnnnnnnnnnnnnnnnnnnnnnnnnnnnnnnnnnnnnnnnnnnnnnnnnnnnnnnnnnnnnnnnnnnnnnnnnnnnnnnnnnnnnnnnnnnnnnnnnnnnnnnnnnnnnnnnnnnnnnnnnnnnnnnnnnnnnnnnnnnnnnnnnnnnnnnnnnnnnnnnnnnnnnnnnnnnnnnnnnnnnnnnnnnnnnnnnnnnnnnnnnnnnnnnnnnnnnnnnnnnnnnnnnnnnnnnnnnnnnnnnnnnnnnnnnnnnnnnnnnnnnnnnnnnnnnnnnnnnnnnnnnnnnnnnnnnnnnnnnnnnnnnnnnnnnnnnnnnnnnnnnnnnnnnnnnnnnnnnnnnnnnnnnnnnnnnnnnnnnnnnnnnnnnnnnnnnnnnnnnnnnnnnnnnnnnnnnnnnnnnnnnnnnnnnnnnnnnnnnnnnnnnnnnnnnnnnnnnnnnnnnnnnnnnnnnnnnnnnnnnnnnnnnnnnnnnnnnnnnnnnnnnnnnnnnnnnnnnnnnnnnnnnnnnnnnnnnnnnnnnnnnnnnnnnnnnnnnnnnnnnnnnnnnnnnnnnnnnnnnnnnnnnnnnnnnnnnnnnnnnnnnnnnnnnnnnnnnnnnnnnnnnnnnnnnnnnnnnnnnnnnnnnnnnnnnnnnnnnnnnnnnnnnnnnnnnnnnnnnnnnnnnnnnnnnnnnnnnnnnnnnnnnnnnnnnnnnnnnnnnnnnnnnnnnnnnnnnnnnnnnnnnnnnnnnnnnnnnnnnnnnnnnnnnnnnnnnnnnnnnnnnnnnnnnnnnnnnnnnnnnnnnnnnnnnnnnnnnnnnnnnnnnnnnnnnnnnnnnnnnnnnnnnnnnnnnnnnnnnnnnnnnnnnnnnnnnnnnnnnnnnnnnnnnnnnnnnnnnnnnnnnnnnnnnnnnnnnnnnnnnnnnnnnnnnnnnnnnnnnnnnnnnnnnnnnnnnnnnnnnnnnnnnnnnnnnnnnnnnnnnnnnnnnnnnnnnnnnnnnnnnnnnnnnnnnnnnnnnnnnnnnnnnnnnnnnnnnnnnnnnnnnnnnnnnnnnnnnnnnnnnnnnnnnnnnnnnnnnnnnnnnnnnnnnnnnnnnnnnnnnnnnnnnnnnnnnnnnnnnnnnnnnnnnnnnnnnnnnnnnnnnnnnnnnnnnnnnnnnnnnnnnnnnnnnnnnnnnnnnnnnnnnnnnnnnnnnnnnnnnnnnnnnnnnnnnnnnnnnnnnnnnnnnnnnnnnnnnnnnnnnnnnnnnnnnnnnnnnnnnnnnnnnnnnnnnnnnnnnnnnnnnnnnnnnnnnnnnnnnnnnnnnnnnnnnnnnnnnnnnnnnnnnnnnnnnnnnnnnnnnnnnnnnnnnnnnnnnnnnnnnnnnnnnnnnnnnnnnnnnnnnnnnnnnnnnnnnnnnnnnnnnnnnnnnnnnnnnnnnnnnnnnnnnnnnnnnnnnnnnnnnnnnnnnnnnnnnnnnnnnnnnnnnnnnnnnnnnnnnnnnnnnnnnnnnnnnnnnnnnnnnnnnnnnnnnnnnnnnnnnnnnnnnnnnnnnnnnnnnnnnnnnnnnnnnnnnnnnnnnnnnnnnnnnnnnnnnnnnnnnnnnnnnnnnnnnnnnnnnnnnnnnnnnnnnnnnnnnnnnnnnnnnnnnnnnnnnnnnnnnnnnnnnnnnnnnnnnnnnnnnnnnnnnnnnnnnnnnnnnnnnnnnnnnnnnnnnnnnnnnnnnnnnnnnnnnnnnnnnnnnnnnnnnnnnnnnnnnnnnnnnnnnnnnnnnnnnnnnnnnnnnnnnnnnnnnnnnnnnnnnnnnnnnnnnnnnnnnnnnnnnnnnnnnnnnnnnnnnnnnnnnnnnnnnnnnnnnnnnnnnnnnnnnnnnnnnnnnnnnnnnnnnnnnnnnnnnnnnnnnnnnnnnnnnnnnnnnnnnnnnnnnnnnnnnnnnnnnnnnnnnnnnnnnnnnnnnnnnnnnnnnnnnnnnnnnnnnnnnnnnnnnnnnnnnnnnnnnnnnnnnnnnnnnnnnnnnnnnnnnnnnnnnnnnnnnnnnnnnnnnnnnnnnnnnnnnnnnnnnnnnnnnnnnnnnnnnnnnnnnnnnnnnnnnnnnnnnnnnnnnnnnnnnnnnnnnnnnnnnnnnnnnnnnnnnnnnnnnnnnnnnnnnnnnnnnnnnnnnnnnnnnnnnnnnnnnnnnnnnnnnnnnnnnnnnnnnnnnnnnnnnnnnnnnnnnnnnnnnnnnnnnnnnnnnnnnnnnnnnnnnnnnnnnnnnnnnnnnnnnnnnnnnnnnnnnnnnnnnnnnnnnnnnnnnnnnnnnnnnnnnnnnnnnnnnnnnnnnnnnnnnnnnnnnnnnnnnnnnnnnnnnnnnnnnnnnnnnnnnnnnnnnnnnnnnnnnnnnnnnnnnnnnnnnnnnnnnnnnnnnnnnnnnnnnnnnnnnnnnnnnnnnnnnnnnnnnnnnnnnnnnnnnnnnnnnnnnnnnnnnnnnnnnnnnnnnnnnnnnnnnnnnnnnnnnnnnnnnnnnnnnnnnnnnnnnnnnnnnnnnnnnnnnnnnnnnnnnnnnnnnnnnnnnnnnnnnnnnnnnnnnnnnnnnnnnnnnnnnnnnnnnnnnnnnnnnnnnnnnnnnnnnnnnnnnnnnnnnnnnnnnnnnnnnnnnnnnnnnnnnnnnnnnnnnnnnnnnnnnnnnnnnnnnnnnnnnnnnnnnnnnnnnnnnnnnnnnnnnnnnnnnnnnnnnnnnnnnnnnnnnnnnnnnnnnnnnnnnnnnnnnnnnnnnnnnnnnnnnnnnnnnnnnnnnnnnnnnnnnnnnnnnnnnnnnnnnnnnnnnnnnnnnnnnnnnnnnnnnnnnnnnnnnnnnnnnnnnnnnnnnnnnnnnnnnnnnnnnnnnnnnnnnnnnnnnnnnnnnnnnnnnnnnnnnnnnnnnnnnnnnnnnnnnnnnnnnnnnnnnnnnnnnnnnnnnnnnnnnnnnnnnnnnnnnnnnnnnnnnnnnnnnnnnnnnnnnnnnnnnnnnnnnnnnnnnnnnnnnnnnnnnnnnnnnnnnnnnnnnnnnnnnnnnnnnnnnnnnnnnnnnnnnnnnnnnnnnnnnnnnnnnnnnnnnnnnnnnnnnnnnnnnnnnnnnnnnnnnnnnnnnnnnnnnnnnnnnnnnnnnnnnnnnnnnnnnnnnnnnnnnnnnnnnnnnnnnnnnnnnnnnnnnnnnnnnnnnnnnnnnnnnnnnnnnnnnnnnnnnnnnnnnnnnnnnnnnnnnnnnnnnnnnnnnnnnnnnnnnnnnnnnnnnnnnnnnnnnnnnnnnnnnnnnnnnnnnnnnnnnnnnnnnnnnnnnnnnnnnnnnnnnnnnnnnnnnnnnnnnnnnnnnnnnnnnnnnnnnnnnnnnnnnnnnnnnnnnnnnnnnnnnnnnnnnnnnnnnnnnnnnnnnnnnnnnnnnnnnnnnnnnnnnnnnnnnnnnnnnnnnnnnnnnnnnnnnnnnnnnnnnnnnnnnnnnnnnnnnnnnnnnnnnnnnnnnnnnnnnnnnnnnnnnnnnnnnnnnnnnnnnnnnnnnnnnnnnnnnnnnnnnnnnnnnnnnnnnnnnnnnnnnnnnnnnnnnnnnnnnnnnnnnnnnnnnnnnnnnnnnnnnnnnnnnnnnnnnnnnnnnnnnnnnnnnnnnnnnnnnnnnnnnnnnnnnnnnnnnnnnnnnnnnnnnnnnnnnnnnnnnnnnnnnnnnnnnnnnnnnnnnnnnnnnnnnnnnnnnnnnnnnnnnnnnnnnnnnnnnnnnnnnnnnnnnnnnnnnnnnnnnnnnnnnnnnnnnnnnnnnnnnnnnnnnnnnnnnnnnnnnnnnnnnnnnnnnnnnnnnnnnnnnnnnnnnnnnnnnnnnnnnnnnnnnnnnnnnnnnnnnnnnnnnnnnnnnnnnnnnnnnnnnnnnnnnnnnnnnnnnnnnnnnnnnnnnnnnnnnnnnnnnnnnnnnnnnnnnnnnnnnnnnnnnnnnnnnnnnnnnnnnnnnnnnnnnnnnnnnnnnnnnnnnnnnnnnnnnnnnnnnnnnnnnnnnnnnnnnnnnnnnnnnnnnnnnnnnnnnnnnnnnnnnnnnnnnnnnnnnnnnnnnnnnnnnnnnnnnnnnnnnnnnnnnnnnnnnnnnnnnnnnnnnnnnnnnnnnnnnnnnnnnnnnnnnnnnnnnnnnnnnnnnnnnnnnnnnnnnnnnnnnnnnnnnnnnnnnnnnnnnnnnnnnnnnnnnnnnnnnnnnnnnnnnnnnnnnnnnnnnnnnnnnnnnnnnnnnnnnnnnnnnnnnnnnnnnnnnnnnnnnnnnnnnnnnnnnnnnnnnnnnnnnnnnnnnnnnnnnnnnnnnnnnnnnnnnnnnnnnnnnnnnnnnnnnnnnnnnnnnnnnnnnnnnnnnnnnnnnnnnnnnnnnnnnnnnnnnnnnnnnnnnnnnnnnnnnnnnnnnnnnnnnnnnnnnnnnnnnnnnnnnnnnnnnnnnnnnnnnnnnnnnnnnnnnnnnnnnnnnnnnnnnnnnnnnnnnnnnnnnnnnnnnnnnnnnnnnnnnnnnnnnnnnnnnnnnnnnnnnnnnnnnnnnnnnnnnnnnnnnnnnnnnnnnnnnnnnnnnnnnnnnnnnnnnnnnnnnnnnnnnnnnnnnnnnnnnnnnnnnnnnnnnnnnnnnnnnnnnnnnnnnnnnnnnnnnnnnnnnnnnnnnnnnnnnnnnnnnnnnnnnnnnnnnnnnnnnnnnnnnnnnnnnnnnnnnnnnnnnnnnnnnnnnnnnnnnnnnnnnnnnnnnnnnnnnnnnnnnnnnnnnnnnnnnnnnnnnnnnnnnnnnnnnnnnnnnnnnnnnnnnnnnnnnnnnnnnnnnnnnnnnnnnnnnnnnnnnnnnnnnnnnnnnnnnnnnnnnnnnnnnnnnnnnnnnnnnnnnnnnnnnnnnnnnnnnnnnnnnnnnnnnnnnnnnnnnnnnnnnnnnnnnnnnnnnnnnnnnnnnnnnnnnnnnnnnnnnnnnnnnnnnnnnnnnnnnnnnnnnnnnnnnnnnnnnnnnnnnnnnnnnnnnnnnnnnnnnnnnnnnnnnnnnnnnnnnnnnnnnnnnnnnnnnnnnnnnnnnnnnnnnnnnnnnnnnnnnnnnnnnnnnnnnnnnnnnnnnnnnnnnnnnnnnnnnnnnnnnnnnnnnnnnnnnnnnnnnnnnnnnnnnnnnnnnnnnnnnnnnnnnnnnnnnnnnnnnnnnnnnnnnnnnnnnnnnnnnnnnnnnnnnnnnnnnnnnnnnnnnnnnnnnnnnnnnnnnnnnnnnnnnnnnnnnnnnnnnnnnnnnnnnnnnnnnnnnnnnnnnnnnnnnnnnnnnnnnnnnnnnnnnnnnnnnnnnnnnnnnnnnnnnnnnnnnnnnnnnnnnnnnnnnnnnnnnnnnnnnnnnnnnnnnnnnnnnnnnnnnnnnnnnnnnnnnnnnnnnnnnnnnnnnnnnnnnnnnnnnnnnnnnnnnnnnnnnnnnnnnnnnnnnnnnnnnnnnnnnnnnnnnnnnnnnnnnnnnnnnnnnnnnnnnnnnnnnnnnnnnnnnnnnnnnnnnnnnnnnnnnnnnnnnnnnnnnnnnnnnnnnnnnnnnnnnnnnnnnnnnnnnnnnnnnnnnnnnnnnnnnnnnnnnnnnnnnnnnnnnnnnnnnnnnnnnnnnnnnnnnnnnnnnnnnnnnnnnnnnnnnnnnnnnnnnnnnnnnnnnnnnnnnnnnnnnnnnnnnnnnnnnnnnnnnnnnnnnnnnnnnnnnnnnnnnnnnnnnnnnnnnnnnnnnnnnnnnnnnnnnnnnnnnnnnnnnnnnnnnnnnnnnnnnnnnnnnnnnnnnnnnnnnnnnnnnnnnnnnnnnnnnnnnnnnnnnnnnnnnnnnnnnnnnnnnnnnnnnnnnnnnnnnnnnnnnnnnnnnnnnnnnnnnnnnnnnnnnnnnnnnnnnnnnnnnnnnnnnnnnnnnnnnnnnnnnnnnnnnnnnnnnnnnnnnnnnnnnnnnnnnnnnnnnnnnnnnnnnnnnnnnnnnnnnnnnnnnnnnnnnnnnnnnnnnnnnnnnnnnnnnnnnnnnnnnnnnnnnnnnnnnnnnnnnnnnnnnnnnnnnnnnnnnnnnnnnnnnnnnnnnnnnnnnnnnnnnnnnnnnnnnnnnnnnnnnnnnnnnnnnnnnnnnnnnnnnnnnnnnnnnnnnnnnnnnnnnnnnnnnnnnnnnnnnnnnnnnnnnnnnnnnnnnnnnnnnnnnnnnnnnnnnnnnnnnnnnnnnnnnnnnnnnnnnnnnnnnnnnnnnnnnnnnnnnnnnnnnnnnnnnnnnnnnnnnnnnnnnnnnnnnnnnnnnnnnnnnnnnnnnnnnnnnnnnnnnnnnnnnnnnnnnnnnnnnnnnnnnnnnnnnnnnnnnnnnnnnnnnnnnnnnnnnnnnnnnnnnnnnnnnnnnnnnnnnnnnnnnnnnnnnnnnnnnnnnnnnnnnnnnnnnnnnnnnnnnnnnnnnnnnnnnnnnnnnnnnnnnnnnnnnnnnnnnnnnnnnnnnnnnnnnnnnnnnnnnnnnnnnnnnnnnnnnnnnnnnnnnnnnnnnnnnnnnnnnnnnnnnnnnnnnnnnnnnnnnnnnnnnnnnnnnnnnnnnnnnnnnnnnnnnnnnnnnnnnnnnnnnnnnnnnnnnnnnnnnnnnnnnnnnnnnnnnnnnnnnnnnnnnnnnnnnnnnnnnnnnnnnnnnnnnnnnnnnnnnnnnnnnnnnnnnnnnnnnnnnnnnnnnnnnnnnnnnnnnnnnnnnnnnnnnnnnnnnnnnnnnnnnnnnnnnnnnnnnnnnnnnnnnnnnnnnnnnnnnnnnnnnnnnnnnnnnnnnnnnnnnnnnnnnnnnnnnnnnnnnnnnnnnnnnnnnnnnnnnnnnnnnnnnnnnnnnnnnnnnnnnnnnnnnnnnnnnnnnnnnnnnnnnnnnnnnnnnnnnnnnnnnnnnnnnnnnnnnnnnnnnnnnnnnnnnnnnnnnnnnnnnnnnnnnnnnnnnnnnnnnnnnnnnnnnnnnnnnnnnnnnnnnnnnnnnnnnnnnnnnnnnnnnnnnnnnnnnnnnnnnnnnnnnnnnnnnnnnnnnnnnnnnnnnnnnnnnnnnnnnnnnnnnnnnnnnnnnnnnnnnnnnnnnnnnnnnnnnnnnnnnnnnnnnnnnnnnnnnnnnnnnnnnnnnnnnnnnnnnnnnnnnnnnnnnnnnnnnnnnnnnnnnnnnnnnnnnnnnnnnnnnnnnnnnnnnnnnnnnnnnnnnnnnnnnnnnnnnnnnnnnnnnnnnnnnnnnnnnnnnnnnnnnnnnnnnnnnnnnnnnnnnnnnnnnnnnnnnnnnnnnnnnnnnnnnnnnnnnnnnnnnnnnnnnnnnnnnnnnnnnnnnnnnnnnnnnnnnnnnnnnnnnnnnnnnnnnnnnnnnnnnnnnnnnnnnnnnnnnnnnnnnnnnnnnnnnnnnnnnnnnnnnnnnnnnnnnnnnnnnnnnnnnnnnnnnnnnnnnnnnnnnnnnnnnnnnnnnnnnnnnnnnnnnnnnnnnnnnnnnnnnnnnnnnnnnnnnnnnnnnnnnnnnnnnnnnnnnnnnnnnnnnnnnnnnnnnnnnnnnnnnnnnnnnnnnnnnnnnnnnnnnnnnnnnnnnnnnnnnnnnnnnnnnnnnnnnnnnnnnnnnnnnnnnnnnnnnnnnnnnnnnnnnnnnnnnnnnnnnnnnnnnnnnnnnnnnnnnnnnnnnnnnnnnnnnnnnnnnnnnnnnnnnnnnnnnnnnnnnnnnnnnnnnnnnnnnnnnnnnnnnnnnnnnnnnnnnnnnnnnnnnnnnnnnnnnnnnnnnnnnnnnnnnnnnnnnnnnnnnnnnnnnnnnnnnnnnnnnnnnnnnnnnnnnnnnnnnnnnnnnnnnnnnnnnnnnnnnnnnnnnnnnnnnnnnnnnnnnnnnnnnnnnnnnnnnnnnnnnnnnnnnnnnnnnnnnnnnnnnnnnnnnnnnnnnnnnnnnnnnnnnnnnnnnnnnnnnnnnnnnnnnnnnnnnnnnnnnnnnnnnnnnnnnnnnnnnnnnnnnnnnnnnnnnnnnnnnnnnnnnnnnnnnnnnnnnnnnnnnnnnnnnnnnnnnnnnnnnnnnnnnnnnnnnnnnnnnnnnnnnnnnnnnnnnnnnnnnnnnnnnnnnnnnnnnnnnnnnnnnnnnnnnnnnnnnnnnnnnnnnnnnnnnnnnnnnnnnnnnnnnnnnnnnnnnnnnnnnnnnnnnnnnnnnnnnnnnnnnnnnnnnnnnnnnnnnnnnnnnnnnnnnnnnnnnnnnnnnnnnnnnnnnnnnnnnnnnnnnnnnnnnnnnnnnnnnnnnnnnnnnnnnnnnnnnnnnnnnnnnnnnnnnnnnnnnnnnnnnnnnnnnnnnnnnnnnnnnnnnnnnnnnnnnnnnnnnnnnnnnnnnnnnnnnnnnnnnnnnnnnnnnnnnnnnnnnnnnnnnnnnnnnnnnnnnnnnnnnnnnnnnnnnnnnnnnnnnnnnnnnnnnnnnnnnnnnnnnnnnnnnnnnnnnnnnnnnnnnnnnnnnnnnnnnnnnnnnnnnnnnnnnnnnnnnnnnnnnnnnnnnnnnnnnnnnnnnnnnnnnnnnnnnnnnnnnnnnnnnnnnnnnnnnnnnnnnnnnnnnnnnnnnnnnnnnnnnnnnnnnnnnnnnnnnnnnnnnnnnnnnnnnnnnnnnnnnnnnnnnnnnnnnnnnnnnnnnnnnnnnnnnnnnnnnnnnnnnnnnnnnnnnnnnnnnnnnnnnnnnnnnnnnnnnnnnnnnnnnnnnnnnnnnnnnnnnnnnnnnnnnnnnnnnnnnnnnnnnnnnnnnnnnnnnnnnnnnnnnnnnnnnnnnnnnnnnnnnnnnnnnnnnnnnnnnnnnnnnnnnnnnnnnnnnnnnnnnnnnnnnnnnnnnnnnnnnnnnnnnnnnnnnnnnnnnnnnnnnnnnnnnnnnnnnnnnnnnnnnnnnnnnnnnnnnnnnnnnnnnnnnnnnnnnnnnnnnnnnnnnnnnnnnnnnnnnnnnnnnnnnnnnnnnnnnnnnnnnnnnnnnnnnnnnnnnnnnnnnnnnnnnnnnnnnnnnnnnnnnnnnnnnnnnnnnnnnnnnnnnnnnnnnnnnnnnnnnnnnnnnnnnnnnnnnnnnnnnnnnnnnnnnnnnnnnnnnnnnnnnnnnnnnnnnnnnnnnnnnnnnnnnnnnnnnnnnnnnnnnnnnnnnnnnnnnnnnnnnnnnnnnnnnnnnnnnnnnnnnnnnnnnnnnnnnnnnnnnnnnnnnnnnnnnnnnnnnnnnnnnnnnnnnnnnnnnnnnnnnnnnnnnnnnnnnnnnnnnnnnnnnnnnnnnnnnnnnnnnnnnnnnnnnnnnnnnnnnnnnnnnnnnnnnnnnnnnnnnnnnnnnnnnnnnnnnnnnnnnnnnnnnnnnnnnnnnnnnnnnnnnnnnnnnnnnnnnnnnnnnnnnnnnnnnnnnnnnnnnnnnnnnnnnnnnnnnnnnnnnnnnnnnnnnnnnnnnnnnnnnnnnnnnnnnnnnnnnnnnnnnnnnnnnnnnnnnnnnnnnnnnnnnnnnnnnnnnnnnnnnnnnnnnnnnnnnnnnnnnnnnnnnnnnnnnnnnnnnnnnnnnnnnnnnnnnnnnnnnnnnnnnnnnnnnnnnnnnnnnnnnnnnnnnnnnnnnnnnnnnnnnnnnnnnnnnnnnnnnnnnnnnnnnnnnnnnnnnnnnnnnnnnnnnnnnnnnnnnnnnnnnnnnnnnnnnnnnnnnnnnnnnnnnnnnnnnnnnnnnnnnnnnnnnnnnnnnnnnnnnnnnnnnnnnnnnnnnnnnnnnnnnnnnnnnnnnnnnnnnnnnnnnnnnnnnnnnnnnnnnnnnnnnnnnnnnnnnnnnnnnnnnnnnnnnnnnnnnnnnnnnnnnnnnnnnnnnnnnnnnnnnnnnnnnnnnnnnnnnnnnnnnnnnnnnnnnnnnnnnnnnnnnnnnnnnnnnnnnnnnnnnnnnnnnnnnnnnnnnnnnnnnnnnnnnnnnnnnnnnnnnnnnnnnnnnnnnnnnnnnnnnnnnnnnnnnnnnnnnnnnnnnnnnnnnnnnnnnnnnnnnnnnnnnnnnnnnnnnnnnnnnnnnnnnnnnnnnnnnnnnnnnnnnnnnnnnnnnnnnnnnnnnnnnnnnnnnnnnnnnnnnnnnnnnnnnnnnnnnnnnnnnnnnnnnnnnnnnnnnnnnnnnnnnnnnnnnnnnnnnnnnnnnnnnnnnnnnnnnnnnnnnnnnnnnnnnnnnnnnnnnnnnnnnnnnnnnnnnnnnnnnnnnnnnnnnnnnnnnnnnnnnnnnnnnnnnnnnnnnnnnnnnnnnnnnnnnnnnnnnnnnnnnnnnnnnnnnnnnnnnnnnnnnnnnnnnnnnnnnnnnnnnnnnnnnnnnnnnnnnnnnnnnnnnnnnnnnnnnnnnnnnnnnnnnnnnnnnnnnnnnnnnnnnnnnnnnnnnnnnnnnnnnnnnnnnnnnnnnnnnnnnnnnnnnnnnnnnnnnnnnnnnnnnnnnnnnnnnnnnnnnnnnnnnnnnnnnnnnnnnnnnnnnnnnnnnnnnnnnnnnnnnnnnnnnnnnnnnnnnnnnnnnnnnnnnnnnnnnnnnnnnnnnnnnnnnnnnnnnnnnnnnnnnnnnnnnnnnnnnnnnnnnnnnnnnnnnnnnnnnnnnnnnnnnnnnnnnnnnnnnnnnnnnnnnnnnnnnnnnnnnnnnnnnnnnnnnnnnnnnnnnnnnnnnnnnnnnnnnnnnnnnnnnnnnnnnnnnnnnnnnnnnnnnnnnnnnnnnnnnnnnnnnnnnnnnnnnnnnnnnnnnnnnnnnnnnnnnnnnnnnnnnnnnnnnnnnnnnnnnnnnnnnnnnnnnnnnnnnnnnnnnnnnnnnnnnnnnnnnnnnnnnnnnnnnnnnnnnnnnnnnnnnnnnnnnnnnnnnnnnnnnnnnnnnnnnnnnnnnnnnnnnnnnnnnnnnnnnnnnnnnnnnnnnnnnnnnnnnnnnnnnnnnnnnnnnnnnnnnnnnnnnnnnnnnnnnnnnnnnnnnnnnnnnnnnnnnnnnnnnnnnnnnnnnnnnnnnnnnnnnnnnnnnnnnnnnnnnnnnnnnnnnnnnnnnnnnnnnnnnnnnnnnnnnnnnnnnnnnnnnnnnnnnnnnnnnnnnnnnnnnnnnnnnnnnnnnnnnnnnnnnnnnnnnnnnnnnnnnnnnnnnnnnnnnnnnnnnnnnnnnnnnnnnnnnnnnnnnnnnnnnnnnnnnnnnnnnnnnnnnnnnnnnnnnnnnnnnnnnnnnnnnnnnnnnnnnnnnnnnnnnnnnnnnnnnnnnnnnnnnnnnnnnnnnnnnnnnnnnnnnnnnnnnnnnnnnnnnnnnnnnnnnnnnnnnnnnnnnnnnnnnnnnnnnnnnnnnnnnnnnnnnnnnnnnnnnnnnnnnnnnnnnnnnnnnnnnnnnnnnnnnnnnnnnnnnnnnnnnnnnnnnnnnnnnnnnnnnnnnnnnnnnnnnnnnnnnnnnnnnnnnnnnnnnnnnnnnnnnnnnnnnnnnnnnnnnnnnnnnnnnnnnnnnnnnnnnnnnnnnnnnnnnnnnnnnnnnnnnnnnnnnnnnnnnnnnnnnnnnnnnnnnnnnnnnnnnnnnnnnnnnnnnnnnnnnnnnnnnnnnnnnnnnnnnnnnnnnnnnnnnnnnnnnnnnnnnnnnnnnnnnnnnnnnnnnnnnnnnnnnnnnnnnnnnnnnnnnnnnnnnnnnnnnnnnnnnnnnnnnnnnnnnnnnnnnnnnnnnnnnnnnnnnnnnnnnnnnnnnnnnnnnnnnnnnnnnnnnnnnnnnnnnnnnnnnnnnnnnnnnnnnnnnnnnnnnnnnnnnnnnnnnnnnnnnnnnnnnnnnnnnnnnnnnnnnnnnnnnnnnnnnnnnnnnnnnnnnnnnnnnnnnnnnnnnnnnnnnnnnnnnnnnnnnnnnnnnnnnnnnnnnnnnnnnnnnnnnnnnnnnnnnnnnnnnnnnnnnnnnnnnnnnnnnnnnnnnnnnnnnnnnnnnnnnnnnnnnnnnnnnnnnnnnnnnnnnnnnnnnnnnnnnnnnnnnnnnnnnnnnnnnnnnnnnnnnnnnnnnnnnnnnnnnnnnnnnnnnnnnnnnnnnnnnnnnnnnnnnnnnnnnnnnnnnnnnnnnnnnnnnnnnnnnnnnnnnnnnnnnnnnnnnnnnnnnnnnnnnnnnnnnnnnnnnnnnnnnnnnnnnnnnnnnnnnnnnnnnnnnnnnnnnnnnnnnnnnnnnnnnnnnnnnnnnnnnnnnnnnnnnnnnnnnnnnnnnnnnnnnnnnnnnnnnnnnnnnnnnnnnnnnnnnnnnnnnnnnnnnnnnnnnnnnnnnnnnnnnnnnnnnnnnnnnnnnnnnnnnnnnnnnnnnnnnnnnnnnnnnnnnnnnnnnnnnnnnnnnnnnnnnnnnnnnnnnnnnnnnnnnnnnnnnnnnnnnnnnnnnnnnnnnnnnnnnnnnnnnnnnnnnnnnnnnnnnnnnnnnnnnnnnnnnnnnnnnnnnnnnnnnnnnnnnnnnnnnnnnnnnnnnnnnnnnnnnnnnnnnnnnnnnnnnnnnnnnnnnnnnnnnnnnnnnnnnnnnnnnnnnnnnnnnnnnnnnnnnnnnnnnnnnnnnnnnnnnnnnnnnnnnnnnnnnnnnnnnnnnnnnnnnnnnnnnnnnnnnnnnnnnnnnnnnnnnnnnnnnnnnnnnnnnnnnnnnnnnnnnnnnnnnnnnnnnnnnnnnnnnnnnnnnnnnnnnnnnnnnnnnnnnnnnnnnnnnnnnnnnnnnnnnnnnnnnnnnnnnnnnnnnnnnnnnnnnnnnnnnnnnnnnnnnnnnnnnnnnnnnnnnnnnnnnnnnnnnnnnnnnnnnnnnnnnnnnnnnnnnnnnnnnnnnnnnnnnnnnnnnnnnnnnnnnnnnnnnnnnnnnnnnnnnnnnnnnnnnnnnnnnnnnnnnnnnnnnnnnnnnnnnnnnnnnnnnnnnnnnnnnnnnnnnnnnnnnnnnnnnnnnnnnnnnnnnnnnnnnnnnnnnnnnnnnnnnnnnnnnnnnnnnnnnnnnnnnnnnnnnnnnnnnnnnnnnnnnnnnnnnnnnnnnnnnnnnnnnnnnnnnnnnnnnnnnnnnnnnnnnnnnnnnnnnnnnnnnnnnnnnnnnnnnnnnnnnnnnnnnnnnnnnnnnnnnnnnnnnnnnnnnnnnnnnnnnnnnnnnnnnnnnnnnnnnnnnnnnnnnnnnnnnnnnnnnnnnnnnnnnnnnnnnnnnnnnnnnnnnnnnnnnnnnnnnnnnnnnnnnnnnnnnnnnnnnnnnnnnnnnnnnnnnnnnnnnnnnnnnnnnnnnnnnnnnnnnnnnnnnnnnnnnnnnnnnnnnnnnnnnnnnnnnnnnnnnnnnnnnnnnnnnnnnnnnnnnnnnnnnnnnnnnnnnnnnnnnnnnnnnnnnnnnnnnnnnnnnnnnnnnnnnnnnnnnnnnnnnnnnnnnnnnnnnnnnnnnnnnnnnnnnnnnnnnnnnnnnnnnnnnnnnnnnnnnnnnnnnnnnnnnnnnnnnnnnnnnnnnnnnnnnnnnnnnnnnnnnnnnnnnnnnnnnnnnnnnnnnnnnnnnnnnnnnnnnnnnnnnnnnnnnnnnnnnnnnnnnnnnnnnnnnnnnnnnnnnnnnnnnnnnnnnnnnnnnnnnnnnnnnnnnnnnnnnnnnnnnnnnnnnnnnnnnnnnnnnnnnnnnnnnnnnnnnnnnnnnnnnnnnnnnnnnnnnnnnnnnnnnnnnnnnnnnnnnnnnnnnnnnnnnnnnnnnnnnnnnnnnnnnnnnnnnnnnnnnnnnnnnnnnnnnnnnnnnnnnnnnnnnnnnnnnnnnnnnnnnnnnnnnnnnnnnnnnnnnnnnnnnnnnnnnnnnnnnnnnnnnnnnnnnnnnnnnnnnnnnnnnnnnnnnnnnnnnnnnnnnnnnnnnnnnnnnnnnnnnnnnnnnnnnnnnnnnnnnnnnnnnnnnnnnnnnnnnnnnnnnnnnnnnnnnnnnnnnnnnnnnnnnnnnnnnnnnnnnnnnnnnnnnnnnnnnnnnnnnnnnnnnnnnnnnnnnnnnnnnnnnnnnnnnnnnnnnnnnnnnnnnnnnnnnnnnnnnnnnnnnnnnnnnnnnnnnnnnnnnnnnnnnnnnnnnnnnnnnnnnnnnnnnnnnnnnnnnnnnnnnnnnnnnnnnnnnnnnnnnnnnnnnnnnnnnnnnnnnnnnnnnnnnnnnnnnnnnnnnnnnnnnnnnnnnnnnnnnnnnnnnnnnnnnnnnnnnnnnnnnnnnnnnnnnnnnnnnnnnnnnnnnnnnnnnnnnnnnnnnnnnnnnnnnnnnnnnnnnnnnnnnnnnnnnnnnnnnnnnnnnnnnnnnnnnnnnnnnnnnnnnnnnnnnnnnnnnnnnnnnnnnnnnnnnnnnnnnnnnnnnnnnnnnnnnnnnnnnnnnnnnnnnnnnnnnnnnnnnnnnnnnnnnnnnnnnnnnnnnnnnnnnnnnnnnnnnnnnnnnnnnnnnnnnnnnnnnnnnnnnnnnnnnnnnnnnnnnnnnnnnnnnnnnnnnnnnnnnnnnnnnnnnnnnnnnnnnnnnnnnnnnnnnnnnnnnnnnnnnnnnnnnnnnnnnnnnnnnnnnnnnnnnnnnnnnnnnnnnnnnnnnnnnnnnnnnnnnnnnnnnnnnnnnnnnnnnnnnnnnnnnnnnnnnnnnnnnnnnnnnnnnnnnnnnnnnnnnnnnnnnnnnnnnnnnnnnnnnnnnnnnnnnnnnnnnnnnnnnnnnnnnnnnnnnnnnnnnnnnnnnnnnnnnnnnnnnnnnnnnnnnnnnnnnnnnnnnnnnnnnnnnnnnnnnnnnnnnnnnnnnnnnnnnnnnnnnnnnnnnnnnnnnnnnnnnnnnnnnnnnnnnnnnnnnnnnnnnnnnnnnnnnnnnnnnnnnnnnnnnnnnnnnnnnnnnnnnnnnnnnnnnnnnnnnnnnnnnnnnnnnnnnnnnnnnnnnnnnnnnnnnnnnnnnnnnnnnnnnnnnnnnnnnnnnnnnnnnnnnnnnnnnnnnnnnnnnnnnnnnnnnnnnnnnnnnnnnnnnnnnnnnnnnnnnnnnnnnnnnnnnnnnnnnnnnnnnnnnnnnnnnnnnnnnnnnnnnnnnnnnnnnnnnnnnnnnnnnnnnnnnnnnnnnnnnnnnnnnnnnnnnnnnnnnnnnnnnnnnnnnnnnnnnnnnnnnnnnnnnnnnnnnnnnnnnnnnnnnnnnnnnnnnnnnnnnnnnnnnnnnnnnnnnnnnnnnnnnnnnnnnnnnnnnnnnnnnnnnnnnnnnnnnnnnnnnnnnnnnnnnnnnnnnnnnnnnnnnnnnnnnnnnnnnnnnnnnnnnnnnnnnnnnnnnnnnnnnnnnnnnnnnnnnnnnnnnnnnnnnnnnnnnnnnnnnnnnnnnnnnnnnnnnnnnnnnnnnnnnnnnnnnnnnnnnnnnnnnnnnnnnnnnnnnnnnnnnnnnnnnnnnnnnnnnnnnnnnnnnnnnnnnnnnnnnnnnnnnnnnnnnnnnnnnnnnnnnnnnnnnnnnnnnnnnnnnnnnnnnnnnnnnnnnnnnnnnnnnnnnnnnnnnnnnnnnnnnnnnnnnnnnnnnnnnnnnnnnnnnnnnnnnnnnnnnnnnnnnnnnnnnnnnnnnnnnnnnnnnnnnnnnnnnnnnnnnnnnnnnnnnnnnnnnnnnnnnnnnnnnnnnnnnnnnnnnnnnnnnnnnnnnnnnnnnnnnnnnnnnnnnnnnnnnnnnnnnnnnnnnnnnnnnnnnnnnnnnnnnnnnnnnnnnnnnnnnnnnnnnnnnnnnnnnnnnnnnnnnnnnnnnnnnnnnnnnnnnnnnnnnnnnnnnnnnnnnnnnnnnnnnnnnnnnnnnnnnnnnnnnnnnnnnnnnnnnnnnnnnnnnnnnnnnnnnnnnnnnnnnnnnnnnnnnnnnnnnnnnnnnnnnnnnnnnnnnnnnnnnnnnnnnnnnnnnnnnnnnnnnnnnnnnnnnnnnnnnnnnnnnnnnnnnnnnnnnnnnnnnnnnnnnnnnnnnnnnnnnnnnnnnnnnnnnnnnnnnnnnnnnnnnnnnnnnnnnnnnnnnnnnnnnnnnnnnnnnnnnnnnnnnnnnnnnnnnnnnnnnnnnnnnnnnnnnnnnnnnnnnnnnnnnnnnnnnnnnnnnnnnnnnnnnnnnnnnnnnnnnnnnnnnnnnnnnnnnnnnnnnnnnnnnnnnnnnnnnnnnnnnnnnnnnnnnnnnnnnnnnnnnnnnnnnnnnnnnnnnnnnnnnnnnnnnnnnnnnnnnnnnnnnnnnnnnnnnnnnnnnnnnnnnnnnnnnnnnnnnnnnnnnnnnnnnnnnnnnnnnnnnnnnnnnnnnnnnnnnnnnnnnnnnnnnnnnnnnnnnnnnnnnnnnnnnnnnnnnnnnnnnnnnnnnnnnnnnnnnnnnnnnnnnnnnnnnnnnnnnnnnnnnnnnnnnnnnnnnnnnnnnnnnnnnnnnnnnnnnnnnnnnnnnnnnnnnnnnnnnnnnnnnnnnnnnnnnnnnnnnnnnnnnnnnnnnnnnnnnnnnnnnnnnnnnnnnnnnnnnnnnnnnnnnnnnnnnnnnnnnnnnnnnnnnnnnnnnnnnnnnnnnnnnnnnnnnnnnnnnnnnnnnnnnnnnnnnnnnnnnnnnnnnnnnnnnnnnnnnnnnnnnnnnnnnnnnnnnnnnnnnnnnnnnnnnnnnnnnnnnnnnnnnnnnnnnnnnnnnnnnnnnnnnnnnnnnnnnnnnnnnnnnnnnnnnnnnnnnnnnnnnnnnnnnnnnnnnnnnnnnnnnnnnnnnnnnnnnnnnnnnnnnnnnnnnnnnnnnnnnnnnnnnnnnnnnnnnnnnnnnnnnnnnnnnnnnnnnnnnnnnnnnnnnnnnnnnnnnnnnnnnnnnnnnnnnnnnnnnnnnnnnnnnnnnnnnnnnnnnnnnnnnnnnnnnnnnnnnnnnnnnnnnnnnnnnnnnnnnnnnnnnnnnnnnnnnnnnnnnnnnnnnnnnnnnnnnnnnnnnnnnnnnnnnnnnnnnnnnnnnnnnnnnnnnnnnnnnnnnnnnnnnnnnnnnnnnnnnnnnnnnnnnnnnnnnnnnnnnnnnnnnnnnnnnnnnnnnnnnnnnnnnnnnnnnnnnnnnnnnnnnnnnnnnnnnnnnnnnnnnnnnnnnnnnnnnnnnnnnnnnnnnnnnnnnnnnnnnnnnnnnnnnnnnnnnnnnnnnnnnnnnnnnnnnnnnnnnnnnnnnnnnnnnnnnnnnnnnnnnnnnnnnnnnnnnnnnnnnnnnnnnnnnnnnnnnnnnnnnnnnnnnnnnnnnnnnnnnnnnnnnnnnnnnnnnnnnnnnnnnnnnnnnnnnnnnnnnnnnnnnnnnnnnnnnnnnnnnnnnnnnnnnnnnnnnnnnnnnnnnnnnnnnnnnnnnnnnnnnnnnnnnnnnnnnnnnnnnnnnnnnnnnnnnnnnnnnnnnnnnnnnnnnnnnnnnnnnnnnnnnnnnnnnnnnnnnnnnnnnnnnnnnnnnnnnnnnnnnnnnnnnnnnnnnnnnnnnnnnnnnnnnnnnnnnnnnnnnnnnnnnnnnnnnnnnnnnnnnnnnnnnnnnnnnnnnnnnnnnnnnnnnnnnnnnnnnnnnnnnnnnnnnnnnnnnnnnnnnnnnnnnnnnnnnnnnnnnnnnnnnnnnnnnnnnnnnnnnnnnnnnnnnnnnnnnnnnnnnnnnnnnnnnnnnnnnnnnnnnnnnnnnnnnnnnnnnnnnnnnnnnnnnnnnnnnnnnnnnnnnnnnnnnnnnnnnnnnnnnnnnnnnnnnnnnnnnnnnnnnnnnnnnnnnnnnnnnnnnnnnnnnnnnnnnnnnnnnnnnnnnnnnnnnnnnnnnnnnnnnnnnnnnnnnnnnnnnnnnnnnnnnnnnnnnnnnnnnnnnnnnnnnnnnnnnnnnnnnnnnnnnnnnnnnnnnnnnnnnnnnnnnnnnnnnnnnnnnnnnnnnnnnnnnnnnnnnnnnnnnnnnnnnnnnnnnnnnnnnnnnnnnnnnnnnnnnnnnnnnnnnnnnnnnnnnnnnnnnnnnnnnnnnnnnnnnnnnnnnnnnnnnnnnnnnnnnnnnnnnnnnnnnnnnnnnnnnnnnnnnnnnnnnnnnnnnnnnnnnnnnnnnnnnnnnnnnnnnnnnnnnnnnnnnnnnnnnnnnnnnnnnnnnnnnnnnnnnnnnnnnnnnnnnnnnnnnnnnnnnnnnnnnnnnnnnnnnnnnnnnnnnnnnnnnnnnnnnnnnnnnnnnnnnnnnnnnnnnnnnnnnnnnnnnnnnnnnnnnnnnnnnnnnnnnnnnnnnnnnnnnnnnnnnnnnnnnnnnnnnnnnnnnnnnnnnnnnnnnnnnnnnnnnnnnnnnnnnnnnnnnnnnnnnnnnnnnnnnnnnnnnnnnnnnnnnnnnnnnnnnnnnnnnnnnnnnnnnnnnnnnnnnnnnnnnnnnnnnnnnnnnnnnnnnnnnnnnnnnnnnnnnnnnnnnnnnnnnnnnnnnnnnnnnnnnnnnnnnnnnnnnnnnnnnnnnnnnnnnnnnnnnnnnnnnnnnnnnnnnnnnnnnnnnnnnnnnnnnnnnnnnnnnnnnnnnnnnnnnnnnnnnnnnnnnnnnnnnnnnnnnnnnnnnnnnnnnnnnnnnnnnnnnnnnnnnnnnnnnnnnnnnnnnnnnnnnnnnnnnnnnnnnnnnnnnnnnnnnnnnnnnnnnnnnnnnnnnnnnnnnnnnnnnnnnnnnnnnnnnnnnnnnnnnnnnnnnnnnnnnnnnnnnnnnnnnnnnnnnnnnnnnnnnnnnnnnnnnnnnnnnnnnnnnnnnnnnnnnnnnnnnnnnnnnnnnnnnnnnnnnnnnnnnnnnnnnnnnnnnnnnnnnnnnnnnnnnnnnnnnnnnnnnnnnnnnnnnnnnnnnnnnnnnnnnnnnnnnnnnnnnnnnnnnnnnnnnnnnnnnnnnnnnnnnnnnnnnnnnnnnnnnnnnnnnnnnnnnnnnnnnnnnnnnnnnnnnnnnnnnnnnnnnnnnnnnnnnnnnnnnnnnnnnnnnnnnnnnnnnnnnnnnnnnnnnnnnnnnnnnnnnnnnnnnnnnnnnnnnnnnnnnnnnnnnnnnnnnnnnnnnnnnnnnnnnnnnnnnnnnnnnnnnnnnnnnnnnnnnnnnnnnnnnnnnnnnnnnnnnnnnnnnnnnnnnnnnnnnnnnnnnnnnnnnnnnnnnnnnnnnnnnnnnnnnnnnnnnnnnnnnnnnnnnnnnnnnnnnnnnnnnnnnnnnnnnnnnnnnnnnnnnnnnnnnnnnnnnnnnnnnnnnnnnnnnnnnnnnnnnnnnnnnnnnnnnnnnnnnnnnnnnnnnnnnnnnnnnnnnnnnnnnnnnnnnnnnnnnnnnnnnnnnnnnnnnnnnnnnnnnnnnnnnnnnnnnnnnnnnnnnnnnnnnnnnnnnnnnnnnnnnnnnnnnnnnnnnnnnnnnnnnnnnnnnnnnnnnnnnnnnnnnnnnnnnnnnnnnnnnnnnnnnnnnnnnnnnnnnnnnnnnnnnnnnnnnnnnnnnnnnnnnnnnnnnnnnnnnnnnnnnnnnnnnnnnnnnnnnnnnnnnnnnnnnnnnnnnnnnnnnnnnnnnnnnnnnnnnnnnnnnnnnnnnnnnnnnnnnnnnnnnnnnnnnnnnnnnnnnnnnnnnnnnnnnnnnnnnnnnnnnnnnnnnnnnnnnnnnnnnnnnnnnnnnnnnnnnnnnnnnnnnnnnnnnnnnnnnnnnnnnnnnnnnnnnnnnnnnnnnnnnnnnnnnnnnnnnnnnnnnnnnnnnnnnnnnnnnnnnnnnnnnnnnnnnnnnnnnnnnnnnnnnnnnnnnnnnnnnnnnnnnnnnnnnnnnnnnnnnnnnnnnnnnnnnnnnnnnnnnnnnnnnnnnnnnnnnnnnnnnnnnnnnnnnnnnnnnnnnnnnnnnnnnnnnnnnnnnnnnnnnnnnnnnnnnnnnnnnnnnnnnnnnnnnnnnnnnnnnnnnnnnnnnnnnnnnnnnnnnnnnnnnnnnnnnnnnnnnnnnnnnnnnnnnnnnnnnnnnnnnnnnnnnnnnnnnnnnnnnnnnnnnnnnnnnnnnnnnnnnnnnnnnnnnnnnnnnnnnnnnnnnnnnnnnnnnnnnnnnnnnnnnnnnnnnnnnnnnnnnnnnnnnnnnnnnnnnnnnnnnnnnnnnnnnnnnnnnnnnnnnnnnnnnnnnnnnnnnnnnnnnnnnnnnnnnnnnnnnnnnnnnnnnnnnnnnnnnnnnnnnnnnnnnnnnnnnnnnnnnnnnnnnnnnnnnnnnnnnnnnnnnnnnnnnnnnnnnnnnnnnnnnnnnnnnnnnnnnnnnnnnnnnnnnnnnnnnnnnnnnnnnnnnnnnnnnnnnnnnnnnnnnnnnnnnnnnnnnnnnnnnnnnnnnnnnnnnnnnnnnnnnnnnnnnnnnnnnnnnnnnnnnnnnnnnnnnnnnnnnnnnnnnnnnnnnnnnnnnnnnnnnnnnnnnnnnnnnnnnnnnnnnnnnnnnnnnnnnnnnnnnnnnnnnnnnnnnnnnnnnnnnnnnnnnnnnnnnnnnnnnnnnnnnnnnnnnnnnnnnnnnnnnnnnnnnnnnnnnnnnnnnnnnnnnnnnnnnnnnnnnnnnnnnnnnnnnnnnnnnnnnnnnnnnnnnnnnnnnnnnnnnnnnnnnnnnnnnnnnnnnnnnnnnnnnnnnnnnnnnnnnnnnnnnnnnnnnnnnnnnnnnnnnnnnnnnnnnnnnnnnnnnnnnnnnnnnnnnnnnnnnnnnnnnnnnnnnnnnnnnnnnnnnnnnnnnnnnnnnnnnnnnnnnnnnnnnnnnnnnnnnnnnnnnnnnnnnnnnnnnnnnnnnnnnnnnnnnnnnnnnnnnnnnnnnnnnnnnnnnnnnnnnnnnnnnnnnnnnnnnnnnnnnnnnnnnnnnnnnnnnnnnnnnnnnnnnnnnnnnnnnnnnnnnnnnnnnnnnnnnnnnnnnnnnnnnnnnnnnnnnnnnnnnnnnnnnnnnnnnnnnnnnnnnnnnnnnnnnnnnnnnnnnnnnnnnnnnnnnnnnnnnnnnnnnnnnnnnnnnnnnnnnnnnnnnnnnnnnnnnnnnnnnnnnnnnnnnnnnnnnnnnnnnnnnnnnnnnnnnnnnnnnnnnnnnnnnnnnnnnnnnnnnnnnnnnnnnnnnnnnnnnnnnnnnnnnnnnnnnnnnnnnnnnnnnnnnnnnnnnnnnnnnnnnnnnnnnnnnnnnnnnnnnnnnnnnnnnnnnnnnnnnnnnnnnnnnnnnnnnnnnnnnnnnnnnnnnnnnnnnnnnnnnnnnnnnnnnnnnnnnnnnnnnnnnnnnnnnnnnnnnnnnnnnnnnnnnnnnnnnnnnnnnnnnnnnnnnnnnnnnnnnnnnnnnnnnnnnnnnnnnnnnnnnnnnnnnnnnnnnnnnnnnnnnnnnnnnnnnnnnnnnnnnnnnnnnnnnnnnnnnnnnnnnnnnnnnnnnnnnnnnnnnnnnnnnnnnnnnnnnnnnnnnnnnnnnnnnnnnnnnnnnnnnnnnnnnnnnnnnnnnnnnnnnnnnnnnnnnnnnnnnnnnnnnnnnnnnnnnnnnnnnnnnnnnnnnnnnnnnnnnnnnnnnnnnnnnnnnnnnnnnnnnnnnnnnnnnnnnnnnnnnnnnnnnnnnnnnnnnnnnnnnnnnnnnnnnnnnnnnnnnnnnnnnnnnnnnnnnnnnnnnnnnnnnnnnnnnnnnnnnnnnnnnnnnnnnnnnnnnnnnnnnnnnnnnnnnnnnnnnnnnnnnnnnnnnnnnnnnnnnnnnnnnnnnnnnnnnnnnnnnnnnnnnnnnnnnnnnnnnnnnnnnnnnnnnnnnnnnnnnnnnnnnnnnnnnnnnnnnnnnnnnnnnnnnnnnnnnnnnnnnnnnnnnnnnnnnnnnnnnnnnnnnnnnnnnnnnnnnnnnnnnnnnnnnnnnnnnnnnnnnnnnnnnnnnnnnnnnnnnnnnnnnnnnnnnnnnnnnnnnnnnnnnnnnnnnnnnnnnnnnnnnnnnnnnnnnnnnnnnnnnnnnnnnnnnnnnnnnnnnnnnnnnnnnnnnnnnnnnnnnnnnnnnnnnnnnnnnnnnnnnnnnnnnnnnnnnnnnnnnnnnnnnnnnnnnnnnnnnnnnnnnnnnnnnnnnnnnnnnnnnnnnnnnnnnnnnnnnnnnnnnnnnnnnnnnnnnnnnnnnnnnnnnnnnnnnnnnnnnnnnnnnnnnnnnnnnnnnnnnnnnnnnnnnnnnnnnnnnnnnnnnnnnnnnnnnnnnnnnnnnnnnnnnnnnnnnnnnnnnnnnnnnnnnnnnnnnnnnnnnnnnnnnnnnnnnnnnnnnnnnnnnnnnnnnnnnnnnnnnnnnnnnnnnnnnnnnnnnnnnnnnnnnnnnnnnnnnnnnnnnnnnnnnnnnnnnnnnnnnnnnnnnnnnnnnnnnnnnnnnnnnnnnnnnnnnnnnnnnnnnnnnnnnnnnnnnnnnnnnnnnnnnnnnnnnnnnnnnnnnnnnnnnnnnnnnnnnnnnnnnnnnnnnnnnnnnnnnnnnnnnnnnnnnnnnnnnnnnnnnnnnnnnnnnnnnnnnnnnnnnnnnnnnnnnnnnnnnnnnnnnnnnnnnnnnnnnnnnnnnnnnnnnnnnnnnnnnnnnnnnnnnnnnnnnnnnnnnnnnnnnnnnnnnnnnnnnnnnnnnnnnnnnnnnnnnnnnnnnnnnnnnnnnnnnnnnnnnnnnnnnnnnnnnnnnnnnnnnnnnnnnnnnnnnnnnnnnnnnnnnnnnnnnnnnnnnnnnnnnnnnnnnnnnnnnnnnnnnnnnnnnnnnnnnnnnnnnnnnnnnnnnnnnnnnnnnnnnnnnnnnnnnnnnnnnnnnnnnnnnnnnnnnnnnnnnnnnnnnnnnnnnnnnnnnnnnnnnnnnnnnnnnnnnnnnnnnnnnnnnnnnnnnnnnnnnnnnnnnnnnnnnnnnnnnnnnnnnnnnnnnnnnnnnnnnnnnnnnnnnnnnnnnnnnnnnnnnnnnnnnnnnnnnnnnnnnnnnnnnnnnnnnnnnnnnnnnnnnnnnnnnnnnnnnnnnnnnnnnnnnnnnnnnnnnnnnnnnnnnnnnnnnnnnnnnnnnnnnnnnnnnnnnnnnnnnnnnnnnnnnnnnnnnnnnnnnnnnnnnnnnnnnnnnnnnnnnnnnnnnnnnnnnnnnnnnnnnnnnnnnnnnnnnnnnnnnnnnnnnnnnnnnnnnnnnnnnnnnnnnnnnnnnnnnnnnnnnnnnnnnnnnnnnnnnnnnnnnnnnnnnnnnnnnnnnnnnnnnnnnnnnnnnnnnnnnnnnnnnnnnnnnnnnnnnnnnnnnnnnnnnnnnnnnnnnnnnnnnnnnnnnnnnnnnnnnnnnnnnnnnnnnnnnnnnnnnnnnnnnnnnnnnnnnnnnnnnnnnnnnnnnnnnnnnnnnnnnnnnnnnnnnnnnnnnnnnnnnnnnnnnnnnnnnnnnnnnnnnnnnnnnnnnnnnnnnnnnnnnnnnnnnnnnnnnnnnnnnnnnnnnnnnnnnnnnnnnnnnnnnnnnnnnnnnnnnnnnnnnnnnnnnnnnnnnnnnnnnnnnnnnnnnnnnnnnnnnnnnnnnnnnnnnnnnnnnnnnnnnnnnnnnnnnnnnnnnnnnnnnnnnnnnnnnnnnnnnnnnnnnnnnnnnnnnnnnnnnnnnnnnnnnnnnnnnnnnnnnnnnnnnnnnnnnnnnnnnnnnnnnnnnnnnnnnnnnnnnnnnnnnnnnnnnnnnnnnnnnnnnnnnnnnnnnnnnnnnnnnnnnnnnnnnnnnnnnnnnnnnnnnnnnnnnnnnnnnnnnnnnnnnnnnnnnnnnnnnnnnnnnnnnnnnnnnnnnnnnnnnnnnnnnnnnnnnnnnnnnnnnnnnnnnnnnnnnnnnnnnnnnnnnnnnnnnnnnnnnnnnnnnnnnnnnnnnnnnnnnnnnnnnnnnnnnnnnnnnnnnnnnnnnnnnnnnnnnnnnnnnnnnnnnnnnnnnnnnnnnnnnnnnnnnnnnnnnnnnnnnnnnnnnnnnnnnnnnnnnnnnnnnnnnnnnnnnnnnnnnnnnnnnnnnnnnnnnnnnnnnnnnnnnnnnnnnnnnnnnnnnnnnnnnnnnnnnnnnnnnnnnnnnnnnnnnnnnnnnnnnnnnnnnnnnnnnnnnnnnnnnnnnnnnnnnnnnnnnnnnnnnnnnnnnnnnnnnnnnnnnnnnnnnnnnnnnnnnnnnnnnnnnnnnnnnnnnnnnnnnnnnnnnnnnnnnnnnnnnnnnnnnnnnnnnnnnnnnnnnnnnnnnnnnnnnnnnnnnnnnnnnnnnnnnnnnnnnnnnnnnnnnnnnnnnnnnnnnnnnnnnnnnnnnnnnnnnnnnnnnnnnnnnnnnnnnnnnnnnnnnnnnnnnnnnnnnnnnnnnnnnnnnnnnnnnnnnnnnnnnnnnnnnnnnnnnnnnnnnnnnnnnnnnnnnnnnnnnnnnnnnnnnnnnnnnnnnnnnnnnnnnnnnnnnnnnnnnnnnnnnnnnnnnnnnnnnnnnnnnnnnnnnnnnnnnnnnnnnnnnnnnnnnnnnnnnnnnnnnnnnnnnnnnnnnnnnnnnnnnnnnnnnnnnnnnnnnnnnnnnnnnnnnnnnnnnnnnnnnnnnnnnnnnnnnnnnnnnnnnnnnnnnnnnnnnnnnnnnnnnnnnnnnnnnnnnnnnnnnnnnnnnnnnnnnnnnnnnnnnnnnnnnnnnnnnnnnnnnnnnnnnnnnnnnnnnnnnnnnnnnnnnnnnnnnnnnnnnnnnnnnnnnnnnnnnnnnnnnnnnnnnnnnnnnnnnnnnnnnnnnnnnnnnnnnnnnnnnnnnnnnnnnnnnnnnnnnnnnnnnnnnnnnnnnnnnnnnnnnnnnnnnnnnnnnnnnnnnnnnnnnnnnnnnnnnnnnnnnnnnnnnnnnnnnnnnnnnnnnnnnnnnnnnnnnnnnnnnnnnnnnnnnnnnnnnnnnnnnnnnnnnnnnnnnnnnnnnnnnnnnnnnnnnnnnnnnnnnnnnnnnnnnnnnnnnnnnnnnnnnnnnnnnnnnnnnnnnnnnnnnnnnnnnnnnnnnnnnnnnnnnnnnnnnnnnnnnnnnnnnnnnnnnnnnnnnnnnnnnnnnnnnnnnnnnnnnnnnnnnnnnnnnnnnnnnnnnnnnnnnnnnnnnnnnnnnnnnnnnnnnnnnnnnnnnnnnnnnnnnnnnnnnnnnnnnnnnnnnnnnnnnnnnnnnnnnnnnnnnnnnnnnnnnnnnnnnnnnnnnnnnnnnnnnnnnnnnnnnnnnnnnnnnnnnnnnnnnnnnnnnnnnnnnnnnnnnnnnnnnnnnnnnnnnnnnnnnnnnnnnnnnnnnnnnnnnnnnnnnnnnnnnnnnnnnnnnnnnnnnnnnnnnnnnnnnnnnnnnnnnnnnnnnnnnnnnnnnnnnnnnnnnnnnnnnnnnnnnnnnnnnnnnnnnnnnnnnnnnnnnnnnnnnnnnnnnnnnnnnnnnnnnnnnnnnnnnnnnnnnnnnnnnnnnnnnnnnnnnnnnnnnnnnnnnnnnnnnnnnnnnnnnnnnnnnnnnnnnnnnnnnnnnnnnnnnnnnnnnnnnnnnnnnnnnnnnnnnnnnnnnnnnnnnnnnnnnnnnnnnnnnnnnnnnnnnnnnnnnnnnnnnnnnnnnnnnnnnnnnnnnnnnnnnnnnnnnnnnnnnnnnnnnnnnnnnnnnnnnnnnnnnnnnnnnnnnnnnnnnnnnnnnnnnnnnnnnnnnnnnnnnnnnnnnnnnnnnnnnnnnnnnnnnnnnnnnnnnnnnnnnnnnnnnnnnnnnnnnnnnnnnnnnnnnnnnnnnnnnnnnnnnnnnnnnnnnnnnnnnnnnnnnnnnnnnnnnnnnnnnnnnnnnnnnnnnnnnnnnnnnnnnnnnnnnnnnnnnnnnnnnnnnnnnnnnnnnnnnnnnnnnnnnnnnnnnnnnnnnnnnnnnnnnnnnnnnnnnnnnnnnnnnnnnnnnnnnnnnnnnnnnnnnnnnnnnnnnnnnnnnnnnnnnnnnnnnnnnnnnnnnnnnnnnnnnnnnnnnnnnnnnnnnnnnnnnnnnnnnnnnnnnnnnnnnnnnnnnnnnnnnnnnnnnnnnnnnnnnnnnnnnnnnnnnnnnnnnnnnnnnnnnnnnnnnnnnnnnnnnnnnnnnnnnnnnnnnnnnnnnnnnnnnnnnnnnnnnnnnnnnnnnnnnnnnnnnnnnnnnnnnnnnnnnnnnnnnnnnnnnnnnnnnnnnnnnnnnnnnnnnnnnnnnnnnnnnnnnnnnnnnnnnnnnnnnnnnnnnnnnnnnnnnnnnnnnnnnnnnnnnnnnnnnnnnnnnnnnnnnnnnnnnnnnnnnnnnnnnnnnnnnnnnnnnnnnnnnnnnnnnnnnnnnnnnnnnnnnnnnnnnnnnnnnnnnnnnnnnnnnnnnnnnnnnnnnnnnnnnnnnnnnnnnnnnnnnnnnnnnnnnnnnnnnnnnnnnnnnnnnnnnnnnnnnnnnnnnnnnnnnnnnnnnnnnnnnnnnnnnnnnnnnnnnnnnnnnnnnnnnnnnnnnnnnnnnnnnnnnnnnnnnnnnnnnnnnnnnnnnnnnnnnnnnnnnnnnnnnnnnnnnnnnnnnnnnnnnnnnnnnnnnnnnnnnnnnnnnnnnnnnnnnnnnnnnnnnnnnnnnnnnnnnnnnnnnnnnnnnnnnnnnnnnnnnnnnnnnnnnnnnnnnnnnnnnnnnnnnnnnnnnnnnnnnnnnnnnnnnnnnnnnnnnnnnnnnnnnnnnnnnnnnnnnnnnnnnnnnnnnnnnnnnnnnnnnnnnnnnnnnnnnnnnnnnnnnnnnnnnnnnnnnnnnnnnnnnnnnnnnnnnnnnnnnnnnnnnnnnnnnnnnnnnnnnnnnnnnnnnnnnnnnnnnnnnnnnnnnnnnnnnnnnnnnnnnnnnnnnnnnnnnnnnnnnnnnnnnnnnnnnnnnnnnnnnnnnnnnnnnnnnnnnnnnnnnnnnnnnnnnnnnnnnnnnnnnnnnnnnnnnnnnnnnnnnnnnnnnnnnnnnnnnnnnnnnnnnnnnnnnnnnnnnnnnnnnnnnnnnnnnnnnnnnnnnnnnnnnnnnnnnnnnnnnnnnnnnnnnnnnnnnnnnnnnnnnnnnnnnnnnnnnnnnnnnnnnnnnnnnnnnnnnnnnnnnnnnnnnnnnnnnnnnnnnnnnnnnnnnnnnnnnnnnnnnnnnnnnnnnnnnnnnnnnnnnnnnnnnnnnnnnnnnnnnnnnnnnnnnnnnnnnnnnnnnnnnnnnnnnnnnnnnnnnnnnnnnnnnnnnnnnnnnnnnnnnnnnnnnnnnnnnnnnnnnnnnnnnnnnnnnnnnnnnnnnnnnnnnnnnnnnnnnnnnnnnnnnnnnnnnnnnnnnnnnnnnnnnnnnnnnnnnnnnnnnnnnnnnnnnnnnnnnnnnnnnnnnnnnnnnnnnnnnnnnnnnnnnnnnnnnnnnnnnnnnnnnnnnnnnnnnnnnnnnnnnnnnnnnnnnnnnnnnnnnnnnnnnnnnnnnnnnnnnnnnnnnnnnnnnnnnnnnnnnnnnnnnnnnnnnnnnnnnnnnnnnnnnnnnnnnnnnnnnnnnnnnnnnnnnnnnnnnnnnnnnnnnnnnnnnnnnnnnnnnnnnnnnnnnnnnnnnnnnnnnnnnnnnnnnnnnnnnnnnnnnnnnnnnnnnnnnnnnnnnnnnnnnnnnnnnnnnnnnnnnnnnnnnnnnnnnnnnnnnnnnnnnnnnnnnnnnnnnnnnnnnnnnnnnnnnnnnnnnnnnnnnnnnnnnnnnnnnnnnnnnnnnnnnnnnnnnnnnnnnnnnnnnnnnnnnnnnnnnnnnnnnnnnnnnnnnnnnnnnnnnnnnnnnnnnnnnnnnnnnnnnnnnnnnnnnnnnnnnnnnnnnnnnnnnnnnnnnnnnnnnnnnnnnnnnnnnnnnnnnnnnnnnnnnnnnnnnnnnnnnnnnnnnnnnnnnnnnnnnnnnnnnnnnnnnnnnnnnnnnnnnnnnnnnnnnnnnnnnnnnnnnnnnnnnnnnnnnnnnnnnnnnnnnnnnnnnnnnnnnnnnnnnnnnnnnnnnnnnnnnnnnnnnnnnnnnnnnnnnnnnnnnnnnnnnnnnnnnnnnnnnnnnnnnnnnnnnnnnnnnnnnnnnnnnnnnnnnnnnnnnnnnnnnnnnnnnnnnnnnnnnnnnnnnnnnnnnnnnnnnnnnnnnnnnnnnnnnnnnnnnnnnnnnnnnnnnnnnnnnnnnnnnnnnnnnnnnnnnnnnnnnnnnnnnnnnnnnnnnnnnnnnnnnnnnnnnnnnnnnnnnnnnnnnnnnnnnnnnnnnnnnnnnnnnnnnnnnnnnnnnnnnnnnnnnnnnnnnnnnnnnnnnnnnnnnnnnnnnnnnnnnnnnnnnnnnnnnnnnnnnnnnnnnnnnnnnnnnnnnnnnnnnnnnnnnnnnnnnnnnnnnnnnnnnnnnnnnnnnnnnnnnnnnnnnnnnnnnnnnnnnnnnnnnnnnnnnnnnnnnnnnnnnnnnnnnnnnnnnnnnnnnnnnnnnnnnnnnnnnnnnnnnnnnnnnnnnnnnnnnnnnnnnnnnnnnnnnnnnnnnnnnnnnnnnnnnnnnnnnnnnnnnnnnnnnnnnnnnnnnnnnnnnnnnnnnnnnnnnnnnnnnnnnaaagaggaagcctatgcctacggggccaaggaggcgcccgttgtctgaccggcaggccagcgcactcgcgcaccatttcgaggacctggaacagcagcacgaggcctccagcctcggcatgtggctgtttctggccacggagatcatgttctttggcggggtgtttgccgcctataccgtgtatcgcggcatgtatcttccgggcttcgaggtaggcagccacctgctgagcgtgaagctgggtgctttcaatacggcgctcttgcttggcagcagcctcacgatggctctcgccgtccgcgcggctatgctcgggaaacgccgggacctcgtcacctttctagttttgacaatgctgatgggccttacgttcatcggcgtcaaattgtccctcgagtggtaccacgaatatgagcaacgcctgatcccgggcctgcactgggaattggacagcccccattccaggggcgcagagctcttttttgtcttctatttcacgctgaccggcattcatgctctgcacatggtggtgggcgtgggagttcttgccgtgctgatcgggatggcggcgaagggacggttcacgccggagcgctgcaatgccgtcgagatggccggcctctactggcacttcgtggacatcgtctggattttcctgtttccgctactctacctgatcggggcacactattgatgtcgcaacacgttatccccaagaagatctactttgttgttttcgccgcattaatcgtcctgacgggcgttaccgccaccgtggccacgatcgatctgggtccgctcaacattgtggtcgccctgctcatcgccatgggcaaggccagtctcgtcatgctgttcttcatgcacttgcgctggagcacgcgcctcatgcacatcgtcgctgtggcctcgatcttctggctggggatcctgatcgctctgacgctgagcgattaccggacgcgtcactggacaccctcgcccgagccctgggagatttcccgcgcgccgtgaggaccggcccgcgggtgcgcggtcggtttaatccgcctttaccggatcgggaggagcagtcaagcgccgcgtggcccgccgttgtctctcgagttcggcggtctgcctttcgatgcgccgaaatacttccagggcggcctggctctctttaagtttcccgagtttgcggtacgcggaactcagcacgtagtggtactgcgccgaagtgggtttgatggcgatggctttctccagcgcttccgcggcctgggcccaatctccctgggtccggtaggtcttggccatctgatagtaggcaaggtcggagcggggattgagctccagggctttccgcgcgtagtacagcgaggtttgaaactccccccgccgtccgtaatagccgctcaagttcacgaaaggcgcatcgaacttggcgccctgctgttcggtgagctggatagccttctggtagctcgccagggccgccgcgtcatcgccaagcgcctcgagggcgaaccccagagcgttgtgggcttccgtgtaattgggactgaggcgtagggccgcctcgaactccgcccgggcgcgatggaagtcgtcctggatggaatagacgcgcccgcgattgtagtggacctcggcggaatggggcatcaagcgccccgcctcgtcgaactcgcgcagcgccaggtcgtaccggcccagaatcgagagcgcgcgaccgagcatcttatgggcttcgccgttttcaccgttgagctcgagggatttggccagcgcccggatggcatctcccaggcgatgctggcgaaagagcacaaagccgtgcagatagtggaccagggatgagccgggttgagtctccaggtatttcgccaggcgcggctcaacttcctggaatttcccttcctctatcaagccgacaaattcgcggatgacggcggggtcttcccctcccagcggggaggccgggaccggcggcggaccgtccagtaagacaggggtacgcggtgcctcaggaatggcgtggccggcggggacttgaagttggggttctttttgccaatcttgtgccgccggaggtgcggtcttctctaccgcgccggcggcggtggaagggcgagactgcgcaggcgcagacgcacctccctgaaccgccgcaccgccaaacgccagcgggtaacagacggccagggcaaacagagagcccaaccaggccggccggcgagtgggggaggagccatgggttggccattcgaccgcctgcttcgcgcgtctgacgtccatctcttctccgtggaagaatcatatgccgccctcccccaccgttcaagtgtaggccgccgcgccctggggcacggggatcggccaagttgctcccgcgtcgggcggagcatgaaacggttgtgtcggggcaccaaggcgcttgtccgtggacgggatgtatgtatgctatgagcttccaaccagcgcacgagggagattgcaatgaaaaggaacttcatcgcggcttgcttgctggtcgggaccatccctccccccactctgctcggcgagacggtctcgcaatacgtgaaatcgtccagcgcggaggcgcgcatcgaggtgctggcaaatcagcgcgcatcgttcaggattccgcgcacggtgtacggaacgtttctcgagaacatcgggttctcgatgtacggcggcctctccgcgcagctcctcgacaatcctagcctcgaaacctactatgcgagcctggaattcctcgagcagcgattcctcacgccgccgttccgccgctccacccacatgggattgcctctcccctggctgcctttgcgcgaggcggatggctggcggtatgagccgcgctggggcggcgccccgaattcctatgcttacctctacttgatgggattggacggccgcgaggtgggcattcgccagaacatctatctgcccgtccatcgcgagcgcacctacgacggatcgctttttgcctcctccgagaaaggagccgtgccgctcgatatcagcatccgccagcaggactcgccggatgcggcgctggccgccacgcgcctcctcgtgcccgccggcggacgctgggcgaagctcccctttcgcctgacgcttccggaaggcgccctcgccccgctcgcttcggcggattttgttgtctccgtgcggggcgagcatcgcgtctcgctcgatttcatccggctcttccctgccgacgctgtgcgcgggatggacccggacgtcatccgcgcgtcgaaaaacctacacactcccctcctccgctatggcggaaactttacgagcggctaccactggcgggacggggtcggcccgctcgaccagcgacccacgaaactgaaccaggcgtggggctatcccgaatacaacgacatcggcacggacgagatcatggcctattgtgagttgatcggtgctcaggcgcagatctgcctcaatctcggcagcggaactccggaggaagcgcgtgcctggatcgagtactgccagggcgccaccacgacggccgaaggcaagcgtcgcgccgcgaacggacatccccaaccgttccccgtcgctgcctgggaatttggcaacgaactttgggggcattttcaaatcggctggcaaacgccggagggcaacctccgccgctatcgcgagtattaccgcgcgacgcgcagcacgattccgaaagacacgctcgtgatcgctacgggcgccgatccggatgctttcgagaaatggaacgcggcgcttctcagcgccgaccccgaggccctacattacatttccacgcatttcgttgtgaacatgggcgagatggttagagacggcgccgcccgggacttcacctggaccgccggactggcccttcccgtcgccgtgggacgcgcgctcgaatccatgcgcgcccagattgactcgcacgcggcgacgcgcggccgcgtgaagatcgcattcaccgagtatctcttctgggcgcgggaaggctcggaaaacatccggttcgacaacctgggcggcgccatcaacggcgcggcctggatgaacatgctgctcgcccgcgccgactccgttcggctggccaacatgaccggaattatcgacttcgccggtatccagaagaaacgcagcagggtctttctcacgccgcaggcctgggcgttttcgctctattcgaatcacgccggagacactcccctggtcacccgcaccagcgtcaggcactacgacgtgcacgaagggcaacggcgttttcctgaaatccccgatgtcccctatctcgacgtgttggccacgcgtgatagcaagaaaggcgatctcgtcgtcttcgtcgtgaaccgcgactggaaaaacgcgatggcggctacggttgagatcagagacttcgcgccggcgggcgaggcgatggtccacacactgaccggcgactccctcctcgtcaggaacgacgaagaaaatcccgaaaggatccggccggtggcttcgcaggagaatgtaggcagcggcagtttgcggcacacattcccgcccgcctcggtcaccgtgctgatcttcaagccgcggcaaggctgacggggccaaatagttaagaatagggccaaggaatcgagccgcacggtctttctgcggccgctaccgcggcgagacgagggccttcctcgccttgatctcttccactttctagtccgcgtaatccttgagcaccgtgccctggccgaggttcgaagcattctcgaaagcgtcaatggcttggtccagcttccccaagttctcgtatgcttcacccagccggtaataattcatgggattggcgccggtcgccgtggaaatggccgccttgaattcctctacggcctttggagagtcgtcccgatgcagggcgaccatgcccaacgccgcatgggcatccgaggcgagtgccgccttctgcttttggagctgctcatcgttttcgagtgacgcggcggggatctggtccaggagctgcaaagcacgcgtggcataggattccgccgtcgccagattcctatcattctcggccggtgtgccctgcagcatccgcggctgagggagaaccaatgccacaagcacgaggctgaagacattattggcgtcgagtttgaggcttcgctcgccatgctcgacggtcttcgcgtaatcccccttctgctgatagacgcgtgcggtctggctccacacgtaggtcatgagcgggctagtgggatgcttctgctcaaaatccgcggcaagcgtgcgctgcctgtcggggtccatttcgttctgcacctgaaggaaggcggctttctccaccggtgaaacctccagcttatcgccgagaggcgtcttgaacgtgcgccctgaagggctggcgcccaccaccgcctggaaaaactccagctcggcaccggtctcttcgagcttccgctgaaattccggcgtcacgtcaaaggtgacgccgcgctcgcccacgatggccacggctttcatctggtctttcttgtgcttcttgagcagcttcaacacttccttctcggtgagaggcggctgcgcttgctgtgccccgaccgctgagggcactagacatataataataagcacaagaatgatcgtctttgacatatgctctctccttccggatcgataaacgcccgcccgctcgaatgcattggcggcgggcagagtcccattttagcccggatggcgcgggccgcacagcaccagcagcgatagattttgacacggtgctcctcggagggttacattcgctcagcatcctgtgctccagtgtgttgggcggggcgccgatcccagcgttgtcgaggcgccccaggggccccgcacaaaaggaatttgaaaaatggtctctcggcaactgatgacttctatcctcttcctggcggccgcgacgtcgctgcaggcgcaaagtcccgtcctcatcgaggttgatgccgccggtgtgcgcaaatccttcgcgcccgcatgggcctatttcggctatgacgaacccaactacacgtatacggcgaatggacagaagttgttaggcgaactcgccgctttgagttcagcccccgtctatatccgagcccacaatctgctgaccacgggcgacgggcaatacgcgctgaagtggggctcgacgaacgcctacagggaagacgccgccggccggcccatctatgattggacgattctcgatcgaatctttgacacctacatggagacgggcgtgaagccgctcgtcgaaatcggcttcatgccggaagcactttccacgaagccgcagccctaccggcatactttcccgcaaggcccgatctggacaggctgggcgtatccgcccaaggactatgagaagtgggcggagctagtccaccagtgggttcgccgctgcattgcgcgctatggccagacggaggtgcgatcgtggtactgggaagtgtggaacgagcccgacatcggctattggcaaggcacacccgaggaatatcacaagctctacgactacgccgccgaggcggtgaagcgcgccttgccggaggcgcgggtcggcgggccgcactcaaccggaccggcggaaccgaaggcggcggaattcttgcgccgctttctcgagcactgcgcccgcgggaccaactacgccacgggccgcaccggctcgcccctggatttcgtcgccttccacgccaaaggtagtcccaaggtggtgggtggccacgttcggatgggcagtagccgtcagttgcagtccatcgcaaagggatttgaaattgtcgcctcctttcccgaatttcgtcatttgccggtcatccttggcgagtccgatccggagggctgcgccgcatgctcggcgcgcgtccatcctcagaacgcctatcgcaacggcacgctctatccttcctatacggccgcgatctacgagaagaccctggcgctcgccgagcgccaccagattcgtcttcagggcgcggtgacctgggccttcgagtttgaagaccaaccttacttcgatggcttccggagcctggcgacgaatggcatcgacaaaccggtgcttaacatctttcgtatgttcggattgatgaagggggagcgcattcccaccacgagcagccagtcggccaggttggatgaaatcctgaaggcaggagttgccggtgcgcccgacatcggcgcgatggcgacgcgcagcgaacgaaccgtttcggtcctggtgtggaactatcacgacgacgatgtcccggcccccgcggcggagatcgatttgggaattcaagggcttcctctcgaccttgagcgcgttctggtccaccactaccgcatcgaccagactcacagcaatgcctataccgcgtggcagcagatgggcgcgccgcaagatcccagcgcgcaacagtacgcgcgactcgtcgcggcgggccagttgcggatgctgacatcgcctgcgtggttgagcgtggagaatggcaaggtaaggatccagttctcactgccgcgccagggaacatcactggtgcagctgagttggtaggggtgggattccatgcgccgcgaccctgcacaccgtcgcttgtggctctgggcgccgctgcttgtcaccccagcccccctcccgagaagtcaggactttctccccctcaaggggagggctggggaatcaaatttcccctcttcccatgagagagaggttgagggtgaggggcgcgccgatattcattacctctcgaccgaaaacgcgtacaccgtccgcgacatgtaggttttccccggtcgcagaatcgttgatggaaagttgggcttgttcggggaatcggggaaatgctgcgtctcaaggcagaacccgaaccgccgtttatagacgtagccgcctttaccggtcagggtgccatccaagaaattcccggcgtagaactggatgcccggttcggtcgtcaagacttccatcacgcggccggtcgtcggctcaatgacgcgcgcggcaagcgacaggccttcgcctttgcggttcaccacgaagttgtggtcatagcccggtccgtacttgatctgctcatcgtcggcatcgatgcgcgcgccgatgggcgtgggcttgcgaaaatcaaatggtgtccccgcgacgctgcgaatctccccggtagggatcagcgtggagtccacgggggtaaagtggtcggcgttcagcatcatgtcgtggccgaggatgtcgcgccggcccgctcccgccagattgaagtaggtgtggttcgtcaagttgaccggcgtggccttgtcgctcgtggcgtggtagtcgaagatgagttcgttcttgtcggtgagggtgtaggtgaccctggtcttgagattgccaggatagccctcctcgccgtccgggctcgtgtaggtgaacacgatgcccaccgaatctttcttctcgaagggctcggcctgccataccaccttgtcgaaacccttgaggccgccgtggagatggttcgggccgttattggcagcgagcttgtattcgacgccgtccagcgtaaatttggcttggccgatgcggtttccgtagcgtccgatgattgcgccaaaatagggatgcccggcgagataaccttcgagggaatcaaagccgagcgctacgtcgtccagcttgccgttgcggtccggcaccttgagcgaaacgacgatgccgccgtaggtcatcgcgcggacttccataccctgagcattggtgagcgtgtacacgtccaccgcctggccgtcgtgggtcttgccgaaaggatctttttttaccatgtgactactcccggacgaagatgttggagcttgcgcgcagccgagcagtaatgccagcacgcacaggacgaatcgagagggaattcgatgcctcatggtcaaaaccgccagaattcattttggggctatcgccccgacacagcgggacgggaaacgtatacagcttctgcggggtttcggcaaggggattcaaggcggcgtgaccaaccgtcgccgcgcggggcgccgacgccctgcggtataatcccagcgtcatcggagcaggattggaaatacagagcgcgggaccgcaactccacgggaggtgtcattcgatggaaaagcccactcgccgcgcgttcctcggagggatgaccgcaggcgtggcgggagcggtggccgcattgcccttgctcgacgcccccacagcgcccgccgtcaagggcacgatgccctatcgcacgctgggggcacgggcgaaaagttgtcgccggtcggcatgggtggatggccattcggtcgcagggcgggcgaggaagaaagcacgcgcttcatccacgccggcatcgatgaagggatcaactacgtcgaagctccagtgggctccctgcgggccaagacggcgccgaccggcaatgccggccagtacgaatggtccataggccgggccggcctgcggcggacgtaggaactcaagggcacctacgtgtgagtgagggagcggaaacttccctgaccccacatgagcaaaggacaccttcagaccccggatggccgcgagcgcctggcgttcgggattgatcctgccacgaccaagtatccgctgcggctcgctcgctacctggctttggcggagttcttgcgctctgaactggaacagaagcgggcgctgcgtctgctggatgtcggctgcggtatcggcaagctgcgccgcgcatgtccccacccgggaatcgagttcatggggatcgacgtccgcctatcctcgctcgaagtcgcccgacagaacggctatgccgccgtcctacaggccaatctcaacgagggtttgccgttcgcgccggcgagcttcgatgtgctggtctgcagccacgtgctggagcatttgccgaatccggaacgcctggtgcaggaagtgctccgtgtcctgcggcccgggggactgttcctggcgggcgtccccatgtcctggtggtggacgcgctggctgcgcattcatctcctgccccggctggtgccggagaaaaaggcggacgtcctcaccgccaacttcggccatgtcacgttcttcactctgccatctctcaaagcgttgctgaaggaattcgagatcgtggacattcgcggcttccgtttcttttcctcgcgtcaccttcccctggaaaactggtggtggtatttccgcctcaacaccttgtgggggcgggcgttcccgcgtctgacggccgacgtgaacgtcgtcgcccgcaagcgcgccgcagtctcctgagtcagaaactccgcaacctgcgttgtccgcaacgcggaacctgcaaggctctgtagcatgggcacgctgcccatgcgcatagccaagatggccgtgctacgtgcgcctggcccttttgaacggactctcgacttgggacacaggttgaggttgacgttatgttgctgcattgggcttgcgagtcgttttagaatgcgtgtcatgagcccccgacgtgcgccggcgactggagcgacccccctgcgtcgccattccgctcaaggcatgattcagttgaagactctgctggccttgctcctgctcggggtagccgggtacgtgctgttcaaagtcaccccaccctacttcgcgaactcgcaattaaaggacaagatgtgggaagaagcgcgctttgccgaggccaatgaccggacggccgagcaggtgcgcgccaatattctccgcgccgccctgcagcttgagattcctctcgaggcggataacatccaggtcgaaatgggccccacgggcactcgcatcaccgctgactactcggtgatcgtggacctctactactaccagctccactgggatttccataccacctcggcccgctgagggcgcgcattgccggacgcatgggccagagcccatttctctgagtttgctcagcgtcacttccaggccaagcctgtaatctgcgcttgaaccccgactgacttcagatgatgataagcagccgacggtcagctagcatgactttgggggagccaagggggtaaggaagaaggggatgatgcaaggcagagcaggctggttcaggagcgtggcgcttttcgcctgcgcctttacgggcgttgccgcgaatgcgcacgcccaggacgacgtgcgatggcaggaagcgctcaagcaggcggccgaggcccgccagagcgggcaactggccgaggtcgaaaaactcctgaagggcgcgctcgccgaggcagagaagttcgggccgctcgaccagcgcgtggtggtctcgttggatgccctgggcacctactactaccagcaaggcatctacgtcgaagccttccctgtgtacacccgcctgctggagattcgcgaacgcaccctgggcccggatcatcccgcggtgggggattccctggatgacatcgcggtcattgagaacctccagggcaaactggccgaagccgaagcgcatgcggaacgcgccctgctgattgccgaacgcgccgccgcggggctctccggcgtaactcacctggcggccggccagaatcacacttgcgcgatagtgggcgcgggccaggtgcagtgctggggatccaatctgagtggccagctcggcgtccccggggcggcggtttccgcctttccggtgaccgtgtccaaactgagcaacagcgtggcgttggccgccgggttggcatttacctgcgccctgctttccgatcacaaggtgacctgctggggcgcgaatcaaaggggtcaggcgggcgcgacgcccagcgaactcaccgaacccgtgctagtgggagggatcttgaatgcccgcgccgtcgccgccggaggcgagcacgcctgcgctctattggccgacgggacggtgaaatgctgggggaacaacgagcaggggcagctcgggaatggaacgacggccagttcggccagcccggtcacggtgagcggcatcgcgggcgccaaagccattgctgccggaggccatcacgcgtgcgcggtcgcgacggatggcggcgtcatgtgctggggttcaaacgtggccggacaaaccggcaaagtcggcacggagcctgcccttacgccggtgcgcgtggcgggactgacggcaccggccaccgcccttgccgccggggccaaccacacctgcgcgctgctggccgatgggacggtggcctgctgggggcgcaaccagtccgggcaggcgggaactccggccagtgcccgggtggcgacacccacgctggtcaaagagctcgcgcgggtcgaaggcctcgtggctggctactcacatacctgcgcgctgctggcggatggctcggtccggtgctggggcaataacgaggaaggccagctcggcgatggcaagaatctgaattcctccagccccgtggtggtggcggggctgccgcgctcgacagcgctggccgcaggcgctactcacacctgcgccgtgttgagcgatgcgacggcgcgctgctggggcaccgacagccacggcacccccgccggcgtcaccttcagtttgcgctcgagagcgcccgtggccgtagggcgagaagcctccggccttacgatcgcactcaacattctggcggatgtctaccgggctgaaaggaaattcgaccgagcggagccgctctaccagcggaccctcagccttgtagagaagatgcgcggcccgcaagaccccagcctggttcccatcctcaacggctacgccgaaatgctgcgccgagccggccgcagcgaagaggccgccaagctggacgatcgcgctcggttcatccaacgcaagcctgtgctcatcgacgttcctgcgcagccgccggggccgcggtgaggatcccggcgatggcaatgacggacccgcgggcccgcgcccgagtctataattgtggcacgagggaggaaaaggctcctatgcgcacactgctatggatcgttacagcttggatgttgtcccttcccgcggttttcgcggccaccgatccgaatcagaaggaatggattcagctcttcaacggcaaggacttgaacgactgggcggtgaagatcaccggctacgccttgaacgagaatttcgggaacacctaccgggtggaaaacggcgtgctcaaggtcgcctacgaccagtacgatgaattccggggaagattcggccacatgttctatcgccggaagttttcgcactatatcgtggccgttgaataccgcttcgtcggcgagcaggtgcgcggcgcgccggattgggcgtatcgtaatagcggggtaatgctgcattgccagtcgcccgaatccatgcagaaggatcaggacttccccatctcgatcgaagtgcagttgctcggcggacgcggaaccggagaacggcccacggccaacctctgcacgcccgggacgcacgtcgtgcgcgacggcgtccttttcaccacgcactgcctgaactccagctccaaaacctatcacggcgaccagtgggtgcgcgtggaagtgatggtgctgggcgattccgtcatccgccatcagatcgacgggcagaccgtcctcagctacgaaatgccgcaaatcggcggcggcgcggtgaacaggtacaatccctgggcgaaaaaggacggcaagctcctcaccgagggctacattgcattgcagagcgagagccaccccatcgaattccgcaaggtggaattgctgaacctggcgggctgcatggacgagaaggccacaaactacaagtcgtattacgtcaaggcggagaacggggagtgtcagtactgaggcgcttgcgttgtgaagatggcaatcacccggagggtggcgggactcccgttcccgggggaatgacgatagacgccggaaggacgatcataggcgcggtagcgacaacaaggatggccctggcctgccgttggcttgttacccacccaagccggggtccaggacgcgccgtctcttaagccccgcgctaggttgtcacttccgttgagcgggggccccagcccattcccttccgcggtcttcgcgaaggccaagcttgcgcgggatggacaaccgttgcgaaaatggccgcgaaggagaccatgcttcaagtgcgggggtgacggaacaggaagacgcaagggacttaaaatccaaaaagtaactgatgcatggtttagtaagggcccgcaagcgcaagtaaaatcggcaaaatgccaagcgcagtcctaatccctgcaaagccctctaaactggcactagctacaaaatctgctacagtaggtccgacaccgaagcccgccgcttcaagtatgatctggcctcactctttccgccacttggagtgccggactactgtcgccaacgagacgccaagccgtgcggcgcattccgccaaagccgcgccttgccggcgcattacggcgagccgctccaggcccctcgcgtccagccgccgcggacgcccgcccaagcgcgcccatgcgcttaactgagcgtggtcgtgccgcgcggcgcgcgcacgtccgcccttcgagccgatttcgctaaggtatccccgtaccagatcgcttagttcggccattttcgggcctccatgggagaccatagcccaaagccctagaaaagtcaatacttgtccgctaaggtctgacatcggagattatgttaggtcgaacttggccgcaacctattgaaaaaacagcacgactattgccgccactttccccatatcaaaccacgccccgcaccccatctgcgcgtcctggggcatcctgccgcgattacggccattttaggcgaaagtctgataaagtacaggccccaatcgccacgggcggcccccggccggataggtcctgggatggggcggggtgcgtcgcccttgccttgcggaccgccgcccagacacggaaccgtttgtgctcgcatgggcgagaccccgcacccgctttccaataagtggaagctccaggcccagccgaaccccttgacttctgctgaggagaagcctccatccggggttcagagcccccccttacgccgacctgcaaggcgtcggcccacaagccagatggaatcccctggctcaggacaaaaggacgcgccacgtttcagacggttttaatttatccttgctgcctttcggggatacaatcccctcgccaatccaactcagactgcgaacggaaacgccaaggcgcagtcggcggaggaagccgtgaactataacttgcttgatcaggagtggattccggttctctacaaacaaggaacaccgcgtcgcgtggggattattgaggcgctcacccaagctggtcacattcggcagatcgcctccagtaatcccatggaccgcgtggcgatattgcgcttcctgcttgcgctgctctattggtgcaatgacaatccccgggacggtcccatcccggccgattcctttccgcgagagtggttcacgagactcgacgacaacagagaatgcttcgaacttctgggcgaggtgaagcggttctatcagtacaagtccagctcacaaaacgacaaaaagcctcccgttaattacctcgtccacgaagttcccacgggaacaaacgtttggcacttccgacacgcgacagacaaagttgacggtctctgtccggcatgttgcgctctcggcctcgtgcgacttcctgttttcaccacccagggaggggccggaaagtcacccgggatcaatgggcggccaccggtctacgtcattcctttaggctcttcgctcgcgcataccctgagcctgtcgtggcagaacgtttcgaacctgggaacacccgcatgggaaaatccggctttacaactccccaagaccggggacgtgcccctgctaaccggactgacatggctaccgcggtgcgtttggttagacgaccctgaggaacccgaaggtaaatgcatctcatgtgcgcgcaaagaactgttgatccggcaaagcgtatatgccggcaggggcagcataaaggcgaaggccgcaagccgaatctggcatgatccgcacgtcattcgcgaccctagggacattctcgtgacttcccgcaatcctcttgacgccgctgacgcaatggctggtgattgggcaagggtagccgccggggtgctccggaaggctgtacccacaggcacgcgtcaagtctggattgttgggtttgctactgatcgaaacaagtacctggaggcgaaggaatacgagattccccttctgtctgcaaccgatgagcagaagcttcaggacagcatcagcaagattcagacttggcagaaagagggctcaagactcgccggaaaagttcagaatctattgcgacgcaccgaggggacccgccagggagcatctcgccaaagagaacatgtggaggtgcagccaatgcttgccgccctccgcccccatgtcgaagacaaagtctctacgaatgtgggcgagttgctagccgggggcgatcacgcctggcagcaagcggcccgcgaatatagtccagggatggacgccatcgcccgatcgctttcgccgggttacaccactgccgccgtggagatgcggcgacggattgccagcgtggagccgaacatgcgtctaaacgcaaaagcggccaagaagcccggctcgcggaagggagagaagaagtgactccaaccgagcagtacatcaaacttctaacgggcttgaagcccggtgcactgggactgttacgcacgcatgctgggcagggcctcgatgaaactgtggacgggttcgacctgttcacaggcctatggtggccattgcgtcgaagaaacgagcgcgcgcctcgccgccaagtggcctggctcatcgccaagctctatgccttgcgtcccatcaaacattcacccggcgagacactcccccgccaactcgcaaagctccggcccgatgaggaacgagcacagaaacgattccgccagaaggttgacaaacagaaacgattccgccggaaggttgacaaaatgcttacccttccgctcgacaagatcgaaccggccttgcaatgggcgctcgacctgctcggctcaaagggcctgaaactcgactgggtaagcctgacgaatgatctttccatttgggaacgcgaatccgtccgcctcaagtgggcggaagaattcttgaaatcaaccaaggaggacagcgatgttgatcgaaattcacatgattcaaaaccacagcccggccaacctgaaccgggatgacctgggcgcccccaaaacctgtttcttcggcggggttctgcgctcccgcatttccagccagtgcctcaagcgaagtatccgcaggagtgaagagttccagcgattgctcggcgggaagcgtactcgccagctagccagactgatcgccgagaaggtccgggaaaaggacgtgaagaagcgcgctgagaaggtactcgagatgtgcggcttcaaacctaagaaatcggaaggtgatggggaaggttccgagagaagcaaaatgcttgtctacaccacggaccaggccatagaagaaatggcaagcctcttccgcaacggcgacggcaaagacgacaaccaattggcaagagagctggccgagattattgccaagcgcaccgccgtcccggacatggccttgtcaggccgcatgttggaacccgatgagtccgggaagaaagtatgggaagaactcaataccaccgtcgaagcggcgctgcaagctgcccacgctatttccactcatgaggcccgcccggaggtggattactacgttgccgccgacgacatccccggcgcggatgcgggcgctggctatgtggacgaagctatgttcgcttcggcgtgcttctacaagtatttctcaatcgactgggaaacccttgtcgacaatcttgagggttacggagacaaccacaagaagctggccgcacacaccgtgggcgccttccttcgcggtgcggcgcttgccaaccccacgggcaagcagaacagctacgccgcgcacaatcatcccgacgggatactggtcgagatcagaaactctcccctcagctacgctaacgcctttgccagaccggtgggtgtcggggccagcatcaaggaagatggccgcgacctcatttcgcagagcatcgcgcaactgggccaatacatctacgacctggataacggctacggcaagccgaccgagcggttttggttctcccccaatctccgctgtcccttgacggtttccatcaaggcaaaggagaacggaaaggagaaaacccgtgaggtcgcgcttaccgaaaacaacctcggatcgctcgatgagttgatacccgccgttattaaggcaatcgggcatgattgggaggaggttaagaaggtcatcgtaaacacggaggtggcctgatgacccccaacacccttcttctccgctttgaaggccctcttcaggcttggggcgaccagcaatcgaaatttgtcatccggcgcaccgctgaggccccgaccaagtccggagttttcgggatgctctgcgcagccttgggcgtgtctcgtaccgaggccccccaagagtggctcccaaagctcagtgccctgcgcatgggtgtccgcattgatcgacccggcgtgcgctggtgggactatcacacggtgggcgccaagattggtatccgcagggcagatggcaagggcatcaagcggacggctacgacgggggaaatcgaaaccctcgtcacccgccgcgagtacctttgcgatgcctccttcctggtcgctcttcagggcgaatcggccctgattgctgaactggagggggcaatcaaggcgcccagatgggccctctatctcggcagaaagtgctgccccccttcgcgccctttgcttgacccgaagcatccggcgggttacttcccggatttgcttggagcgcttaaatccgtcccttggcaaaaacggctggaggatgacccacagccccaaaggctcgtatgcctgcgcgactgggcgcccacgccagaagagccagaagcttccgatcacgccctcatctggtatgacgtgcccctcaccttcgatcctccctcgcattctccccggtttgtaatccgcgaggaattgcgagtgggtgcgaacggcgaggttgccagcgcaggtgaacctgcccagagcattccgctggcaccgccgcggcctcgcgcgaactataccaacacgaagttcagggaacggcgaaaggagcgcctcgacctcgaccatcacctctgcgtcttctgcaaggcccccgccaccaccgtccagcacgttacctaccggcgggctggcggcgacgaggttgccgaggatttgcgcgctctctgccgctactgccatgacgccgtgaccatgatcgaatacggcttgaacatgggaatggaccgcattaatcccgaggagccccgctggcgcgacatgattgttcagaaacgagaagagatcatctgcttccgctcgctcgaaacacgccgccgcaagctcgcggctgaggaggtagagtagccatgtacctctcctatctcttaatcgacgtgggcgacaaccccgaccggccccggcccggacgcttgtggcttagaaacctctatcatgtccaccagcgcctatgcatggcgtttccgtccaatcccagaaaacggcgtgatccagactttcttgccccttatgcacctgaggacttcccggagcagcgtcacttggcagataaaaagaagaccgaagtcgatccagaaatcttaaaacacgtacacagcaagcgaggaccggactccggttttctctttcgcatcgacccgcagcccggcggccgcgttgtgattctggtgcagtccgccgcaaagcccgactgggactacgccttccacaatgccggctatctcctggccgcgccgccccaagtgaagtcattcgacccatccttcaagccgaggcagcgccttcgcttctgccttctggtgaatccgacaaggaaggtcggcacgatcaacaaggcggagagacagagtctctccaaagacgagcttgctcaaaaacaaggacgccacggcaggcgcgtcccggtgccaagcgcgcgggaaatcgaggattggctccgcaagaatgccaatcaagatccgcgccccttcattgagagtaagctcctggagtggctcgccaaccgaggggcaacatccggattctgtctcgaccagcgctcaactatcgttcagccgagctatcagtatttcaacaagcgtccggttgtcgggaaagaagaagcggaagccttgcggaagagccagcaggcccggctgcgctcggtccgttacgagggcattctccaggtcacggagcccgccccattccgcgaaactctgatccacggcatcgggccgggcaaagccttcggcttcggcctgctttccgtggccccctgccacacgccagtcccagcggagcaatgatgaggattgaagacctccacgtcttgcccaagttcagtgacgggtggagctatctctacgtggagcattgtcgcgttgaccaggaggaccgggccatagccatccacgaccaggccggcaagacccctgtgccttgcgcgaatctggctttgctcatgttagggccgggcgtctcgatcacgcatgcagccatctcggtactcgccgaccacggttgccttgtagcctggtgcggtgaggagggagtccgcttttacgccacaggaatgggcgagacgcgcagcgcggccaacttcctgcatcaggcgcgaatgtgggcgcatgagggcttccacatgcaagtggtgcgacgcctctaccagcttcgcttcaccgagaaattcgatcccggtctgacccttcagcaaatccgaggcatggaaggcgtaagggttcgggaggcgtacgccaaagccgcgcaggaagccggcatcacgtggtcaggccgaaactataaacgcgatgagtggagcaaagcagaccctgcaaatcgcgctttgtccgccgccaattcctgcctgtacggaatctgtcatgcggccatcgtgtcggcgggcttctcccccgctctcggctttatccacaccggcaagatgctctccttcgtgtacgacatcgccgacctttacaaaactgaaattaccgttcccgtggcatttcgagccgtcgctgaggagaaaaagccgctggaacggcaggtccgtatcgcctgccgcgaccagtttgtctccactcggcttctggaaaggattatcccggacattcaatccgcgctgatgttgtcagtcgcggctgcctccgatactgatttcgacctcgatggtgccgcccccggcttcttgtgggacgatttggaaggcaaagtcgaaggcgggcgcatacaagtggcggaagccgacgaaacggaacccaacgatggtggtcctgattcttgagcgcgtcccgccgggactgcgcggcgaactcacacgctggctcctggaaccccgcgccggcgtgtttgtgggacgtgtttctgcgctcgtccgtcagaagctgtgggagttggcctgcagcaaggcgagcggtggcggatgcctgatgatctattcgagcgacaatgaacaaggcttccggatcgaaacttggggacgaacgagtcgccgagttgaggacttcgaaggcctttttctcatccgcatcccgccgaatcagtaacttgagaagtgtcgtccccacgcgcgtgggggtgaaccacatgaggttccccacaaagtgcagcatgggacgtcgtccccacgcgcgtgggggtgaaccgtcacgcgggcccggttccggctctcgactaaggtcgtccccacgcgcgtgggggtgaaccgagtaagccgtgcaggggcggcttgcctctttagtcgtccccacgcgcgtgggggtgaaccagattcagcaatcatcaatctcgccaaacggcggtcgtccccacgcgcgtgggggtgaaccgtatgcggcgtccatcgcatcccttccactctggtcgtccccacgcgcgtgggggtgaaccgcaaggcggcagcttgccacatattttggcgctgtcgtccccacgcgcgtgggggtgaaccgaaggattgagcttaagcaccagccttatcaacgtcgtccccacgcgcgtgggggtgaaccgcatacgattggtattacgaggcgaggctccgagtcgtccccacgcgcgtgggggtgaaccgtttgctgcccgcgcacaggcggcgggcggggagtcgtccccacgcgcgtgggggtgaaccggctgctattgattgggcacaagaacatggtcagtcgtccccacgcgcgtgggggtgaaccgacggtgagtttgagtttgcggttgatttaggggtcgtccccacgcgcgtgggggtgaaccgactcacgaacaataccttcacgcaatccgcgagtcgtccccacgcgcgtgggggtgaaccgttcaagccgccggcgtttaaggttatgtggcagtcgtccccacgcgcgtgggggtgaaccgtagacggggtaagtcagggaacgctttctggcgtcgtccccacgcgcgtgggggtgaaccgttgtttggcgttggtagttggcgcggacagtcgtcgtccccacgcgcgtgggggtgaacctcgtgacgcgcgagcgtaaaatgcagccatgcggtcgtccccacgcgcgtgggggtgaaccgcgctcgaagcggtcctcatagagctccagccagtcgtccccacgcgcgtgggggtgaacctcgcgccgcgcgagcgtaaaacgcagacatacggtcgtccccacgcgcgtgggggtgaaccgaactcaacagcgcgcgttcaggttacggatacgtcgtccccacgcgcgtgggggtgaacctaccggaactgtggatgtgaatgttgccgtcgggtcgtccccacgcgcgtgggggtgaaccggtcctggcgcgggaaggcaaggccagcgtcgagtcgtccccacgcgcgtgggggtgaaccgcgccgcgcacggagcgtcacccgccgcgtcggtcgtccccacgcgcgtgggggtgaaccgttgtggcgggcctgtatgttcgggtggtgggagtcgtccccacgcgcgtgggggtgaaccgtcgtggacctcggtagcctccggccgggaggagtcgtccccacgcgcgtgggggtgaaccgtgtttacgaggctcgtggtgagtactcccaatgtcgtccccacgcgcgtgggggtgaacctcgcgtacttggcgtggtagcgggcctgctgtcgtcgtccccacgcgcgtgggggtgaaccggcgccgccgcggccgtagatgtcggacagccagtcgtccccacgcgcgtgggggtgaaccgaactccgacaaagccaaaaacttgaacgacgcgtcgtccccacgcgcgtgggggtgaaccggaattatgggtaggcgaaatgaaaactgcgtagtcgtccccacgcgcgtgggggtgaaccgcgca

SEQ ID NO: 985 - DNA, 105607 bp, Artificial Sequence
  Synthetic Oligonucleotide
  misc_feature (1)..(83268): n is a, c, g, or t
nnnnnnnnnnnnnnnnnnnnnnnnnnnnnnnnnnnnnnnnnnnnnnnnnnnnnnnnnnnnnnnnnnnnnnnnnnnnnnnnnnnnnnnnnnnnnnnnnnnnnnnnnnnnnnnnnnnnnnnnnnnnnnnnnnnnnnnnnnnnnnnnnnnnnnnnnnnnnnnnnnnnnnnnnnnnnnnnnnnnnnnnnnnnnnnnnnnnnnnnnnnnnnnnnnnnnnnnnnnnnnnnnnnnnnnnnnnnnnnnnnnnnnnnnnnnnnnnnnnnnnnnnnnnnnnnnnnnnnnnnnnnnnnnnnnnnnnnnnnnnnnnnnnnnnnnnnnnnnnnnnnnnnnnnnnnnnnnnnnnnnnnnnnnnnnnnnnnnnnnnnnnnnnnnnnnnnnnnnnnnnnnnnnnnnnnnnnnnnnnnnnnnnnnnnnnnnnnnnnnnnnnnnnnnnnnnnnnnnnnnnnnnnnnnnnnnnnnnnnnnnnnnnnnnnnnnnnnnnnnnnnnnnnnnnnnnnnnnnnnnnnnnnnnnnnnnnnnnnnnnnnnnnnnnnnnnnnnnnnnnnnnnnnnnnnnnnnnnnnnnnnnnnnnnnnnnnnnnnnnnnnnnnnnnnnnnnnnnnnnnnnnnnnnnnnnnnnnnnnnnnnnnnnnnnnnnnnnnnnnnnnnnnnnnnnnnnnnnnnnnnnnnnnnnnnnnnnnnnnnnnnnnnnnnnnnnnnnnnnnnnnnnnnnnnnnnnnnnnnnnnnnnnnnnnnnnnnnnnnnnnnnnnnnnnnnnnnnnnnnnnnnnnnnnnnnnnnnnnnnnnnnnnnnnnnnnnnnnnnnnnnnnnnnnnnnnnnnnnnnnnnnnnnnnnnnnnnnnnnnnnnnnnnnnnnnnnnnnnnnnnnnnnnnnnnnnnnnnnnnnnnnnnnnnnnnnnnnnnnnnnnnnnnnnnnnnnnnnnnnnnnnnnnnnnnnnnnnnnnnnnnnnnnnnnnnnnnnnnnnnnnnnnnnnnnnnnnnnnnnnnnnnnnnnnnnnnnnnnnnnnnnnnnnnnnnnnnnnnnnnnnnnnnnnnnnnnnnnnnnnnnnnnnnnnnnnnnnnnnnnnnnnnnnnnnnnnnnnnnnnnnnnnnnnnnnnnnnnnnnnnnnnnnnnnnnnnnnnnnnnnnnnnnnnnnnnnnnnnnnnnnnnnnnnnnnnnnnnnnnnnnnnnnnnnnnnnnnnnnnnnnnnnnnnnnnnnnnnnnnnnnnnnnnnnnnnnnnnnnnnnnnnnnnnnnnnnnnnnnnnnnnnnnnnnnnnnnnnnnnnnnnnnnnnnnnnnnnnnnnnnnnnnnnnnnnnnnnnnnnnnnnnnnnnnnnnnnnnnnnnnnnnnnnnnnnnnnnnnnnnnnnnnnnnnnnnnnnnnnnnnnnnnnnnnnnnnnnnnnnnnnnnnnnnnnnnnnnnnnnnnnnnnnnnnnnnnnnnnnnnnnnnnnnnnnnnnnnnnnnnnnnnnnnnnnnnnnnnnnnnnnnnnnnnnnnnnnnnnnnnnnnnnnnnnnnnnnnnnnnnnnnnnnnnnnnnnnnnnnnnnnnnnnnnnnnnnnnnnnnnnnnnnnnnnnnnnnnnnnnnnnnnnnnnnnnnnnnnnnnnnnnnnnnnnnnnnnnnnnnnnnnnnnnnnnnnnnnnnnnnnnnnnnnnnnnnnnnnnnnnnnnnnnnnnnnnnnnnnnnnnnnnnnnnnnnnnnnnnnnnnnnnnnnnnnnnnnnnnnnnnnnnnnnnnnnnnnnnnnnnnnnnnnnnnnnnnnnnnnnnnnnnnnnnnnnnnnnnnnnnnnnnnnnnnnnnnnnnnnnnnnnnnnnnnnnnnnnnnnnnnnnnnnnnnnnnnnnnnnnnnnnnnnnnnnnnnnnnnnnnnnnnnnnnnnnnnnnnnnnnnnnnnnnnnnnnnnnnnnnnnnnnnnnnnnnnnnnnnnnnnnnnnnnnnnnnnnnnnnnnnnnnnnnnnnnnnnnnnnnnnnnnnnnnnnnnnnnnnnnnnnnnnnnnnnnnnnnnnnnnnnnnnnnnnnnnnnnnnnnnnnnnnnnnnnnnnnnnnnnnnnnnnnnnnnnnnnnnnnnnnnnnnnnnnnnnnnnnnnnnnnnnnnnnnnnnnnnnnnnnnnnnnnnnnnnnnnnnnnnnnnnnnnnnnnnnnnnnnnnnnnnnnnnnnnnnnnnnnnnnnnnnnnnnnnnnnnnnnnnnnnnnnnnnnnnnnnnnnnnnnnnnnnnnnnnnnnnnnnnnnnnnnnnnnnnnnnnnnnnnnnnnnnnnnnnnnnnnnnnnnnnnnnnnnnnnnnnnnnnnnnnnnnnnnnnnnnnnnnnnnnnnnnnnnnnnnnnnnnnnnnnnnnnnnnnnnnnnnnnnnnnnnnnnnnnnnnnnnnnnnnnnnnnnnnnnnnnnnnnnnnnnnnnnnnnnnnnnnnnnnnnnnnnnnnnnnnnnnnnnnnnnnnnnnnnnnnnnnnnnnnnnnnnnnnnnnnnnnnnnnnnnnnnnnnnnnnnnnnnnnnnnnnnnnnnnnnnnnnnnnnnnnnnnnnnnnnnnnnnnnnnnnnnnnnnnnnnnnnnnnnnnnnnnnnnnnnnnnnnnnnnnnnnnnnnnnnnnnnnnnnnnnnnnnnnnnnnnnnnnnnnnnnnnnnnnnnnnnnnnnnnnnnnnnnnnnnnnnnnnnnnnnnnnnnnnnnnnnnnnnnnnnnnnnnnnnnnnnnnnnnnnnnnnnnnnnnnnnnnnnnnnnnnnnnnnnnnnnnnnnnnnnnnnnnnnnnnnnnnnnnnnnnnnnnnnnnnnnnnnnnnnnnnnnnnnnnnnnnnnnnnnnnnnnnnnnnnnnnnnnnnnnnnnnnnnnnnnnnnnnnnnnnnnnnnnnnnnnnnnnnnnnnnnnnnnnnnnnnnnnnnnnnnnnnnnnnnnnnnnnnnnnnnnnnnnnnnnnnnnnnnnnnnnnnnnnnnnnnnnnnnnnnnnnnnnnnnnnnnnnnnnnnnnnnnnnnnnnnnnnnnnnnnnnnnnnnnnnnnnnnnnnnnnnnnnnnnnnnnnnnnnnnnnnnnnnnnnnnnnnnnnnnnnnnnnnnnnnnnnnnnnnnnnnnnnnnnnnnnnnnnnnnnnnnnnnnnnnnnnnnnnnnnnnnnnnnnnnnnnnnnnnnnnnnnnnnnnnnnnnnnnnnnnnnnnnnnnnnnnnnnnnnnnnnnnnnnnnnnnnnnnnnnnnnnnnnnnnnnnnnnnnnnnnnnnnnnnnnnnnnnnnnnnnnnnnnnnnnnnnnnnnnnnnnnnnnnnnnnnnnnnnnnnnnnnnnnnnnnnnnnnnnnnnnnnnnnnnnnnnnnnnnnnnnnnnnnnnnnnnnnnnnnnnnnnnnnnnnnnnnnnnnnnnnnnnnnnnnnnnnnnnnnnnnnnnnnnnnnnnnnnnnnnnnnnnnnnnnnnnnnnnnnnnnnnnnnnnnnnnnnnnnnnnnnnnnnnnnnnnnnnnnnnnnnnnnnnnnnnnnnnnnnnnnnnnnnnnnnnnnnnnnnnnnnnnnnnnnnnnnnnnnnnnnnnnnnnnnnnnnnnnnnnnnnnnnnnnnnnnnnnnnnnnnnnnnnnnnnnnnnnnnnnnnnnnnnnnnnnnnnnnnnnnnnnnnnnnnnnnnnnnnnnnnnnnnnnnnnnnnnnnnnnnnnnnnnnnnnnnnnnnnnnnnnnnnnnnnnnnnnnnnnnnnnnnnnnnnnnnnnnnnnnnnnnnnnnnnnnnnnnnnnnnnnnnnnnnnnnnnnnnnnnnnnnnnnnnnnnnnnnnnnnnnnnnnnnnnnnnnnnnnnnnnnnnnnnnnnnnnnnnnnnnnnnnnnnnnnnnnnnnnnnnnnnnnnnnnnnnnnnnnnnnnnnnnnnnnnnnnnnnnnnnnnnnnnnnnnnnnnnnnnnnnnnnnnnnnnnnnnnnnnnnnnnnnnnnnnnnnnnnnnnnnnnnnnnnnnnnnnnnnnnnnnnnnnnnnnnnnnnnnnnnnnnnnnnnnnnnnnnnnnnnnnnnnnnnnnnnnnnnnnnnnnnnnnnnnnnnnnnnnnnnnnnnnnnnnnnnnnnnnnnnnnnnnnnnnnnnnnnnnnnnnnnnnnnnnnnnnnnnnnnnnnnnnnnnnnnnnnnnnnnnnnnnnnnnnnnnnnnnnnnnnnnnnnnnnnnnnnnnnnnnnnnnnnnnnnnnnnnnnnnnnnnnnnnnnnnnnnnnnnnnnnnnnnnnnnnnnnnnnnnnnnnnnnnnnnnnnnnnnnnnnnnnnnnnnnnnnnnnnnnnnnnnnnnnnnnnnnnnnnnnnnnnnnnnnnnnnnnnnnnnnnnnnnnnnnnnnnnnnnnnnnnnnnnnnnnnnnnnnnnnnnnnnnnnnnnnnnnnnnnnnnnnnnnnnnnnnnnnnnnnnnnnnnnnnnnnnnnnnnnnnnnnnnnnnnnnnnnnnnnnnnnnnnnnnnnnnnnnnnnnnnnnnnnnnnnnnnnnnnnnnnnnnnnnnnnnnnnnnnnnnnnnnnnnnnnnnnnnnnnnnnnnnnnnnnnnnnnnnnnnnnnnnnnnnnnnnnnnnnnnnnnnnnnnnnnnnnnnnnnnnnnnnnnnnnnnnnnnnnnnnnnnnnnnnnnnnnnnnnnnnnnnnnnnnnnnnnnnnnnnnnnnnnnnnnnnnnnnnnnnnnnnnnnnnnnnnnnnnnnnnnnnnnnnnnnnnnnnnnnnnnnnnnnnnnnnnnnnnnnnnnnnnnnnnnnnnnnnnnnnnnnnnnnnnnnnnnnnnnnnnnnnnnnnnnnnnnnnnnnnnnnnnnnnnnnnnnnnnnnnnnnnnnnnnnnnnnnnnnnnnnnnnnnnnnnnnnnnnnnnnnnnnnnnnnnnnnnnnnnnnnnnnnnnnnnnnnnnnnnnnnnnnnnnnnnnnnnnnnnnnnnnnnnnnnnnnnnnnnnnnnnnnnnnnnnnnnnnnnnnnnnnnnnnnnnnnnnnnnnnnnnnnnnnnnnnnnnnnnnnnnnnnnnnnnnnnnnnnnnnnnnnnnnnnnnnnnnnnnnnnnnnnnnnnnnnnnnnnnnnnnnnnnnnnnnnnnnnnnnnnnnnnnnnnnnnnnnnnnnnnnnnnnnnnnnnnnnnnnnnnnnnnnnnnnnnnnnnnnnnnnnnnnnnnnnnnnnnnnnnnnnnnnnnnnnnnnnnnnnnnnnnnnnnnnnnnnnnnnnnnnnnnnnnnnnnnnnnnnnnnnnnnnnnnnnnnnnnnnnnnnnnnnnnnnnnnnnnnnnnnnnnnnnnnnnnnnnnnnnnnnnnnnnnnnnnnnnnnnnnnnnnnnnnnnnnnnnnnnnnnnnnnnnnnnnnnnnnnnnnnnnnnnnnnnnnnnnnnnnnnnnnnnnnnnnnnnnnnnnnnnnnnnnnnnnnnnnnnnnnnnnnnnnnnnnnnnnnnnnnnnnnnnnnnnnnnnnnnnnnnnnnnnnnnnnnnnnnnnnnnnnnnnnnnnnnnnnnnnnnnnnnnnnnnnnnnnnnnnnnnnnnnnnnnnnnnnnnnnnnnnnnnnnnnnnnnnnnnnnnnnnnnnnnnnnnnnnnnnnnnnnnnnnnnnnnnnnnnnnnnnnnnnnnnnnnnnnnnnnnnnnnnnnnnnnnnnnnnnnnnnnnnnnnnnnnnnnnnnnnnnnnnnnnnnnnnnnnnnnnnnnnnnnnnnnnnnnnnnnnnnnnnnnnnnnnnnnnnnnnnnnnnnnnnnnnnnnnnnnnnnnnnnnnnnnnnnnnnnnnnnnnnnnnnnnnnnnnnnnnnnnnnnnnnnnnnnnnnnnnnnnnnnnnnnnnnnnnnnnnnnnnnnnnnnnnnnnnnnnnnnnnnnnnnnnnnnnnnnnnnnnnnnnnnnnnnnnnnnnnnnnnnnnnnnnnnnnnnnnnnnnnnnnnnnnnnnnnnnnnnnnnnnnnnnnnnnnnnnnnnnnnnnnnnnnnnnnnnnnnnnnnnnnnnnnnnnnnnnnnnnnnnnnnnnnnnnnnnnnnnnnnnnnnnnnnnnnnnnnnnnnnnnnnnnnnnnnnnnnnnnnnnnnnnnnnnnnnnnnnnnnnnnnnnnnnnnnnnnnnnnnnnnnnnnnnnnnnnnnnnnnnnnnnnnnnnnnnnnnnnnnnnnnnnnnnnnnnnnnnnnnnnnnnnnnnnnnnnnnnnnnnnnnnnnnnnnnnnnnnnnnnnnnnnnnnnnnnnnnnnnnnnnnnnnnnnnnnnnnnnnnnnnnnnnnnnnnnnnnnnnnnnnnnnnnnnnnnnnnnnnnnnnnnnnnnnnnnnnnnnnnnnnnnnnnnnnnnnnnnnnnnnnnnnnnnnnnnnnnnnnnnnnnnnnnnnnnnnnnnnnnnnnnnnnnnnnnnnnnnnnnnnnnnnnnnnnnnnnnnnnnnnnnnnnnnnnnnnnnnnnnnnnnnnnnnnnnnnnnnnnnnnnnnnnnnnnnnnnnnnnnnnnnnnnnnnnnnnnnnnnnnnnnnnnnnnnnnnnnnnnnnnnnnnnnnnnnnnnnnnnnnnnnnnnnnnnnnnnnnnnnnnnnnnnnnnnnnnnnnnnnnnnnnnnnnnnnnnnnnnnnnnnnnnnnnnnnnnnnnnnnnnnnnnnnnnnnnnnnnnnnnnnnnnnnnnnnnnnnnnnnnnnnnnnnnnnnnnnnnnnnnnnnnnnnnnnnnnnnnnnnnnnnnnnnnnnnnnnnnnnnnnnnnnnnnnnnnnnnnnnnnnnnnnnnnnnnnnnnnnnnnnnnnnnnnnnnnnnnnnnnnnnnnnnnnnnnnnnnnnnnnnnnnnnnnnnnnnnnnnnnnnnnnnnnnnnnnnnnnnnnnnnnnnnnnnnnnnnnnnnnnnnnnnnnnnnnnnnnnnnnnnnnnnnnnnnnnnnnnnnnnnnnnnnnnnnnnnnnnnnnnnnnnnnnnnnnnnnnnnnnnnnnnnnnnnnnnnnnnnnnnnnnnnnnnnnnnnnnnnnnnnnnnnnnnnnnnnnnnnnnnnnnnnnnnnnnnnnnnnnnnnnnnnnnnnnnnnnnnnnnnnnnnnnnnnnnnnnnnnnnnnnnnnnnnnnnnnnnnnnnnnnnnnnnnnnnnnnnnnnnnnnnnnnnnnnnnnnnnnnnnnnnnnnnnnnnnnnnnnnnnnnnnnnnnnnnnnnnnnnnnnnnnnnnnnnnnnnnnnnnnnnnnnnnnnnnnnnnnnnnnnnnnnnnnnnnnnnnnnnnnnnnnnnnnnnnnnnnnnnnnnnnnnnnnnnnnnnnnnnnnnnnnnnnnnnnnnnnnnnnnnnnnnnnnnnnnnnnnnnnnnnnnnnnnnnnnnnnnnnnnnnnnnnnnnnnnnnnnnnnnnnnnnnnnnnnnnnnnnnnnnnnnnnnnnnnnnnnnnnnnnnnnnnnnnnnnnnnnnnnnnnnnnnnnnnnnnnnnnnnnnnnnnnnnnnnnnnnnnnnnnnnnnnnnnnnnnnnnnnnnnnnnnnnnnnnnnnnnnnnnnnnnnnnnnnnnnnnnnnnnnnnnnnnnnnnnnnnnnnnnnnnnnnnnnnnnnnnnnnnnnnnnnnnnnnnnnnnnnnnnnnnnnnnnnnnnnnnnnnnnnnnnnnnnnnnnnnnnnnnnnnnnnnnnnnnnnnnnnnnnnnnnnnnnnnnnnnnnnnnnnnnnnnnnnnnnnnnnnnnnnnnnnnnnnnnnnnnnnnnnnnnnnnnnnnnnnnnnnnnnnnnnnnnnnnnnnnnnnnnnnnnnnnnnnnnnnnnnnnnnnnnnnnnnnnnnnnnnnnnnnnnnnnnnnnnnnnnnnnnnnnnnnnnnnnnnnnnnnnnnnnnnnnnnnnnnnnnnnnnnnnnnnnnnnnnnnnnnnnnnnnnnnnnnnnnnnnnnnnnnnnnnnnnnnnnnnnnnnnnnnnnnnnnnnnnnnnnnnnnnnnnnnnnnnnnnnnnnnnnnnnnnnnnnnnnnnnnnnnnnnnnnnnnnnnnnnnnnnnnnnnnnnnnnnnnnnnnnnnnnnnnnnnnnnnnnnnnnnnnnnnnnnnnnnnnnnnnnnnnnnnnnnnnnnnnnnnnnnnnnnnnnnnnnnnnnnnnnnnnnnnnnnnnnnnnnnnnnnnnnnnnnnnnnnnnnnnnnnnnnnnnnnnnnnnnnnnnnnnnnnnnnnnnnnnnnnnnnnnnnnnnnnnnnnnnnnnnnnnnnnnnnnnnnnnnnnnnnnnnnnnnnnnnnnnnnnnnnnnnnnnnnnnnnnnnnnnnnnnnnnnnnnnnnnnnnnnnnnnnnnnnnnnnnnnnnnnnnnnnnnnnnnnnnnnnnnnnnnnnnnnnnnnnnnnnnnnnnnnnnnnnnnnnnnnnnnnnnnnnnnnnnnnnnnnnnnnnnnnnnnnnnnnnnnnnnnnnnnnnnnnnnnnnnnnnnnnnnnnnnnnnnnnnnnnnnnnnnnnnnnnnnnnnnnnnnnnnnnnnnnnnnnnnnnnnnnnnnnnnnnnnnnnnnnnnnnnnnnnnnnnnnnnnnnnnnnnnnnnnnnnnnnnnnnnnnnnnnnnnnnnnnnnnnnnnnnnnnnnnnnnnnnnnnnnnnnnnnnnnnnnnnnnnnnnnnnnnnnnnnnnnnnnnnnnnnnnnnnnnnnnnnnnnnnnnnnnnnnnnnnnnnnnnnnnnnnnnnnnnnnnnnnnnnnnnnnnnnnnnnnnnnnnnnnnnnnnnnnnnnnnnnnnnnnnnnnnnnnnnnnnnnnnnnnnnnnnnnnnnnnnnnnnnnnnnnnnnnnnnnnnnnnnnnnnnnnnnnnnnnnnnnnnnnnnnnnnnnnnnnnnnnnnnnnnnnnnnnnnnnnnnnnnnnnnnnnnnnnnnnnnnnnnnnnnnnnnnnnnnnnnnnnnnnnnnnnnnnnnnnnnnnnnnnnnnnnnnnnnnnnnnnnnnnnnnnnnnnnnnnnnnnnnnnnnnnnnnnnnnnnnnnnnnnnnnnnnnnnnnnnnnnnnnnnnnnnnnnnnnnnnnnnnnnnnnnnnnnnnnnnnnnnnnnnnnnnnnnnnnnnnnnnnnnnnnnnnnnnnnnnnnnnnnnnnnnnnnnnnnnnnnnnnnnnnnnnnnnnnnnnnnnnnnnnnnnnnnnnnnnnnnnnnnnnnnnnnnnnnnnnnnnnnnnnnnnnnnnnnnnnnnnnnnnnnnnnnnnnnnnnnnnnnnnnnnnnnnnnnnnnnnnnnnnnnnnnnnnnnnnnnnnnnnnnnnnnnnnnnnnnnnnnnnnnnnnnnnnnnnnnnnnnnnnnnnnnnnnnnnnnnnnnnnnnnnnnnnnnnnnnnnnnnnnnnnnnnnnnnnnnnnnnnnnnnnnnnnnnnnnnnnnnnnnnnnnnnnnnnnnnnnnnnnnnnnnnnnnnnnnnnnnnnnnnnnnnnnnnnnnnnnnnnnnnnnnnnnnnnnnnnnnnnnnnnnnnnnnnnnnnnnnnnnnnnnnnnnnnnnnnnnnnnnnnnnnnnnnnnnnnnnnnnnnnnnnnnnnnnnnnnnnnnnnnnnnnnnnnnnnnnnnnnnnnnnnnnnnnnnnnnnnnnnnnnnnnnnnnnnnnnnnnnnnnnnnnnnnnnnnnnnnnnnnnnnnnnnnnnnnnnnnnnnnnnnnnnnnnnnnnnnnnnnnnnnnnnnnnnnnnnnnnnnnnnnnnnnnnnnnnnnnnnnnnnnnnnnnnnnnnnnnnnnnnnnnnnnnnnnnnnnnnnnnnnnnnnnnnnnnnnnnnnnnnnnnnnnnnnnnnnnnnnnnnnnnnnnnnnnnnnnnnnnnnnnnnnnnnnnnnnnnnnnnnnnnnnnnnnnnnnnnnnnnnnnnnnnnnnnnnnnnnnnnnnnnnnnnnnnnnnnnnnnnnnnnnnnnnnnnnnnnnnnnnnnnnnnnnnnnnnnnnnnnnnnnnnnnnnnnnnnnnnnnnnnnnnnnnnnnnnnnnnnnnnnnnnnnnnnnnnnnnnnnnnnnnnnnnnnnnnnnnnnnnnnnnnnnnnnnnnnnnnnnnnnnnnnnnnnnnnnnnnnnnnnnnnnnnnnnnnnnnnnnnnnnnnnnnnnnnnnnnnnnnnnnnnnnnnnnnnnnnnnnnnnnnnnnnnnnnnnnnnnnnnnnnnnnnnnnnnnnnnnnnnnnnnnnnnnnnnnnnnnnnnnnnnnnnnnnnnnnnnnnnnnnnnnnnnnnnnnnnnnnnnnnnnnnnnnnnnnnnnnnnnnnnnnnnnnnnnnnnnnnnnnnnnnnnnnnnnnnnnnnnnnnnnnnnnnnnnnnnnnnnnnnnnnnnnnnnnnnnnnnnnnnnnnnnnnnnnnnnnnnnnnnnnnnnnnnnnnnnnnnnnnnnnnnnnnnnnnnnnnnnnnnnnnnnnnnnnnnnnnnnnnnnnnnnnnnnnnnnnnnnnnnnnnnnnnnnnnnnnnnnnnnnnnnnnnnnnnnnnnnnnnnnnnnnnnnnnnnnnnnnnnnnnnnnnnnnnnnnnnnnnnnnnnnnnnnnnnnnnnnnnnnnnnnnnnnnnnnnnnnnnnnnnnnnnnnnnnnnnnnnnnnnnnnnnnnnnnnnnnnnnnnnnnnnnnnnnnnnnnnnnnnnnnnnnnnnnnnnnnnnnnnnnnnnnnnnnnnnnnnnnnnnnnnnnnnnnnnnnnnnnnnnnnnnnnnnnnnnnnnnnnnnnnnnnnnnnnnnnnnnnnnnnnnnnnnnnnnnnnnnnnnnnnnnnnnnnnnnnnnnnnnnnnnnnnnnnnnnnnnnnnnnnnnnnnnnnnnnnnnnnnnnnnnnnnnnnnnnnnnnnnnnnnnnnnnnnnnnnnnnnnnnnnnnnnnnnnnnnnnnnnnnnnnnnnnnnnnnnnnnnnnnnnnnnnnnnnnnnnnnnnnnnnnnnnnnnnnnnnnnnnnnnnnnnnnnnnnnnnnnnnnnnnnnnnnnnnnnnnnnnnnnnnnnnnnnnnnnnnnnnnnnnnnnnnnnnnnnnnnnnnnnnnnnnnnnnnnnnnnnnnnnnnnnnnnnnnnnnnnnnnnnnnnnnnnnnnnnnnnnnnnnnnnnnnnnnnnnnnnnnnnnnnnnnnnnnnnnnnnnnnnnnnnnnnnnnnnnnnnnnnnnnnnnnnnnnnnnnnnnnnnnnnnnnnnnnnnnnnnnnnnnnnnnnnnnnnnnnnnnnnnnnnnnnnnnnnnnnnnnnnnnnnnnnnnnnnnnnnnnnnnnnnnnnnnnnnnnnnnnnnnnnnnnnnnnnnnnnnnnnnnnnnnnnnnnnnnnnnnnnnnnnnnnnnnnnnnnnnnnnnnnnnnnnnnnnnnnnnnnnnnnnnnnnnnnnnnnnnnnnnnnnnnnnnnnnnnnnnnnnnnnnnnnnnnnnnnnnnnnnnnnnnnnnnnnnnnnnnnnnnnnnnnnnnnnnnnnnnnnnnnnnnnnnnnnnnnnnnnnnnnnnnnnnnnnnnnnnnnnnnnnnnnnnnnnnnnnnnnnnnnnnnnnnnnnnnnnnnnnnnnnnnnnnnnnnnnnnnnnnnnnnnnnnnnnnnnnnnnnnnnnnnnnnnnnnnnnnnnnnnnnnnnnnnnnnnnnnnnnnnnnnnnnnnnnnnnnnnnnnnnnnnnnnnnnnnnnnnnnnnnnnnnnnnnnnnnnnnnnnnnnnnnnnnnnnnnnnnnnnnnnnnnnnnnnnnnnnnnnnnnnnnnnnnnnnnnnnnnnnnnnnnnnnnnnnnnnnnnnnnnnnnnnnnnnnnnnnnnnnnnnnnnnnnnnnnnnnnnnnnnnnnnnnnnnnnnnnnnnnnnnnnnnnnnnnnnnnnnnnnnnnnnnnnnnnnnnnnnnnnnnnnnnnnnnnnnnnnnnnnnnnnnnnnnnnnnnnnnnnnnnnnnnnnnnnnnnnnnnnnnnnnnnnnnnnnnnnnnnnnnnnnnnnnnnnnnnnnnnnnnnnnnnnnnnnnnnnnnnnnnnnnnnnnnnnnnnnnnnnnnnnnnnnnnnnnnnnnnnnnnnnnnnnnnnnnnnnnnnnnnnnnnnnnnnnnnnnnnnnnnnnnnnnnnnnnnnnnnnnnnnnnnnnnnnnnnnnnnnnnnnnnnnnnnnnnnnnnnnnnnnnnnnnnnnnnnnnnnnnnnnnnnnnnnnnnnnnnnnnnnnnnnnnnnnnnnnnnnnnnnnnnnnnnnnnnnnnnnnnnnnnnnnnnnnnnnnnnnnnnnnnnnnnnnnnnnnnnnnnnnnnnnnnnnnnnnnnnnnnnnnnnnnnnnnnnnnnnnnnnnnnnnnnnnnnnnnnnnnnnnnnnnnnnnnnnnnnnnnnnnnnnnnnnnnnnnnnnnnnnnnnnnnnnnnnnnnnnnnnnnnnnnnnnnnnnnnnnnnnnnnnnnnnnnnnnnnnnnnnnnnnnnnnnnnnnnnnnnnnnnnnnnnnnnnnnnnnnnnnnnnnnnnnnnnnnnnnnnnnnnnnnnnnnnnnnnnnnnnnnnnnnnnnnnnnnnnnnnnnnnnnnnnnnnnnnnnnnnnnnnnnnnnnnnnnnnnnnnnnnnnnnnnnnnnnnnnnnnnnnnnnnnnnnnnnnnnnnnnnnnnnnnnnnnnnnnnnnnnnnnnnnnnnnnnnnnnnnnnnnnnnnnnnnnnnnnnnnnnnnnnnnnnnnnnnnnnnnnnnnnnnnnnnnnnnnnnnnnnnnnnnnnnnnnnnnnnnnnnnnnnnnnnnnnnnnnnnnnnnnnnnnnnnnnnnnnnnnnnnnnnnnnnnnnnnnnnnnnnnnnnnnnnnnnnnnnnnnnnnnnnnnnnnnnnnnnnnnnnnnnnnnnnnnnnnnnnnnnnnnnnnnnnnnnnnnnnnnnnnnnnnnnnnnnnnnnnnnnnnnnnnnnnnnnnnnnnnnnnnnnnnnnnnnnnnnnnnnnnnnnnnnnnnnnnnnnnnnnnnnnnnnnnnnnnnnnnnnnnnnnnnnnnnnnnnnnnnnnnnnnnnnnnnnnnnnnnnnnnnnnnnnnnnnnnnnnnnnnnnnnnnnnnnnnnnnnnnnnnnnnnnnnnnnnnnnnnnnnnnnnnnnnnnnnnnnnnnnnnnnnnnnnnnnnnnnnnnnnnnnnnnnnnnnnnnnnnnnnnnnnnnnnnnnnnnnnnnnnnnnnnnnnnnnnnnnnnnnnnnnnnnnnnnnnnnnnnnnnnnnnnnnnnnnnnnnnnnnnnnnnnnnnnnnnnnnnnnnnnnnnnnnnnnnnnnnnnnnnnnnnnnnnnnnnnnnnnnnnnnnnnnnnnnnnnnnnnnnnnnnnnnnnnnnnnnnnnnnnnnnnnnnnnnnnnnnnnnnnnnnnnnnnnnnnnnnnnnnnnnnnnnnnnnnnnnnnnnnnnnnnnnnnnnnnnnnnnnnnnnnnnnnnnnnnnnnnnnnnnnnnnnnnnnnnnnnnnnnnnnnnnnnnnnnnnnnnnnnnnnnnnnnnnnnnnnnnnnnnnnnnnnnnnnnnnnnnnnnnnnnnnnnnnnnnnnnnnnnnnnnnnnnnnnnnnnnnnnnnnnnnnnnnnnnnnnnnnnnnnnnnnnnnnnnnnnnnnnnnnnnnnnnnnnnnnnnnnnnnnnnnnnnnnnnnnnnnnnnnnnnnnnnnnnnnnnnnnnnnnnnnnnnnnnnnnnnnnnnnnnnnnnnnnnnnnnnnnnnnnnnnnnnnnnnnnnnnnnnnnnnnnnnnnnnnnnnnnnnnnnnnnnnnnnnnnnnnnnnnnnnnnnnnnnnnnnnnnnnnnnnnnnnnnnnnnnnnnnnnnnnnnnnnnnnnnnnnnnnnnnnnnnnnnnnnnnnnnnnnnnnnnnnnnnnnnnnnnnnnnnnnnnnnnnnnnnnnnnnnnnnnnnnnnnnnnnnnnnnnnnnnnnnnnnnnnnnnnnnnnnnnnnnnnnnnnnnnnnnnnnnnnnnnnnnnnnnnnnnnnnnnnnnnnnnnnnnnnnnnnnnnnnnnnnnnnnnnnnnnnnnnnnnnnnnnnnnnnnnnnnnnnnnnnnnnnnnnnnnnnnnnnnnnnnnnnnnnnnnnnnnnnnnnnnnnnnnnnnnnnnnnnnnnnnnnnnnnnnnnnnnnnnnnnnnnnnnnnnnnnnnnnnnnnnnnnnnnnnnnnnnnnnnnnnnnnnnnnnnnnnnnnnnnnnnnnnnnnnnnnnnnnnnnnnnnnnnnnnnnnnnnnnnnnnnnnnnnnnnnnnnnnnnnnnnnnnnnnnnnnnnnnnnnnnnnnnnnnnnnnnnnnnnnnnnnnnnnnnnnnnnnnnnnnnnnnnnnnnnnnnnnnnnnnnnnnnnnnnnnnnnnnnnnnnnnnnnnnnnnnnnnnnnnnnnnnnnnnnnnnnnnnnnnnnnnnnnnnnnnnnnnnnnnnnnnnnnnnnnnnnnnnnnnnnnnnnnnnnnnnnnnnnnnnnnnnnnnnnnnnnnnnnnnnnnnnnnnnnnnnnnnnnnnnnnnnnnnnnnnnnnnnnnnnnnnnnnnnnnnnnnnnnnnnnnnnnnnnnnnnnnnnnnnnnnnnnnnnnnnnnnnnnnnnnnnnnnnnnnnnnnnnnnnnnnnnnnnnnnnnnnnnnnnnnnnnnnnnnnnnnnnnnnnnnnnnnnnnnnnnnnnnnnnnnnnnnnnnnnnnnnnnnnnnnnnnnnnnnnnnnnnnnnnnnnnnnnnnnnnnnnnnnnnnnnnnnnnnnnnnnnnnnnnnnnnnnnnnnnnnnnnnnnnnnnnnnnnnnnnnnnnnnnnnnnnnnnnnnnnnnnnnnnnnnnnnnnnnnnnnnnnnnnnnnnnnnnnnnnnnnnnnnnnnnnnnnnnnnnnnnnnnnnnnnnnnnnnnnnnnnnnnnnnnnnnnnnnnnnnnnnnnnnnnnnnnnnnnnnnnnnnnnnnnnnnnnnnnnnnnnnnnnnnnnnnnnnnnnnnnnnnnnnnnnnnnnnnnnnnnnnnnnnnnnnnnnnnnnnnnnnnnnnnnnnnnnnnnnnnnnnnnnnnnnnnnnnnnnnnnnnnnnnnnnnnnnnnnnnnnnnnnnnnnnnnnnnnnnnnnnnnnnnnnnnnnnnnnnnnnnnnnnnnnnnnnnnnnnnnnnnnnnnnnnnnnnnnnnnnnnnnnnnnnnnnnnnnnnnnnnnnnnnnnnnnnnnnnnnnnnnnnnnnnnnnnnnnnnnnnnnnnnnnnnnnnnnnnnnnnnnnnnnnnnnnnnnnnnnnnnnnnnnnnnnnnnnnnnnnnnnnnnnnnnnnnnnnnnnnnnnnnnnnnnnnnnnnnnnnnnnnnnnnnnnnnnnnnnnnnnnnnnnnnnnnnnnnnnnnnnnnnnnnnnnnnnnnnnnnnnnnnnnnnnnnnnnnnnnnnnnnnnnnnnnnnnnnnnnnnnnnnnnnnnnnnnnnnnnnnnnnnnnnnnnnnnnnnnnnnnnnnnnnnnnnnnnnnnnnnnnnnnnnnnnnnnnnnnnnnnnnnnnnnnnnnnnnnnnnnnnnnnnnnnnnnnnnnnnnnnnnnnnnnnnnnnnnnnnnnnnnnnnnnnnnnnnnnnnnnnnnnnnnnnnnnnnnnnnnnnnnnnnnnnnnnnnnnnnnnnnnnnnnnnnnnnnnnnnnnnnnnnnnnnnnnnnnnnnnnnnnnnnnnnnnnnnnnnnnnnnnnnnnnnnnnnnnnnnnnnnnnnnnnnnnnnnnnnnnnnnnnnnnnnnnnnnnnnnnnnnnnnnnnnnnnnnnnnnnnnnnnnnnnnnnnnnnnnnnnnnnnnnnnnnnnnnnnnnnnnnnnnnnnnnnnnnnnnnnnnnnnnnnnnnnnnnnnnnnnnnnnnnnnnnnnnnnnnnnnnnnnnnnnnnnnnnnnnnnnnnnnnnnnnnnnnnnnnnnnnnnnnnnnnnnnnnnnnnnnnnnnnnnnnnnnnnnnnnnnnnnnnnnnnnnnnnnnnnnnnnnnnnnnnnnnnnnnnnnnnnnnnnnnnnnnnnnnnnnnnnnnnnnnnnnnnnnnnnnnnnnnnnnnnnnnnnnnnnnnnnnnnnnnnnnnnnnnnnnnnnnnnnnnnnnnnnnnnnnnnnnnnnnnnnnnnnnnnnnnnnnnnnnnnnnnnnnnnnnnnnnnnnnnnnnnnnnnnnnnnnnnnnnnnnnnnnnnnnnnnnnnnnnnnnnnnnnnnnnnnnnnnnnnnnnnnnnnnnnnnnnnnnnnnnnnnnnnnnnnnnnnnnnnnnnnnnnnnnnnnnnnnnnnnnnnnnnnnnnnnnnnnnnnnnnnnnnnnnnnnnnnnnnnnnnnnnnnnnnnnnnnnnnnnnnnnnnnnnnnnnnnnnnnnnnnnnnnnnnnnnnnnnnnnnnnnnnnnnnnnnnnnnnnnnnnnnnnnnnnnnnnnnnnnnnnnnnnnnnnnnnnnnnnnnnnnnnnnnnnnnnnnnnnnnnnnnnnnnnnnnnnnnnnnnnnnnnnnnnnnnnnnnnnnnnnnnnnnnnnnnnnnnnnnnnnnnnnnnnnnnnnnnnnnnnnnnnnnnnnnnnnnnnnnnnnnnnnnnnnnnnnnnnnnnnnnnnnnnnnnnnnnnnnnnnnnnnnnnnnnnnnnnnnnnnnnnnnnnnnnnnnnnnnnnnnnnnnnnnnnnnnnnnnnnnnnnnnnnnnnnnnnnnnnnnnnnnnnnnnnnnnnnnnnnnnnnnnnnnnnnnnnnnnnnnnnnnnnnnnnnnnnnnnnnnnnnnnnnnnnnnnnnnnnnnnnnnnnnnnnnnnnnnnnnnnnnnnnnnnnnnnnnnnnnnnnnnnnnnnnnnnnnnnnnnnnnnnnnnnnnnnnnnnnnnnnnnnnnnnnnnnnnnnnnnnnnnnnnnnnnnnnnnnnnnnnnnnnnnnnnnnnnnnnnnnnnnnnnnnnnnnnnnnnnnnnnnnnnnnnnnnnnnnnnnnnnnnnnnnnnnnnnnnnnnnnnnnnnnnnnnnnnnnnnnnnnnnnnnnnnnnnnnnnnnnnnnnnnnnnnnnnnnnnnnnnnnnnnnnnnnnnnnnnnnnnnnnnnnnnnnnnnnnnnnnnnnnnnnnnnnnnnnnnnnnnnnnnnnnnnnnnnnnnnnnnnnnnnnnnnnnnnnnnnnnnnnnnnnnnnnnnnnnnnnnnnnnnnnnnnnnnnnnnnnnnnnnnnnnnnnnnnnnnnnnnnnnnnnnnnnnnnnnnnnnnnnnnnnnnnnnnnnnnnnnnnnnnnnnnnnnnnnnnnnnnnnnnnnnnnnnnnnnnnnnnnnnnnnnnnnnnnnnnnnnnnnnnnnnnnnnnnnnnnnnnnnnnnnnnnnnnnnnnnnnnnnnnnnnnnnnnnnnnnnnnnnnnnnnnnnnnnnnnnnnnnnnnnnnnnnnnnnnnnnnnnnnnnnnnnnnnnnnnnnnnnnnnnnnnnnnnnnnnnnnnnnnnnnnnnnnnnnnnnnnnnnnnnnnnnnnnnnnnnnnnnnnnnnnnnnnnnnnnnnnnnnnnnnnnnnnnnnnnnnnnnnnnnnnnnnnnnnnnnnnnnnnnnnnnnnnnnnnnnnnnnnnnnnnnnnnnnnnnnnnnnnnnnnnnnnnnnnnnnnnnnnnnnnnnnnnnnnnnnnnnnnnnnnnnnnnnnnnnnnnnnnnnnnnnnnnnnnnnnnnnnnnnnnnnnnnnnnnnnnnnnnnnnnnnnnnnnnnnnnnnnnnnnnnnnnnnnnnnnnnnnnnnnnnnnnnnnnnnnnnnnnnnnnnnnnnnnnnnnnnnnnnnnnnnnnnnnnnnnnnnnnnnnnnnnnnnnnnnnnnnnnnnnnnnnnnnnnnnnnnnnnnnnnnnnnnnnnnnnnnnnnnnnnnnnnnnnnnnnnnnnnnnnnnnnnnnnnnnnnnnnnnnnnnnnnnnnnnnnnnnnnnnnnnnnnnnnnnnnnnnnnnnnnnnnnnnnnnnnnnnnnnnnnnnnnnnnnnnnnnnnnnnnnnnnnnnnnnnnnnnnnnnnnnnnnnnnnnnnnnnnnnnnnnnnnnnnnnnnnnnnnnnnnnnnnnnnnnnnnnnnnnnnnnnnnnnnnnnnnnnnnnnnnnnnnnnnnnnnnnnnnnnnnnnnnnnnnnnnnnnnnnnnnnnnnnnnnnnnnnnnnnnnnnnnnnnnnnnnnnnnnnnnnnnnnnnnnnnnnnnnnnnnnnnnnnnnnnnnnnnnnnnnnnnnnnnnnnnnnnnnnnnnnnnnnnnnnnnnnnnnnnnnnnnnnnnnnnnnnnnnnnnnnnnnnnnnnnnnnnnnnnnnnnnnnnnnnnnnnnnnnnnnnnnnnnnnnnnnnnnnnnnnnnnnnnnnnnnnnnnnnnnnnnnnnnnnnnnnnnnnnnnnnnnnnnnnnnnnnnnnnnnnnnnnnnnnnnnnnnnnnnnnnnnnnnnnnnnnnnnnnnnnnnnnnnnnnnnnnnnnnnnnnnnnnnnnnnnnnnnnnnnnnnnnnnnnnnnnnnnnnnnnnnnnnnnnnnnnnnnnnnnnnnnnnnnnnnnnnnnnnnnnnnnnnnnnnnnnnnnnnnnnnnnnnnnnnnnnnnnnnnnnnnnnnnnnnnnnnnnnnnnnnnnnnnnnnnnnnnnnnnnnnnnnnnnnnnnnnnnnnnnnnnnnnnnnnnnnnnnnnnnnnnnnnnnnnnnnnnnnnnnnnnnnnnnnnnnnnnnnnnnnnnnnnnnnnnnnnnnnnnnnnnnnnnnnnnnnnnnnnnnnnnnnnnnnnnnnnnnnnnnnnnnnnnnnnnnnnnnnnnnnnnnnnnnnnnnnnnnnnnnnnnnnnnnnnnnnnnnnnnnnnnnnnnnnnnnnnnnnnnnnnnnnnnnnnnnnnnnnnnnnnnnnnnnnnnnnnnnnnnnnnnnnnnnnnnnnnnnnnnnnnnnnnnnnnnnnnnnnnnnnnnnnnnnnnnnnnnnnnnnnnnnnnnnnnnnnnnnnnnnnnnnnnnnnnnnnnnnnnnnnnnnnnnnnnnnnnnnnnnnnnnnnnnnnnnnnnnnnnnnnnnnnnnnnnnnnnnnnnnnnnnnnnnnnnnnnnnnnnnnnnnnnnnnnnnnnnnnnnnnnnnnnnnnnnnnnnnnnnnnnnnnnnnnnnnnnnnnnnnnnnnnnnnnnnnnnnnnnnnnnnnnnnnnnnnnnnnnnnnnnnnnnnnnnnnnnnnnnnnnnnnnnnnnnnnnnnnnnnnnnnnnnnnnnnnnnnnnnnnnnnnnnnnnnnnnnnnnnnnnnnnnnnnnnnnnnnnnnnnnnnnnnnnnnnnnnnnnnnnnnnnnnnnnnnnnnnnnnnnnnnnnnnnnnnnnnnnnnnnnnnnnnnnnnnnnnnnnnnnnnnnnnnnnnnnnnnnnnnnnnnnnnnnnnnnnnnnnnnnnnnnnnnnnnnnnnnnnnnnnnnnnnnnnnnnnnnnnnnnnnnnnnnnnnnnnnnnnnnnnnnnnnnnnnnnnnnnnnnnnnnnnnnnnnnnnnnnnnnnnnnnnnnnnnnnnnnnnnnnnnnnnnnnnnnnnnnnnnnnnnnnnnnnnnnnnnnnnnnnnnnnnnnnnnnnnnnnnnnnnnnnnnnnnnnnnnnnnnnnnnnnnnnnnnnnnnnnnnnnnnnnnnnnnnnnnnnnnnnnnnnnnnnnnnnnnnnnnnnnnnnnnnnnnnnnnnnnnnnnnnnnnnnnnnnnnnnnnnnnnnnnnnnnnnnnnnnnnnnnnnnnnnnnnnnnnnnnnnnnnnnnnnnnnnnnnnnnnnnnnnnnnnnnnnnnnnnnnnnnnnnnnnnnnnnnnnnnnnnnnnnnnnnnnnnnnnnnnnnnnnnnnnnnnnnnnnnnnnnnnnnnnnnnnnnnnnnnnnnnnnnnnnnnnnnnnnnnnnnnnnnnnnnnnnnnnnnnnnnnnnnnnnnnnnnnnnnnnnnnnnnnnnnnnnnnnnnnnnnnnnnnnnnnnnnnnnnnnnnnnnnnnnnnnnnnnnnnnnnnnnnnnnnnnnnnnnnnnnnnnnnnnnnnnnnnnnnnnnnnnnnnnnnnnnnnnnnnnnnnnnnnnnnnnnnnnnnnnnnnnnnnnnnnnnnnnnnnnnnnnnnnnnnnnnnnnnnnnnnnnnnnnnnnnnnnnnnnnnnnnnnnnnnnnnnnnnnnnnnnnnnnnnnnnnnnnnnnnnnnnnnnnnnnnnnnnnnnnnnnnnnnnnnnnnnnnnnnnnnnnnnnnnnnnnnnnnnnnnnnnnnnnnnnnnnnnnnnnnnnnnnnnnnnnnnnnnnnnnnnnnnnnnnnnnnnnnnnnnnnnnnnnnnnnnnnnnnnnnnnnnnnnnnnnnnnnnnnnnnnnnnnnnnnnnnnnnnnnnnnnnnnnnnnnnnnnnnnnnnnnnnnnnnnnnnnnnnnnnnnnnnnnnnnnnnnnnnnnnnnnnnnnnnnnnnnnnnnnnnnnnnnnnnnnnnnnnnnnnnnnnnnnnnnnnnnnnnnnnnnnnnnnnnnnnnnnnnnnnnnnnnnnnnnnnnnnnnnnnnnnnnnnnnnnnnnnnnnnnnnnnnnnnnnnnnnnnnnnnnnnnnnnnnnnnnnnnnnnnnnnnnnnnnnnnnnnnnnnnnnnnnnnnnnnnnnnnnnnnnnnnnnnnnnnnnnnnnnnnnnnnnnnnnnnnnnnnnnnnnnnnnnnnnnnnnnnnnnnnnnnnnnnnnnnnnnnnnnnnnnnnnnnnnnnnnnnnnnnnnnnnnnnnnnnnnnnnnnnnnnnnnnnnnnnnnnnnnnnnnnnnnnnnnnnnnnnnnnnnnnnnnnnnnnnnnnnnnnnnnnnnnnnnnnnnnnnnnnnnnnnnnnnnnnnnnnnnnnnnnnnnnnnnnnnnnnnnnnnnnnnnnnnnnnnnnnnnnnnnnnnnnnnnnnnnnnnnnnnnnnnnnnnnnnnnnnnnnnnnnnnnnnnnnnnnnnnnnnnnnnnnnnnnnnnnnnnnnnnnnnnnnnnnnnnnnnnnnnnnnnnnnnnnnnnnnnnnnnnnnnnnnnnnnnnnnnnnnnnnnnnnnnnnnnnnnnnnnnnnnnnnnnnnnnnnnnnnnnnnnnnnnnnnnnnnnnnnnnnnnnnnnnnnnnnnnnnnnnnnnnnnnnnnnnnnnnnnnnnnnnnnnnnnnnnnnnnnnnnnnnnnnnnnnnnnnnnnnnnnnnnnnnnnnnnnnnnnnnnnnnnnnnnnnnnnnnnnnnnnnnnnnnnnnnnnnnnnnnnnnnnnnnnnnnnnnnnnnnnnnnnnnnnnnnnnnnnnnnnnnnnnnnnnnnnnnnnnnnnnnnnnnnnnnnnnnnnnnnnnnnnnnnnnnnnnnnnnnnnnnnnnnnnnnnnnnnnnnnnnnnnnnnnnnnnnnnnnnnnnnnnnnnnnnnnnnnnnnnnnnnnnnnnnnnnnnnnnnnnnnnnnnnnnnnnnnnnnnnnnnnnnnnnnnnnnnnnnnnnnnnnnnnnnnnnnnnnnnnnnnnnnnnnnnnnnnnnnnnnnnnnnnnnnnnnnnnnnnnnnnnnnnnnnnnnnnnnnnnnnnnnnnnnnnnnnnnnnnnnnnnnnnnnnnnnnnnnnnnnnnnnnnnnnnnnnnnnnnnnnnnnnnnnnnnnnnnnnnnnnnnnnnnnnnnnnnnnnnnnnnnnnnnnnnnnnnnnnnnnnnnnnnnnnnnnnnnnnnnnnnnnnnnnnnnnnnnnnnnnnnnnnnnnnnnnnnnnnnnnnnnnnnnnnnnnnnnnnnnnnnnnnnnnnnnnnnnnnnnnnnnnnnnnnnnnnnnnnnnnnnnnnnnnnnnnnnnnnnnnnnnnnnnnnnnnnnnnnnnnnnnnnnnnnnnnnnnnnnnnnnnnnnnnnnnnnnnnnnnnnnnnnnnnnnnnnnnnnnnnnnnnnnnnnnnnnnnnnnnnnnnnnnnnnnnnnnnnnnnnnnnnnnnnnnnnnnnnnnnnnnnnnnnnnnnnnnnnnnnnnnnnnnnnnnnnnnnnnnnnnnnnnnnnnnnnnnnnnnnnnnnnnnnnnnnnnnnnnnnnnnnnnnnnnnnnnnnnnnnnnnnnnnnnnnnnnnnnnnnnnnnnnnnnnnnnnnnnnnnnnnnnnnnnnnnnnnnnnnnnnnnnnnnnnnnnnnnnnnnnnnnnnnnnnnnnnnnnnnnnnnnnnnnnnnnnnnnnnnnnnnnnnnnnnnnnnnnnnnnnnnnnnnnnnnnnnnnnnnnnnnnnnnnnnnnnnnnnnnnnnnnnnnnnnnnnnnnnnnnnnnnnnnnnnnnnnnnnnnnnnnnnnnnnnnnnnnnnnnnnnnnnnnnnnnnnnnnnnnnnnnnnnnnnnnnnnnnnnnnnnnnnnnnnnnnnnnnnnnnnnnnnnnnnnnnnnnnnnnnnnnnnnnnnnnnnnnnnnnnnnnnnnnnnnnnnnnnnnnnnnnnnnnnnnnnnnnnnnnnnnnnnnnnnnnnnnnnnnnnnnnnnnnnnnnnnnnnnnnnnnnnnnnnnnnnnnnnnnnnnnnnnnnnnnnnnnnnnnnnnnnnnnnnnnnnnnnnnnnnnnnnnnnnnnnnnnnnnnnnnnnnnnnnnnnnnnnnnnnnnnnnnnnnnnnnnnnnnnnnnnnnnnnnnnnnnnnnnnnnnnnnnnnnnnnnnnnnnnnnnnnnnnnnnnnnnnnnnnnnnnnnnnnnnnnnnnnnnnnnnnnnnnnnnnnnnnnnnnnnnnnnnnnnnnnnnnnnnnnnnnnnnnnnnnnnnnnnnnnnnnnnnnnnnnnnnnnnnnnnnnnnnnnnnnnnnnnnnnnnnnnnnnnnnnnnnnnnnnnnnnnnnnnnnnnnnnnnnnnnnnnnnnnnnnnnnnnnnnnnnnnnnnnnnnnnnnnnnnnnnnnnnnnnnnnnnnnnnnnnnnnnnnnnnnnnnnnnnnnnnnnnnnnnnnnnnnnnnnnnnnnnnnnnnnnnnnnnnnnnnnnnnnnnnnnnnnnnnnnnnnnnnnnnnnnnnnnnnnnnnnnnnnnnnnnnnnnnnnnnnnnnnnnnnnnnnnnnnnnnnnnnnnnnnnnnnnnnnnnnnnnnnnnnnnnnnnnnnnnnnnnnnnnnnnnnnnnnnnnnnnnnnnnnnnnnnnnnnnnnnnnnnnnnnnnnnnnnnnnnnnnnnnnnnnnnnnnnnnnnnnnnnnnnnnnnnnnnnnnnnnnnnnnnnnnnnnnnnnnnnnnnnnnnnnnnnnnnnnnnnnnnnnnnnnnnnnnnnnnnnnnnnnnnnnnnnnnnnnnnnnnnnnnnnnnnnnnnnnnnnnnnnnnnnnnnnnnnnnnnnnnnnnnnnnnnnnnnnnnnnnnnnnnnnnnnnnnnnnnnnnnnnnnnnnnnnnnnnnnnnnnnnnnnnnnnnnnnnnnnnnnnnnnnnnnnnnnnnnnnnnnnnnnnnnnnnnnnnnnnnnnnnnnnnnnnnnnnnnnnnnnnnnnnnnnnnnnnnnnnnnnnnnnnnnnnnnnnnnnnnnnnnnnnnnnnnnnnnnnnnnnnnnnnnnnnnnnnnnnnnnnnnnnnnnnnnnnnnnnnnnnnnnnnnnnnnnnnnnnnnnnnnnnnnnnnnnnnnnnnnnnnnnnnnnnnnnnnnnnnnnnnnnnnnnnnnnnnnnnnnnnnnnnnnnnnnnnnnnnnnnnnnnnnnnnnnnnnnnnnnnnnnnnnnnnnnnnnnnnnnnnnnnnnnnnnnnnnnnnnnnnnnnnnnnnnnnnnnnnnnnnnnnnnnnnnnnnnnnnnnnnnnnnnnnnnnnnnnnnnnnnnnnnnnnnnnnnnnnnnnnnnnnnnnnnnnnnnnnnnnnnnnnnnnnnnnnnnnnnnnnnnnnnnnnnnnnnnnnnnnnnnnnnnnnnnnnnnnnnnnnnnnnnnnnnnnnnnnnnnnnnnnnnnnnnnnnnnnnnnnnnnnnnnnnnnnnnnnnnnnnnnnnnnnnnnnnnnnnnnnnnnnnnnnnnnnnnnnnnnnnnnnnnnnnnnnnnnnnnnnnnnnnnnnnnnnnnnnnnnnnnnnnnnnnnnnnnnnnnnnnnnnnnnnnnnnnnnnnnnnnnnnnnnnnnnnnnnnnnnnnnnnnnnnnnnnnnnnnnnnnnnnnnnnnnnnnnnnnnnnnnnnnnnnnnnnnnnnnnnnnnnnnnnnnnnnnnnnnnnnnnnnnnnnnnnnnnnnnnnnnnnnnnnnnnnnnnnnnnnnnnnnnnnnnnnnnnnnnnnnnnnnnnnnnnnnnnnnnnnnnnnnnnnnnnnnnnnnnnnnnnnnnnnnnnnnnnnnnnnnnnnnnnnnnnnnnnnnnnnnnnnnnnnnnnnnnnnnnnnnnnnnnnnnnnnnnnnnnnnnnnnnnnnnnnnnnnnnnnnnnnnnnnnnnnnnnnnnnnnnnnnnnnnnnnnnnnnnnnnnnnnnnnnnnnnnnnnnnnnnnnnnnnnnnnnnnnnnnnnnnnnnnnnnnnnnnnnnnnnnnnnnnnnnnnnnnnnnnnnnnnnnnnnnnnnnnnnnnnnnnnnnnnnnnnnnnnnnnnnnnnnnnnnnnnnnnnnnnnnnnnnnnnnnnnnnnnnnnnnnnnnnnnnnnnnnnnnnnnnnnnnnnnnnnnnnnnnnnnnnnnnnnnnnnnnnnnnnnnnnnnnnnnnnnnnnnnnnnnnnnnnnnnnnnnnnnnnnnnnnnnnnnnnnnnnnnnnnnnnnnnnnnnnnnnnnnnnnnnnnnnnnnnnnnnnnnnnnnnnnnnnnnnnnnnnnnnnnnnnnnnnnnnnnnnnnnnnnnnnnnnnnnnnnnnnnnnnnnnnnnnnnnnnnnnnnnnnnnnnnnnnnnnnnnnnnnnnnnnnnnnnnnnnnnnnnnnnnnnnnnnnnnnnnnnnnnnnnnnnnnnnnnnnnnnnnnnnnnnnnnnnnnnnnnnnnnnnnnnnnnnnnnnnnnnnnnnnnnnnnnnnnnnnnnnnnnnnnnnnnnnnnnnnnnnnnnnnnnnnnnnnnnnnnnnnnnnnnnnnnnnnnnnnnnnnnnnnnnnnnnnnnnnnnnnnnnnnnnnnnnnnnnnnnnnnnnnnnnnnnnnnnnnnnnnnnnnnnnnnnnnnnnnnnnnnnnnnnnnnnnnnnnnnnnnnnnnnnnnnnnnnnnnnnnnnnnnnnnnnnnnnnnnnnnnnnnnnnnnnnnnnnnnnnnnnnnnnnnnnnnnnnnnnnnnnnnnnnnnnnnnnnnnnnnnnnnnnnnnnnnnnnnnnnnnnnnnnnnnnnnnnnnnnnnnnnnnnnnnnnnnnnnnnnnnnnnnnnnnnnnnnnnnnnnnnnnnnnnnnnnnnnnnnnnnnnnnnnnnnnnnnnnnnnnnnnnnnnnnnnnnnnnnnnnnnnnnnnnnnnnnnnnnnnnnnnnnnnnnnnnnnnnnnnnnnnnnnnnnnnnnnnnnnnnnnnnnnnnnnnnnnnnnnnnnnnnnnnnnnnnnnnnnnnnnnnnnnnnnnnnnnnnnnnnnnnnnnnnnnnnnnnnnnnnnnnnnnnnnnnnnnnnnnnnnnnnnnnnnnnnnnnnnnnnnnnnnnnnnnnnnnnnnnnnnnnnnnnnnnnnnnnnnnnnnnnnnnnnnnnnnnnnnnnnnnnnnnnnnnnnnnnnnnnnnnnnnnnnnnnnnnnnnnnnnnnnnnnnnnnnnnnnnnnnnnnnnnnnnnnnnnnnnnnnnnnnnnnnnnnnnnnnnnnnnnnnnnnnnnnnnnnnnnnnnnnnnnnnnnnnnnnnnnnnnnnnnnnnnnnnnnnnnnnnnnnnnnnnnnnnnnnnnnnnnnnnnnnnnnnnnnnnnnnnnnnnnnnnnnnnnnnnnnnnnnnnnnnnnnnnnnnnnnnnnnnnnnnnnnnnnnnnnnnnnnnnnnnnnnnnnnnnnnnnnnnnnnnnnnnnnnnnnnnnnnnnnnnnnnnnnnnnnnnnnnnnnnnnnnnnnnnnnnnnnnnnnnnnnnnnnnnnnnnnnnnnnnnnnnnnnnnnnnnnnnnnnnnnnnnnnnnnnnnnnnnnnnnnnnnnnnnnnnnnnnnnnnnnnnnnnnnnnnnnnnnnnnnnnnnnnnnnnnnnnnnnnnnnnnnnnnnnnnnnnnnnnnnnnnnnnnnnnnnnnnnnnnnnnnnnnnnnnnnnnnnnnnnnnnnnnnnnnnnnnnnnnnnnnnnnnnnnnnnnnnnnnnnnnnnnnnnnnnnnnnnnnnnnnnnnnnnnnnnnnnnnnnnnnnnnnnnnnnnnnnnnnnnnnnnnnnnnnnnnnnnnnnnnnnnnnnnnnnnnnnnnnnnnnnnnnnnnnnnnnnnnnnnnnnnnnnnnnnnnnnnnnnnnnnnnnnnnnnnnnnnnnnnnnnnnnnnnnnnnnnnnnnnnnnnnnnnnnnnnnnnnnnnnnnnnnnnnnnnnnnnnnnnnnnnnnnnnnnnnnnnnnnnnnnnnnnnnnnnnnnnnnnnnnnnnnnnnnnnnnnnnnnnnnnnnnnnnnnnnnnnnnnnnnnnnnnnnnnnnnnnnnnnnnnnnnnnnnnnnnnnnnnnnnnnnnnnnnnnnnnnnnnnnnnnnnnnnnnnnnnnnnnnnnnnnnnnnnnnnnnnnnnnnnnnnnnnnnnnnnnnnnnnnnnnnnnnnnnnnnnnnnnnnnnnnnnnnnnnnnnnnnnnnnnnnnnnnnnnnnnnnnnnnnnnnnnnnnnnnnnnnnnnnnnnnnnnnnnnnnnnnnnnnnnnnnnnnnnnnnnnnnnnnnnnnnnnnnnnnnnnnnnnnnnnnnnnnnnnnnnnnnnnnnnnnnnnnnnnnnnnnnnnnnnnnnnnnnnnnnnnnnnnnnnnnnnnnnnnnnnnnnnnnnnnnnnnnnnnnnnnnnnnnnnnnnnnnnnnnnnnnnnnnnnnnnnnnnnnnnnnnnnnnnnnnnnnnnnnnnnnnnnnnnnnnnnnnnnnnnnnnnnnnnnnnnnnnnnnnnnnnnnnnnnnnnnnnnnnnnnnnnnnnnnnnnnnnnnnnnnnnnnnnnnnnnnnnnnnnnnnnnnnnnnnnnnnnnnnnnnnnnnnnnnnnnnnnnnnnnnnnnnnnnnnnnnnnnnnnnnnnnnnnnnnnnnnnnnnnnnnnnnnnnnnnnnnnnnnnnnnnnnnnnnnnnnnnnnnnnnnnnnnnnnnnnnnnnnnnnnnnnnnnnnnnnnnnnnnnnnnnnnnnnnnnnnnnnnnnnnnnnnnnnnnnnnnnnnnnnnnnnnnnnnnnnnnnnnnnnnnnnnnnnnnnnnnnnnnnnnnnnnnnnnnnnnnnnnnnnnnnnnnnnnnnnnnnnnnnnnnnnnnnnnnnnnnnnnnnnnnnnnnnnnnnnnnnnnnnnnnnnnnnnnnnnnnnnnnnnnnnnnnnnnnnnnnnnnnnnnnnnnnnnnnnnnnnnnnnnnnnnnnnnnnnnnnnnnnnnnnnnnnnnnnnnnnnnnnnnnnnnnnnnnnnnnnnnnnnnnnnnnnnnnnnnnnnnnnnnnnnnnnnnnnnnnnnnnnnnnnnnnnnnnnnnnnnnnnnnnnnnnnnnnnnnnnnnnnnnnnnnnnnnnnnnnnnnnnnnnnnnnnnnnnnnnnnnnnnnnnnnnnnnnnnnnnnnnnnnnnnnnnnnnnnnnnnnnnnnnnnnnnnnnnnnnnnnnnnnnnnnnnnnnnnnnnnnnnnnnnnnnnnnnnnnnnnnnnnnnnnnnnnnnnnnnnnnnnnnnnnnnnnnnnnnnnnnnnnnnnnnnnnnnnnnnnnnnnnnnnnnnnnnnnnnnnnnnnnnnnnnnnnnnnnnnnnnnnnnnnnnnnnnnnnnnnnnnnnnnnnnnnnnnnnnnnnnnnnnnnnnnnnnnnnnnnnnnnnnnnnnnnnnnnnnnnnnnnnnnnnnnnnnnnnnnnnnnnnnnnnnnnnnnnnnnnnnnnnnnnnnnnnnnnnnnnnnnnnnnnnnnnnnnnnnnnnnnnnnnnnnnnnnnnnnnnnnnnnnnnnnnnnnnnnnnnnnnnnnnnnnnnnnnnnnnnnnnnnnnnnnnnnnnnnnnnnnnnnnnnnnnnnnnnnnnnnnnnnnnnnnnnnnnnnnnnnnnnnnnnnnnnnnnnnnnnnnnnnnnnnnnnnnnnnnnnnnnnnnnnnnnnnnnnnnnnnnnnnnnnnnnnnnnnnnnnnnnnnnnnnnnnnnnnnnnnnnnnnnnnnnnnnnnnnnnnnnnnnnnnnnnnnnnnnnnnnnnnnnnnnnnnnnnnnnnnnnnnnnnnnnnnnnnnnnnnnnnnnnnnnnnnnnnnnnnnnnnnnnnnnnnnnnnnnnnnnnnnnnnnnnnnnnnnnnnnnnnnnnnnnnnnnnnnnnnnnnnnnnnnnnnnnnnnnnnnnnnnnnnnnnnnnnnnnnnnnnnnnnnnnnnnnnnnnnnnnnnnnnnnnnnnnnnnnnnnnnnnnnnnnnnnnnnnnnnnnnnnnnnnnnnnnnnnnnnnnnnnnnnnnnnnnnnnnnnnnnnnnnnnnnnnnnnnnnnnnnnnnnnnnnnnnnnnnnnnnnnnnnnnnnnnnnnnnnnnnnnnnnnnnnnnnnnnnnnnnnnnnnnnnnnnnnnnnnnnnnnnnnnnnnnnnnnnnnnnnnnnnnnnnnnnnnnnnnnnnnnnnnnnnnnnnnnnnnnnnnnnnnnnnnnnnnnnnnnnnnnnnnnnnnnnnnnnnnnnnnnnnnnnnnnnnnnnnnnnnnnnnnnnnnnnnnnnnnnnnnnnnnnnnnnnnnnnnnnnnnnnnnnnnnnnnnnnnnnnnnnnnnnnnnnnnnnnnnnnnnnnnnnnnnnnnnnnnnnnnnnnnnnnnnnnnnnnnnnnnnnnnnnnnnnnnnnnnnnnnnnnnnnnnnnnnnnnnnnnnnnnnnnnnnnnnnnnnnnnnnnnnnnnnnnnnnnnnnnnnnnnnnnnnnnnnnnnnnnnnnnnnnnnnnnnnnnnnnnnnnnnnnnnnnnnnnnnnnnnnnnnnnnnnnnnnnnnnnnnnnnnnnnnnnnnnnnnnnnnnnnnnnnnnnnnnnnnnnnnnnnnnnnnnnnnnnnnnnnnnnnnnnnnnnnnnnnnnnnnnnnnnnnnnnnnnnnnnnnnnnnnnnnnnnnnnnnnnnnnnnnnnnnnnnnnnnnnnnnnnnnnnnnnnnnnnnnnnnnnnnnnnnnnnnnnnnnnnnnnnnnnnnnnnnnnnnnnnnnnnnnnnnnnnnnnnnnnnnnnnnnnnnnnnnnnnnnnnnnnnnnnnnnnnnnnnnnnnnnnnnnnnnnnnnnnnnnnnnnnnnnnnnnnnnnnnnnnnnnnnnnnnnnnnnnnnnnnnnnnnnnnnnnnnnnnnnnnnnnnnnnnnnnnnnnnnnnnnnnnnnnnnnnnnnnnnnnnnnnnnnnnnnnnnnnnnnnnnnnnnnnnnnnnnnnnnnnnnnnnnnnnnnnnnnnnnnnnnnnnnnnnnnnnnnnnnnnnnnnnnnnnnnnnnnnnnnnnnnnnnnnnnnnnnnnnnnnnnnnnnnnnnnnnnnnnnnnnnnnnnnnnnnnnnnnnnnnnnnnnnnnnnnnnnnnnnnnnnnnnnnnnnnnnnnnnnnnnnnnnnnnnnnnnnnnnnnnnnnnnnnnnnnnnnnnnnnnnnnnnnnnnnnnnnnnnnnnnnnnnnnnnnnnnnnnnnnnnnnnnnnnnnnnnnnnnnnnnnnnnnnnnnnnnnnnnnnnnnnnnnnnnnnnnnnnnnnnnnnnnnnnnnnnnnnnnnnnnnnnnnnnnnnnnnnnnnnnnnnnnnnnnnnnnnnnnnnnnnnnnnnnnnnnnnnnnnnnnnnnnnnnnnnnnnnnnnnnnnnnnnnnnnnnnnnnnnnnnnnnnnnnnnnnnnnnnnnnnnnnnnnnnnnnnnnnnnnnnnnnnnnnnnnnnnnnnnnnnnnnnnnnnnnnnnnnnnnnnnnnnnnnnnnnnnnnnnnnnnnnnnnnnnnnnnnnnnnnnnnnnnnnnnnnnnnnnnnnnnnnnnnnnnnnnnnnnnnnnnnnnnnnnnnnnnnnnnnnnnnnnnnnnnnnnnnnnnnnnnnnnnnnnnnnnnnnnnnnnnnnnnnnnnnnnnnnnnnnnnnnnnnnnnnnnnnnnnnnnnnnnnnnnnnnnnnnnnnnnnnnnnnnnnnnnnnnnnnnnnnnnnnnnnnnnnnnnnnnnnnnnnnnnnnnnnnnnnnnnnnnnnnnnnnnnnnnnnnnnnnnnnnnnnnnnnnnnnnnnnnnnnnnnnnnnnnnnnnnnnnnnnnnnnnnnnnnnnnnnnnnnnnnnnnnnnnnnnnnnnnnnnnnnnnnnnnnnnnnnnnnnnnnnnnnnnnnnnnnnnnnnnnnnnnnnnnnnnnnnnnnnnnnnnnnnnnnnnnnnnnnnnnnnnnnnnnnnnnnnnnnnnnnnnnnnnnnnnnnnnnnnnnnnnnnnnnnnnnnnnnnnnnnnnnnnnnnnnnnnnnnnnnnnnnnnnnnnnnnnnnnnnnnnnnnnnnnnnnnnnnnnnnnnnnnnnnnnnnnnnnnnnnnnnnnnnnnnnnnnnnnnnnnnnnnnnnnnnnnnnnnnnnnnnnnnnnnnnnnnnnnnnnnnnnnnnnnnnnnnnnnnnnnnnnnnnnnnnnnnnnnnnnnnnnnnnnnnnnnnnnnnnnnnnnnnnnnnnnnnnnnnnnnnnnnnnnnnnnnnnnnnnnnnnnnnnnnnnnnnnnnnnnnnnnnnnnnnnnnnnnnnnnnnnnnnnnnnnnnnnnnnnnnnnnnnnnnnnnnnnnnnnnnnnnnnnnnnnnnnnnnnnnnnnnnnnnnnnnnnnnnnnnnnnnnnnnnnnnnnnnnnnnnnnnnnnnnnnnnnnnnnnnnnnnnnnnnnnnnnnnnnnnnnnnnnnnnnnnnnnnnnnnnnnnnnnnnnnnnnnnnnnnnnnnnnnnnnnnnnnnnnnnnnnnnnnnnnnnnnnnnnnnnnnnnnnnnnnnnnnnnnnnnnnnnnnnnnnnnnnnnnnnnnnnnnnnnnnnnnnnnnnnnnnnnnnnnnnnnnnnnnnnnnnnnnnnnnnnnnnnnnnnnnnnnnnnnnnnnnnnnnnnnnnnnnnnnnnnnnnnnnnnnnnnnnnnnnnnnnnnnnnnnnnnnnnnnnnnnnnnnnnnnnnnnnnnnnnnnnnnnnnnnnnnnnnnnnnnnnnnnnnnnnnnnnnnnnnnnnnnnnnnnnnnnnnnnnnnnnnnnnnnnnnnnnnnnnnnnnnnnnnnnnnnnnnnnnnnnnnnnnnnnnnnnnnnnnnnnnnnnnnnnnnnnnnnnnnnnnnnnnnnnnnnnnnnnnnnnnnnnnnnnnnnnnnnnnnnnnnnnnnnnnnnnnnnnnnnnnnnnnnnnnnnnnnnnnnnnnnnnnnnnnnnnnnnnnnnnnnnnnnnnnnnnnnnnnnnnnnnnnnnnnnnnnnnnnnnnnnnnnnnnnnnnnnnnnnnnnnnnnnnnnnnnnnnnnnnnnnnnnnnnnnnnnnnnnnnnnnnnnnnnnnnnnnnnnnnnnnnnnnnnnnnnnnnnnnnnnnnnnnnnnnnnnnnnnnnnnnnnnnnnnnnnnnnnnnnnnnnnnnnnnnnnnnnnnnnnnnnnnnnnnnnnnnnnnnnnnnnnnnnnnnnnnnnnnnnnnnnnnnnnnnnnnnnnnnnnnnnnnnnnnnnnnnnnnnnnnnnnnnnnnnnnnnnnnnnnnnnnnnnnnnnnnnnnnnnnnnnnnnnnnnnnnnnnnnnnnnnnnnnnnnnnnnnnnnnnnnnnnnnnnnnnnnnnnnnnnnnnnnnnnnnnnnnnnnnnnnnnnnnnnnnnnnnnnnnnnnnnnnnnnnnnnnnnnnnnnnnnnnnnnnnnnnnnnnnnnnnnnnnnnnnnnnnnnnnnnnnnnnnnnnnnnnnnnnnnnnnnnnnnnnnnnnnnnnnnnnnnnnnnnnnnnnnnnnnnnnnnnnnnnnnnnnnnnnnnnnnnnnnnnnnnnnnnnnnnnnnnnnnnnnnnnnnnnnnnnnnnnnnnnnnnnnnnnnnnnnnnnnnnnnnnnnnnnnnnnnnnnnnnnnnnnnnnnnnnnnnnnnnnnnnnnnnnnnnnnnnnnnnnnnnnnnnnnnnnnnnnnnnnnnnnnnnnnnnnnnnnnnnnnnnnnnnnnnnnnnnnnnnnnnnnnnnnnnnnnnnnnnnnnnnnnnnnnnnnnnnnnnnnnnnnnnnnnnnnnnnnnnnnnnnnnnnnnnnnnnnnnnnnnnnnnnnnnnnnnnnnnnnnnnnnnnnnnnnnnnnnnnnnnnnnnnnnnnnnnnnnnnnnnnnnnnnnnnnnnnnnnnnnnnnnnnnnnnnnnnnnnnnnnnnnnnnnnnnnnnnnnnnnnnnnnnnnnnnnnnnnnnnnnnnnnnnnnnnnnnnnnnnnnnnnnnnnnnnnnnnnnnnnnnnnnnnnnnnnnnnnnnnnnnnnnnnnnnnnnnnnnnnnnnnnnnnnnnnnnnnnnnnnnnnnnnnnnnnnnnnnnnnnnnnnnnnnnnnnnnnnnnnnnnnnnnnnnnnnnnnnnnnnnnnnnnnnnnnnnnnnnnnnnnnnnnnnnnnnnnnnnnnnnnnnnnnnnnnnnnnnnnnnnnnnnnnnnnnnnnnnnnnnnnnnnnnnnnnnnnnnnnnnnnnnnnnnnnnnnnnnnnnnnnnnnnnnnnnnnnnnnnnnnnnnnnnnnnnnnnnnnnnnnnnnnnnnnnnnnnnnnnnnnnnnnnnnnnnnnnnnnnnnnnnnnnnnnnnnnnnnnnnnnnnnnnnnnnnnnnnnnnnnnnnnnnnnnnnnnnnnnnnnnnnnnnnnnnnnnnnnnnnnnnnnnnnnnnnnnnnnnnnnnnnnnnnnnnnnnnnnnnnnnnnnnnnnnnnnnnnnnnnnnnnnnnnnnnnnnnnnnnnnnnnnnnnnnnnnnnnnnnnnnnnnnnnnnnnnnnnnnnnnnnnnnnnnnnnnnnnnnnnnnnnnnnnnnnnnnnnnnnnnnnnnnnnnnnnnnnnnnnnnnnnnnnnnnnnnnnnnnnnnnnnnnnnnnnnnnnnnnnnnnnnnnnnnnnnnnnnnnnnnnnnnnnnnnnnnnnnnnnnnnnnnnnnnnnnnnnnnnnnnnnnnnnnnnnnnnnnnnnnnnnnnnnnnnnnnnnnnnnnnnnnnnnnnnnnnnnnnnnnnnnnnnnnnnnnnnnnnnnnnnnnnnnnnnnnnnnnnnnnnnnnnnnnnnnnnnnnnnnnnnnnnnnnnnnnnnnnnnnnnnnnnnnnnnnnnnnnnnnnnnnnnnnnnnnnnnnnnnnnnnnnnnnnnnnnnnnnnnnnnnnnnnnnnnnnnnnnnnnnnnnnnnnnnnnnnnnnnnnnnnnnnnnnnnnnnnnnnnnnnnnnnnnnnnnnnnnnnnnnnnnnnnnnnnnnnnnnnnnnnnnnnnnnnnnnnnnnnnnnnnnnnnnnnnnnnnnnnnnnnnnnnnnnnnnnnnnnnnnnnnnnnnnnnnnnnnnnnnnnnnnnnnnnnnnnnnnnnnnnnnnnnnnnnnnnnnnnnnnnnnnnnnnnnnnnnnnnnnnnnnnnnnnnnnnnnnnnnnnnnnnnnnnnnnnnnnnnnnnnnnnnnnnnnnnnnnnnnnnnnnnnnnnnnnnnnnnnnnnnnnnnnnnnnnnnnnnnnnnnnnnnnnnnnnnnnnnnnnnnnnnnnnnnnnnnnnnnnnnnnnnnnnnnnnnnnnnnnnnnnnnnnnnnnnnnnnnnnnnnnnnnnnnnnnnnnnnnnnnnnnnnnnnnnnnnnnnnnnnnnnnnnnnnnnnnnnnnnnnnnnnnnnnnnnnnnnnnnnnnnnnnnnnnnnnnnnnnnnnnnnnnnnnnnnnnnnnnnnnnnnnnnnnnnnnnnnnnnnnnnnnnnnnnnnnnnnnnnnnnnnnnnnnnnnnnnnnnnnnnnnnnnnnnnnnnnnnnnnnnnnnnnnnnnnnnnnnnnnnnnnnnnnnnnnnnnnnnnnnnnnnnnnnnnnnnnnnnnnnnnnnnnnnnnnnnnnnnnnnnnnnnnnnnnnnnnnnnnnnnnnnnnnnnnnnnnnnnnnnnnnnnnnnnnnnnnnnnnnnnnnnnnnnnnnnnnnnnnnnnnnnnnnnnnnnnnnnnnnnnnnnnnnnnnnnnnnnnnnnnnnnnnnnnnnnnnnnnnnnnnnnnnnnnnnnnnnnnnnnnnnnnnnnnnnnnnnnnnnnnnnnnnnnnnnnnnnnnnnnnnnnnnnnnnnnnnnnnnnnnnnnnnnnnnnnnnnnnnnnnnnnnnnnnnnnnnnnnnnnnnnnnnnnnnnnnnnnnnnnnnnnnnnnnnnnnnnnnnnnnnnnnnnnnnnnnnnnnnnnnnnnnnnnnnnnnnnnnnnnnnnnnnnnnnnnnnnnnnnnnnnnnnnnnnnnnnnnnnnnnnnnnnnnnnnnnnnnnnnnnnnnnnnnnnnnnnnnnnnnnnnnnnnnnnnnnnnnnnnnnnnnnnnnnnnnnnnnnnnnnnnnnnnnnnnnnnnnnnnnnnnnnnnnnnnnnnnnnnnnnnnnnnnnnnnnnnnnnnnnnnnnnnnnnnnnnnnnnnnnnnnnnnnnnnnnnnnnnnnnnnnnnnnnnnnnnnnnnnnnnnnnnnnnnnnnnnnnnnnnnnnnnnnnnnnnnnnnnnnnnnnnnnnnnnnnnnnnnnnnnnnnnnnnnnnnnnnnnnnnnnnnnnnnnnnnnnnnnnnnnnnnnnnnnnnnnnnnnnnnnnnnnnnnnnnnnnnnnnnnnnnnnnnnnnnnnnnnnnnnnnnnnnnnnnnnnnnnnnnnnnnnnnnnnnnnnnnnnnnnnnnnnnnnnnnnnnnnnnnnnnnnnnnnnnnnnnnnnnnnnnnnnnnnnnnnnnnnnnnnnnnnnnnnnnnnnnnnnnnnnnnnnnnnnnnnnnnnnnnnnnnnnnnnnnnnnnnnnnnnnnnnnnnnnnnnnnnnnnnnnnnnnnnnnnnnnnnnnnnnnnnnnnnnnnnnnnnnnnnnnnnnnnnnnnnnnnnnnnnnnnnnnnnnnnnnnnnnnnnnnnnnnnnnnnnnnnnnnnnnnnnnnnnnnnnnnnnnnnnnnnnnnnnnnnnnnnnnnnnnnnnnnnnnnnnnnnnnnnnnnnnnnnnnnnnnnnnnnnnnnnnnnnnnnnnnnnnnnnnnnnnnnnnnnnnnnnnnnnnnnnnnnnnnnnnnnnnnnnnnnnnnnnnnnnnnnnnnnnnnnnnnnnnnnnnnnnnnnnnnnnnnnnnnnnnnnnnnnnnnnnnnnnnnnnnnnnnnnnnnnnnnnnnnnnnnnnnnnnnnnnnnnnnnnnnnnnnnnnnnnnnnnnnnnnnnnnnnnnnnnnnnnnnnnnnnnnnnnnnnnnnnnnnnnnnnnnnnnnnnnnnnnnnnnnnnnnnnnnnnnnnnnnnnnnnnnnnnnnnnnnnnnnnnnnnnnnnnnnnnnnnnnnnnnnnnnnnnnnnnnnnnnnnnnnnnnnnnnnnnnnnnnnnnnnnnnnnnnnnnnnnnnnnnnnnnnnnnnnnnnnnnnnnnnnnnnnnnnnnnnnnnnnnnnnnnnnnnnnnnnnnnnnnnnnnnnnnnnnnnnnnnnnnnnnnnnnnnnnnnnnnnnnnnnnnnnnnnnnnnnnnnnnnnnnnnnnnnnnnnnnnnnnnnnnnnnnnnnnnnnnnnnnnnnnnnnnnnnnnnnnnnnnnnnnnnnnnnnnnnnnnnnnnnnnnnnnnnnnnnnnnnnnnnnnnnnnnnnnnnnnnnnnnnnnnnnnnnnnnnnnnnnnnnnnnnnnnnnnnnnnnnnnnnnnnnnnnnnnnnnnnnnnnnnnnnnnnnnnnnnnnnnnnnnnnnnnnnnnnnnnnnnnnnnnnnnnnnnnnnnnnnnnnnnnnnnnnnnnnnnnnnnnnnnnnnnnnnnnnnnnnnnnnnnnnnnnnnnnnnnnnnnnnnnnnnnnnnnnnnnnnnnnnnnnnnnnnnnnnnnnnnnnnnnnnnnnnnnnnnnnnnnnnnnnnnnnnnnnnnnnnnnnnnnnnnnnnnnnnnnnnnnnnnnnnnnnnnnnnnnnnnnnnnnnnnnnnnnnnnnnnnnnnnnnnnnnnnnnnnnnnnnnnnnnnnnnnnnnnnnnnnnnnnnnnnnnnnnnnnnnnnnnnnnnnnnnnnnnnnnnnnnnnnnnnnnnnnnnnnnnnnnnnnnnnnnnnnnnnnnnnnnnnnnnnnnnnnnnnnnnnnnnnnnnnnnnnnnnnnnnnnnnnnnnnnnnnnnnnnnnnnnnnnnnnnnnnnnnnnnnnnnnnnnnnnnnnnnnnnnnnnnnnnnnnnnnnnnnnnnnnnnnnnnnnnnnnnnnnnnnnnnnnnnnnnnnnnnnnnnnnnnnnnnnnnnnnnnnnnnnnnnnnnnnnnnnnnnnnnnnnnnnnnnnnnnnnnnnnnnnnnnnnnnnnnnnnnnnnnnnnnnnnnnnnnnnnnnnnnnnnnnnnnnnnnnnnnnnnnnnnnnnnnnnnnnnnnnnnnnnnnnnnnnnnnnnnnnnnnnnnnnnnnnnnnnnnnnnnnnnnnnnnnnnnnnnnnnnnnnnnnnnnnnnnnnnnnnnnnnnnnnnnnnnnnnnnnnnnnnnnnnnnnnnnnnnnnnnnnnnnnnnnnnnnnnnnnnnnnnnnnnnnnnnnnnnnnnnnnnnnnnnnnnnnnnnnnnnnnnnnnnnnnnnnnnnnnnnnnnnnnnnnnnnnnnnnnnnnnnnnnnnnnnnnnnnnnnnnnnnnnnnnnnnnnnnnnnnnnnnnnnnnnnnnnnnnnnnnnnnnnnnnnnnnnnnnnnnnnnnnnnnnnnnnnnnnnnnnnnnnnnnnnnnnnnnnnnnnnnnnnnnnnnnnnnnnnnnnnnnnnnnnnnnnnnnnnnnnnnnnnnnnnnnnnnnnnnnnnnnnnnnnnnnnnnnnnnnnnnnnnnnnnnnnnnnnnnnnnnnnnnnnnnnnnnnnnnnnnnnnnnnnnnnnnnnnnnnnnnnnnnnnnnnnnnnnnnnnnnnnnnnnnnnnnnnnnnnnnnnnnnnnnnnnnnnnnnnnnnnnnnnnnnnnnnnnnnnnnnnnnnnnnnnnnnnnnnnnnnnnnnnnnnnnnnnnnnnnnnnnnnnnnnnnnnnnnnnnnnnnnnnnnnnnnnnnnnnnnnnnnnnnnnnnnnnnnnnnnnnnnnnnnnnnnnnnnnnnnnnnnnnnnnnnnnnnnnnnnnnnnnnnnnnnnnnnnnnnnnnnnnnnnnnnnnnnnnnnnnnnnnnnnnnnnnnnnnnnnnnnnnnnnnnnnnnnnnnnnnnnnnnnnnnnnnnnnnnnnnnnnnnnnnnnnnnnnnnnnnnnnnnnnnnnnnnnnnnnnnnnnnnnnnnnnnnnnnnnnnnnnnnnnnnnnnnnnnnnnnnnnnnnnnnnnnnnnnnnnnnnnnnnnnnnnnnnnnnnnnnnnnnnnnnnnnnnnnnnnnnnnnnnnnnnnnnnnnnnnnnnnnnnnnnnnnnnnnnnnnnnnnnnnnnnnnnnnnnnnnnnnnnnnnnnnnnnnnnnnnnnnnnnnnnnnnnnnnnnnnnnnnnnnnnnnnnnnnnnnnnnnnnnnnnnnnnnnnnnnnnnnnnnnnnnnnnnnnnnnnnnnnnnnnnnnnnnnnnnnnnnnnnnnnnnnnnnnnnnnnnnnnnnnnnnnnnnnnnnnnnnnnnnnnnnnnnnnnnnnnnnnnnnnnnnnnnnnnnnnnnnnnnnnnnnnnnnnnnnnnnnnnnnnnnnnnnnnnnnnnnnnnnnnnnnnnnnnnnnnnnnnnnnnnnnnnnnnnnnnnnnnnnnnnnnnnnnnnnnnnnnnnnnnnnnnnnnnnnnnnnnnnnnnnnnnnnnnnnnnnnnnnnnnnnnnnnnnnnnnnnnnnnnnnnnnnnnnnnnnnnnnnnnnnnnnnnnnnnnnnnnnnnnnnnnnnnnnnnnnnnnnnnnnnnnnnnnnnnnnnnnnnnnnnnnnnnnnnnnnnnnnnnnnnnnnnnnnnnnnnnnnnnnnnnnnnnnnnnnnnnnnnnnnnnnnnnnnnnnnnnnnnnnnnnnnnnnnnnnnnnnnnnnnnnnnnnnnnnnnnnnnnnnnnnnnnnnnnnnnnnnnnnnnnnnnnnnnnnnnnnnnnnnnnnnnnnnnnnnnnnnnnnnnnnnnnnnnnnnnnnnnnnnnnnnnnnnnnnnnnnnnnnnnnnnnnnnnnnnnnnnnnnnnnnnnnnnnnnnnnnnnnnnnnnnnnnnnnnnnnnnnnnnnnnnnnnnnnnnnnnnnnnnnnnnnnnnnnnnnnnnnnnnnnnnnnnnnnnnnnnnnnnnnnnnnnnnnnnnnnnnnnnnnnnnnnnnnnnnnnnnnnnnnnnnnnnnnnnnnnnnnnnnnnnnnnnnnnnnnnnnnnnnnnnnnnnnnnnnnnnnnnnnnnnnnnnnnnnnnnnnnnnnnnnnnnnnnnnnnnnnnnnnnnnnnnnnnnnnnnnnnnnnnnnnnnnnnnnnnnnnnnnnnnnnnnnnnnnnnnnnnnnnnnnnnnnnnnnnnnnnnnnnnnnnnnnnnnnnnnnnnnnnnnnnnnnnnnnnnnnnnnnnnnnnnnnnnnnnnnnnnnnnnnnnnnnnnnnnnnnnnnnnnnnnnnnnnnnnnnnnnnnnnnnnnnnnnnnnnnnnnnnnnnnnnnnnnnnnnnnnnnnnnnnnnnnnnnnnnnnnnnnnnnnnnnnnnnnnnnnnnnnnnnnnnnnnnnnnnnnnnnnnnnnnnnnnnnnnnnnnnnnnnnnnnnnnnnnnnnnnnnnnnnnnnnnnnnnnnnnnnnnnnnnnnnnnnnnnnnnnnnnnnnnnnnnnnnnnnnnnnnnnnnnnnnnnnnnnnnnnnnnnnnnnnnnnnnnnnnnnnnnnnnnnnnnnnnnnnnnnnnnnnnnnnnnnnnnnnnnnnnnnnnnnnnnnnnnnnnnnnnnnnnnnnnnnnnnnnnnnnnnnnnnnnnnnnnnnnnnnnnnnnnnnnnnnnnnnnnnnnnnnnnnnnnnnnnnnnnnnnnnnnnnnnnnnnnnnnnnnnnnnnnnnnnnnnnnnnnnnnnnnnnnnnnnnnnnnnnnnnnnnnnnnnnnnnnnnnnnnnnnnnnnnnnnnnnnnnnnnnnnnnnnnnnnnnnnnnnnnnnnnnnnnnnnnnnnnnnnnnnnnnnnnnnnnnnnnnnnnnnnnnnnnnnnnnnnnnnnnnnnnnnnnnnnnnnnnnnnnnnnnnnnnnnnnnnnnnnnnnnnnnnnnnnnnnnnnnnnnnnnnnnnnnnnnnnnnnnnnnnnnnnnnnnnnnnnnnnnnnnnnnnnnnnnnnnnnnnnnnnnnnnnnnnnnnnnnnnnnnnnnnnnnnnnnnnnnnnnnnnnnnnnnnnnnnnnnnnnnnnnnnnnnnnnnnnnnnnnnnnnnnnnnnnnnnnnnnnnnnnnnnnnnnnnnnnnnnnnnnnnnnnnnnnnnnnnnnnnnnnnnnnnnnnnnnnnnnnnnnnnnnnnnnnnnnnnnnnnnnnnnnnnnnnnnnnnnnnnnnnnnnnnnnnnnnnnnnnnnnnnnnnnnnnnnnnnnnnnnnnnnnnnnnnnnnnnnnnnnnnnnnnnnnnnnnnnnnnnnnnnnnnnnnnnnnnnnnnnnnnnnnnnnnnnnnnnnnnnnnnnnnnnnnnnnnnnnnnnnnnnnnnnnnnnnnnnnnnnnnnnnnnnnnnnnnnnnnnnnnnnnnnnnnnnnnnnnnnnnnnnnnnnnnnnnnnnnnnnnnnnnnnnnnnnnnnnnnnnnnnnnnnnnnnnnnnnnnnnnnnnnnnnnnnnnnnnnnnnnnnnnnnnnnnnnnnnnnnnnnnnnnnnnnnnnnnnnnnnnnnnnnnnnnnnnnnnnnnnnnnnnnnnnnnnnnnnnnnnnnnnnnnnnnnnnnnnnnnnnnnnnnnnnnnnnnnnnnnnnnnnnnnnnnnnnnnnnnnnnnnnnnnnnnnnnnnnnnnnnnnnnnnnnnnnnnnnnnnnnnnnnnnnnnnnnnnnnnnnnnnnnnnnnnnnnnnnnnnnnnnnnnnnnnnnnnnnnnnnnnnnnnnnnnnnnnnnnnnnnnnnnnnnnnnnnnnnnnnnnnnnnnnnnnnnnnnnnnnnnnnnnnnnnnnnnnnnnnnnnnnnnnnnnnnnnnnnnnnnnnnnnnnnnnnnnnnnnnnnnnnnnnnnnnnnnnnnnnnnnnnnnnnnnnnnnnnnnnnnnnnnnnnnnnnnnnnnnnnnnnnnnnnnnnnnnnnnnnnnnnnnnnnnnnnnnnnnnnnnnnnnnnnnnnnnnnnnnnnnnnnnnnnnnnnnnnnnnnnnnnnnnnnnnnnnnnnnnnnnnnnnnnnnnnnnnnnnnnnnnnnnnnnnnnnnnnnnnnnnnnnnnnnnnnnnnnnnnnnnnnnnnnnnnnnnnnnnnnnnnnnnnnnnnnnnnnnnnnnnnnnnnnnnnnnnnnnnnnnnnnnnnnnnnnnnnnnnnnnnnnnnnnnnnnnnnnnnnnnnnnnnnnnnnnnnnnnnnnnnnnnnnnnnnnnnnnnnnnnnnnnnnnnnnnnnnnnnnnnnnnnnnnnnnnnnnnnnnnnnnnnnnnnnnnnnnnnnnnnnnnnnnnnnnnnnnnnnnnnnnnnnnnnnnnnnnnnnnnnnnnnnnnnnnnnnnnnnnnnnnnnnnnnnnnnnnnnnnnnnnnnnnnnnnnnnnnnnnnnnnnnnnnnnnnnnnnnnnnnnnnnnnnnnnnnnnnnnnnnnnnnnnnnnnnnnnnnnnnnnnnnnnnnnnnnnnnnnnnnnnnnnnnnnnnnnnnnnnnnnnnnnnnnnnnnnnnnnnnnnnnnnnnnnnnnnnnnnnnnnnnnnnnnnnnnnnnnnnnnnnnnnnnnnnnnnnnnnnnnnnnnnnnnnnnnnnnnnnnnnnnnnnnnnnnnnnnnnnnnnnnnnnnnnnnnnnnnnnnnnnnnnnnnnnnnnnnnnnnnnnnnnnnnnnnnnnnnnnnnnnnnnnnnnnnnnnnnnnnnnnnnnnnnnnnnnnnnnnnnnnnnnnnnnnnnnnnnnnnnnnnnnnnnnnnnnnnnnnnnnnnnnnnnnnnnnnnnnnnnnnnnnnnnnnnnnnnnnnnnnnnnnnnnnnnnnnnnnnnnnnnnnnnnnnnnnnnnnnnnnnnnnnnnnnnnnnnnnnnnnnnnnnnnnnnnnnnnnnnnnnnnnnnnnnnnnnnnnnnnnnnnnnnnnnnnnnnnnnnnnnnnnnnnnnnnnnnnnnnnnnnnnnnnnnnnnnnnnnnnnnnnnnnnnnnnnnnnnnnnnnnnnnnnnnnnnnnnnnnnnnnnnnnnnnnnnnnnnnnnnnnnnnnnnnnnnnnnnnnnnnnnnnnnnnnnnnnnnnnnnnnnnnnnnnnnnnnnnnnnnnnnnnnnnnnnnnnnnnnnnnnnnnnnnnnnnnnnnnnnnnnnnnnnnnnnnnnnnnnnnnnnnnnnnnnnnnnnnnnnnnnnnnnnnnnnnnnnnnnnnnnnnnnnnnnnnnnnnnnnnnnnnnnnnnnnnnnnnnnnnnnnnnnnnnnnnnnnnnnnnnnnnnnnnnnnnnnnnnnnnnnnnnnnnnnnnnnnnnnnnnnnnnnnnnnnnnnnnnnnnnnnnnnnnnnnnnnnnnnnnnnnnnnnnnnnnnnnnnnnnnnnnnnnnnnnnnnnnnnnnnnnnnnnnnnnnnnnnnnnnnnnnnnnnnnnnnnnnnnnnnnnnnnnnnnnnnnnnnnnnnnnnnnnnnnnnnnnnnnnnnnnnnnnnnnnnnnnnnnnnnnnnnnnnnnnnnnnnnnnnnnnnnnnnnnnnnnnnnnnnnnnnnnnnnnnnnnnnnnnnnnnnnnnnnnnnnnnnnnnnnnnnnnnnnnnnnnnnnnnnnnnnnnnnnnnnnnnnnnnnnnnnnnnnnnnnnnnnnnnnnnnnnnnnnnnnnnnnnnnnnnnnnnnnnnnnnnnnnnnnnnnnnnnnnnnnnnnnnnnnnnnnnnnnnnnnnnnnnnnnnnnnnnnnnnnnnnnnnnnnnnnnnnnnnnnnnnnnnnnnnnnnnnnnnnnnnnnnnnnnnnnnnnnnnnnnnnnnnnnnnnnnnnnnnnnnnnnnnnnnnnnnnnnnnnnnnnnnnnnnnnnnnnnnnnnnnnnnnnnnnnnnnnnnnnnnnnnnnnnnnnnnnnnnnnnnnnnnnnnnnnnnnnnnnnnnnnnnnnnnnnnnnnnnnnnnnnnnnnnnnnnnnnnnnnnnnnnnnnnnnnnnnnnnnnnnnnnnnnnnnnnnnnnnnnnnnnnnnnnnnnnnnnnnnnnnnnnnnnnnnnnnnnnnnnnnnnnnnnnnnnnnnnnnnnnnnnnnnnnnnnnnnnnnnnnnnnnnnnnnnnnnnnnnnnnnnnnnnnnnnnnnnnnnnnnnnnnnnnnnnnnnnnnnnnnnnnnnnnnnnnnnnnnnnnnnnnnnnnnnnnnnnnnnnnnnnnnnnnnnnnnnnnnnnnnnnnnnnnnnnnnnnnnnnnnnnnnnnnnnnnnnnnnnnnnnnnnnnnnnnnnnnnnnnnnnnnnnnnnnnnnnnnnnnnnnnnnnnnnnnnnnnnnnnnnnnnnnnnnnnnnnnnnnnnnnnnnnnnnnnnnnnnnnnnnnnnnnnnnnnnnnnnnnnnnnnnnnnnnnnnnnnnnnnnnnnnnnnnnnnnnnnnnnnnnnnnnnnnnnnnnnnnnnnnnnnnnnnnnnnnnnnnnnnnnnnnnnnnnnnnnnnnnnnnnnnnnnnnnnnnnnnnnnnnnnnnnnnnnnnnnnnnnnnnnnnnnnnnnnnnnnnnnnnnnnnnnnnnnnnnnnnnnnnnnnnnnnnnnnnnnnnnnnnnnnnnnnnnnnnnnnnnnnnnnnnnnnnnnnnnnnnnnnnnnnnnnnnnnnnnnnnnnnnnnnnnnnnnnnnnnnnnnnnnnnnnnnnnnnnnnnnnnnnnnnnnnnnnnnnnnnnnnnnnnnnnnnnnnnnnnnnnnnnnnnnnnnnnnnnnnnnnnnnnnnnnnnnnnnnnnnnnnnnnnnnnnnnnnnnnnnnnnnnnnnnnnnnnnnnnnnnnnnnnnnnnnnnnnnnnnnnnnnnnnnnnnnnnnnnnnnnnnnnnnnnnnnnnnnnnnnnnnnnnnnnnnnnnnnnnnnnnnnnnnnnnnnnnnnnnnnnnnnnnnnnnnnnnnnnnnnnnnnnnnnnnnnnnnnnnnnnnnnnnnnnnnnnnnnnnnnnnnnnnnnnnnnnnnnnnnnnnnnnnnnnnnnnnnnnnnnnnnnnnnnnnnnnnnnnnnnnnnnnnnnnnnnnnnnnnnnnnnnnnnnnnnnnnnnnnnnnnnnnnnnnnnnnnnnnnnnnnnnnnnnnnnnnnnnnnnnnnnnnnnnnnnnnnnnnnnnnnnnnnnnnnnnnnnnnnnnnnnnnnnnnnnnnnnnnnnnnnnnnnnnnnnnnnnnnnnnnnnnnnnnnnnnnnnnnnnnnnnnnnnnnnnnnnnnnnnnnnnnnnnnnnnnnnnnnnnnnnnnnnnnnnnnnnnnnnnnnnnnnnnnnnnnnnnnnnnnnnnnnnnnnnnnnnnnnnnnnnnnnnnnnnnnnnnnnnnnnnnnnnnnnnnnnnnnnnnnnnnnnnnnnnnnnnnnnnnnnnnnnnnnnnnnnnnnnnnnnnnnnnnnnnnnnnnnnnnnnnnnnnnnnnnnnnnnnnnnnnnnnnnnnnnnnnnnnnnnnnnnnnnnnnnnnnnnnnnnnnnnnnnnnnnnnnnnnnnnnnnnnnnnnnnnnnnnnnnnnnnnnnnnnnnnnnnnnnnnnnnnnnnnnnnnnnnnnnnnnnnnnnnnnnnnnnnnnnnnnnnnnnnnnnnnnnnnnnnnnnnnnnnnnnnnnnnnnnnnnnnnnnnnnnnnnnnnnnnnnnnnnnnnnnnnnnnnnnnnnnnnnnnnnnnnnnnnnnnnnnnnnnnnnnnnnnnnnnnnnnnnnnnnnnnnnnnnnnnnnnnnnnnnnnnnnnnnnnnnnnnnnnnnnnnnnnnnnnnnnnnnnnnnnnnnnnnnnnnnnnnnnnnnnnnnnnnnnnnnnnnnnnnnnnnnnnnnnnnnnnnnnnnnnnnnnnnnnnnnnnnnnnnnnnnnnnnnnnnnnnnnnnnnnnnnnnnnnnnnnnnnnnnnnnnnnnnnnnnnnnnnnnnnnnnnnnnnnnnnnnnnnnnnnnnnnnnnnnnnnnnnnnnnnnnnnnnnnnnnnnnnnnnnnnnnnnnnnnnnnnnnnnnnnnnnnnnnnnnnnnnnnnnnnnnnnnnnnnnnnnnnnnnnnnnnnnnnnnnnnnnnnnnnnnnnnnnnnnnnnnnnnnnnnnnnnnnnnnnnnnnnnnnnnnnnnnnnnnnnnnnnnnnnnnnnnnnnnnnnnnnnnnnnnnnnnnnnnnnnnnnnnnnnnnnnnnnnnnnnnnnnnnnnnnnnnnnnnnnnnnnnnnnnnnnnnnnnnnnnnnnnnnnnnnnnnnnnnnnnnnnnnnnnnnnnnnnnnnnnnnnnnnnnnnnnnnnnnnnnnnnnnnnnnnnnnnnnnnnnnnnnnnnnnnnnnnnnnnnnnnnnnnnnnnnnnnnnnnnnnnnnnnnnnnnnnnnnnnnnnnnnnnnnnnnnnnnnnnnnnnnnnnnnnnnnnnnnnnnnnnnnnnnnnnnnnnnnnnnnnnnnnnnnnnnnnnnnnnnnnnnnnnnnnnnnnnnnnnnnnnnnnnnnnnnnnnnnnnnnnnnnnnnnnnnnnnnnnnnnnnnnnnnnnnnnnnnnnnnnnnnnnnnnnnnnnnnnnnnnnnnnnnnnnnnnnnnnnnnnnnnnnnnnnnnnnnnnnnnnnnnnnnnnnnnnnnnnnnnnnnnnnnnnnnnnnnnnnnnnnnnnnnnnnnnnnnnnnnnnnnnnnnnnnnnnnnnnnnnnnnnnnnnnnnnnnnnnnnnnnnnnnnnnnnnnnnnnnnnnnnnnnnnnnnnnnnnnnnnnnnnnnnnnnnnnnnnnnnnnnnnnnnnnnnnnnnnnnnnnnnnnnnnnnnnnnnnnnnnnnnnnnnnnnnnnnnnnnnnnnnnnnnnnnnnnnnnnnnnnnnnnnnnnnnnnnnnnnnnnnnnnnnnnnnnnnnnnnnnnnnnnnnnnnnnnnnnnnnnnnnnnnnnnnnnnnnnnnnnnnnnnnnnnnnnnnnnnnnnnnnnnnnnnnnnnnnnnnnnnnnnnnnnnnnnnnnnnnnnnnnnnnnnnnnnnnnnnnnnnnnnnnnnnnnnnnnnnnnnnnnnnnnnnnnnnnnnnnnnnnnnnnnnnnnnnnnnnnnnnnnnnnnnnnnnnnnnnnnnnnnnnnnnnnnnnnnnnnnnnnnnnnnnnnnnnnnnnnnnnnnnnnnnnnnnnnnnnnnnnnnnnnnnnnnnnnnnnnnnnnnnnnnnnnnnnnnnnnnnnnnnnnnnnnnnnnnnnnnnnnnnnnnnnnnnnnnnnnnnnnnnnnnnnnnnnnnnnnnnnnnnnnnnnnnnnnnnnnnnnnnnnnnnnnnnnnnnnnnnnnnnnnnnnnnnnnnnnnnnnnnnnnnnnnnnnnnnnnnnnnnnnnnnnnnnnnnnnnnnnnnnnnnnnnnnnnnnnnnnnnnnnnnnnnnnnnnnnnnnnnnnnnnnnnnnnnnnnnnnnnnnnnnnnnnnnnnnnnnnnnnnnnnnnnnnnnnnnnnnnnnnnnnnnnnnnnnnnnnnnnnnnnnnnnnnnnnnnnnnnnnnnnnnnnnnnnnnnnnnnnnnnnnnnnnnnnnnnnnnnnnnnnnnnnnnnnnnnnnnnnnnnnnnnnnnnnnnnnnnnnnnnnnnnnnnnnnnnnnnnnnnnnnnnnnnnnnnnnnnnnnnnnnnnnnnnnnnnnnnnnnnnnnnnnnnnnnnnnnnnnnnnnnnnnnnnnnnnnnnnnnnnnnnnnnnnnnnnnnnnnnnnnnnnnnnnnnnnnnnnnnnnnnnnnnnnnnnnnnnnnnnnnnnnnnnnnnnnnnnnnnnnnnnnnnnnnnnnnnnnnnnnnnnnnnnnnnnnnnnnnnnnnnnnnnnnnnnnnnnnnnnnnnnnnnnnnnnnnnnnnnnnnnnnnnnnnnnnnnnnnnnnnnnnnnnnnnnnnnnnnnnnnnnnnnnnnnnnnnnnnnnnnnnnnnnnnnnnnnnnnnnnnnnnnnnnnnnnnnnnnnnnnnnnnnnnnnnnnnnnnnnnnnnnnnnnnnnnnnnnnnnnnnnnnnnnnnnnnnnnnnnnnnnnnnnnnnnnnnnnnnnnnnnnnnnnnnnnnnnnnnnnnnnnnnnnnnnnnnnnnnnnnnnnnnnnnnnnnnnnnnnnnnnnnnnnnnnnnnnnnnnnnnnnnnnnnnnnnnnnnnnnnnnnnnnnnnnnnnnnnnnnnnnnnnnnnnnnnnnnnnnnnnnnnnnnnnnnnnnnnnnnnnnnnnnnnnnnnnnnnnnnnnnnnnnnnnnnnnnnnnnnnnnnnnnnnnnnnnnnnnnnnnnnnnnnnnnnnnnnnnnnnnnnnnnnnnnnnnnnnnnnnnnnnnnnnnnnnnnnnnnnnnnnnnnnnnnnnnnnnnnnnnnnnnnnnnnnnnnnnnnnnnnnnnnnnnnnnnnnnnnnnnnnnnnnnnnnnnnnnnnnnnnnnnnnnnnnnnnnnnnnnnnnnnnnnnnnnnnnnnnnnnnnnnnnnnnnnnnnnnnnnnnnnnnnnnnnnnnnnnnnnnnnnnnnnnnnnnnnnnnnnnnnnnnnnnnnnnnnnnnnnnnnnnnnnnnnnnnnnnnnnnnnnnnnnnnnnnnnnnnnnnnnnnnnnnnnnnnnnnnnnnnnnnnnnnnnnnnnnnnnnnnnnnnnnnnnnnnnnnnnnnnnnnnnnnnnnnnnnnnnnnnnnnnnnnnnnnnnnnnnnnnnnnnnnnnnnnnnnnnnnnnnnnnnnnnnnnnnnnnnnnnnnnnnnnnnnnnnnnnnnnnnnnnnnnnnnnnnnnnnnnnnnnnnnnnnnnnnnnnnnnnnnnnnnnnnnnnnnnnnnnnnnnnnnnnnnnnnnnnnnnnnnnnnnnnnnnnnnnnnnnnnnnnnnnnnnnnnnnnnnnnnnnnnnnnnnnnnnnnnnnnnnnnnnnnnnnnnnnnnnnnnnnnnnnnnnnnnnnnnnnnnnnnnnnnnnnnnnnnnnnnnnnnnnnnnnnnnnnnnnnnnnnnnnnnnnnnnnnnnnnnnnnnnnnnnnnnnnnnnnnnnnnnnnnnnnnnnnnnnnnnnnnnnnnnnnnnnnnnnnnnnnnnnnnnnnnnnnnnnnnnnnnnnnnnnnnnnnnnnnnnnnnnnnnnnnnnnnnnnnnnnnnnnnnnnnnnnnnnnnnnnnnnnnnnnnnnnnnnnnnnnnnnnnnnnnnnnnnnnnnnnnnnnnnnnnnnnnnnnnnnnnnnnnnnnnnnnnnnnnnnnnnnnnnnnnnnnnnnnnnnnnnnnnnnnnnnnnnnnnnnnnnnnnnnnnnnnnnnnnnnnnnnnnnnnnnnnnnnnnnnnnnnnnnnnnnnnnnnnnnnnnnnnnnnnnnnnnnnnnnnnnnnnnnnnnnnnnnnnnnnnnnnnnnnnnnnnnnnnnnnnnnnnnnnnnnnnnnnnnnnnnnnnnnnnnnnnnnnnnnnnnnnnnnnnnnnnnnnnnnnnnnnnnnnnnnnnnnnnnnnnnnnnnnnnnnnnnnnnnnnnnnnnnnnnnnnnnnnnnnnnnnnnnnnnnnnnnnnnnnnnnnnnnnnnnnnnnnnnnnnnnnnnnnnnnnnnnnnnnnnnnnnnnnnnnnnnnnnnnnnnnnnnnnnnnnnnnnnnnnnnnnnnnnnnnnnnnnnnnnnnnnnnnnnnnnnnnnnnnnnnnnnnnnnnnnnnnnnnnnnnnnnnnnnnnnnnnnnnnnnnnnnnnnnnnnnnnnnnnnnnnnnnnnnnnnnnnnnnnnnnnnnnnnnnnnnnnnnnnnnnnnnnnnnnnnnnnnnnnnnnnnnnnnnnnnnnnnnnnnnnnnnnnnnnnnnnnnnnnnnnnnnnnnnnnnnnnnnnnnnnnnnnnnnnnnnnnnnnnnnnnnnnnnnnnnnnnnnnnnnnnnnnnnnnnnnnnnnnnnnnnnnnnnnnnnnnnnnnnnnnnnnnnnnnnnnnnnnnnnnnnnnnnnnnnnnnnnnnnnnnnnnnnnnnnnnnnnnnnnnnnnnnnnnnnnnnnnnnnnnnnnnnnnnnnnnnnnnnnnnnnnnnnnnnnnnnnnnnnnnnnnnnnnnnnnnnnnnnnnnnnnnnnnnnnnnnnnnnnnnnnnnnnnnnnnnnnnnnnnnnnnnnnnnnnnnnnnnnnnnnnnnnnnnnnnnnnnnnnnnnnnnnnnnnnnnnnnnnnnnnnnnnnnnnnnnnnnnnnnnnnnnnnnnnnnnnnnnnnnnnnnnnnnnnnnnnnnnnnnnnnnnnnnnnnnnnnnnnnnnnnnnnnnnnnnnnnnnnnnnnnnnnnnnnnnnnnnnnnnnnnnnnnnnnnnnnnnnnnnnnnnnnnnnnnnnnnnnnnnnnnnnnnnnnnnnnnnnnnnnnnnnnnnnnnnnnnnnnnnnnnnnnnnnnnnnnnnnnnnnnnnnnnnnnnnnnnnnnnnnnnnnnnnnnnnnnnnnnnnnnnnnnnnnnnnnnnnnnnnnnnnnnnnnnnnnnnnnnnnnnnnnnnnnnnnnnnnnnnnnnnnnnnnnnnnnnnnnnnnnnnnnnnnnnnnnnnnnnnnnnnnnnnnnnnnnnnnnnnnnnnnnnnnnnnnnnnnnnnnnnnnnnnnnnnnnnnnnnnnnnnnnnnnnnnnnnnnnnnnnnnnnnnnnnnnnnnnnnnnnnnnnnnnnnnnnnnnnnnnnnnnnnnnnnnnnnnnnnnnnnnnnnnnnnnnnnnnnnnnnnnnnnnnnnnnnnnnnnnnnnnnnnnnnnnnnnnnnnnnnnnnnnnnnnnnnnnnnnnnnnnnnnnnnnnnnnnnnnnnnnnnnnnnnnnnnnnnnnnnnnnnnnnnnnnnnnnnnnnnnnnnnnnnnnnnnnnnnnnnnnnnnnnnnnnnnnnnnnnnnnnnnnnnnnnnnnnnnnnnnnnnnnnnnnnnnnnnnnnnnnnnnnnnnnnnnnnnnnnnnnnnnnnnnnnnnnnnnnnnnnnnnnnnnnnnnnnnnnnnnnnnnnnnnnnnnnnnnnnnnnnnnnnnnnnnnnnnnnnnnnnnnnnnnnnnnnnnnnnnnnnnnnnnnnnnnnnnnnnnnnnnnnnnnnnnnnnnnnnnnnnnnnnnnnnnnnnnnnnnnnnnnnnnnnnnnnnnnnnnnnnnnnnnnnnnnnnnnnnnnnnnnnnnnnnnnnnnnnnnnnnnnnnnnnnnnnnnnnnnnnnnnnnnnnnnnnnnnnnnnnnnnnnnnnnnnnnnnnnnnnnnnnnnnnnnnnnnnnnnnnnnnnnnnnnnnnnnnnnnnnnnnnnnnnnnnnnnnnnnnnnnnnnnnnnnnnnnnnnnnnnnnnnnnnnnnnnnnnnnnnnnnnnnnnnnnnnnnnnnnnnnnnnnnnnnnnnnnnnnnnnnnnnnnnnnnnnnnnnnnnnnnnnnnnnnnnnnnnnnnnnnnnnnnnnnnnnnnnnnnnnnnnnnnnnnnnnnnnnnnnnnnnnnnnnnnnnnnnnnnnnnnnnnnnnnnnnnnnnnnnnnnnnnnnnnnnnnnnnnnnnnnnnnnnnnnnnnnnnnnnnnnnnnnnnnnnnnnnnnnnnnnnnnnnnnnnnnnnnnnnnnnnnnnnnnnnnnnnnnnnnnnnnnnnnnnnnnnnnnnnnnnnnnnnnnnnnnnnnnnnnnnnnnnnnnnnnnnnnnnnnnnnnnnnnnnnnnnnnnnnnnnnnnnnnnnnnnnnnnnnnnnnnnnnnnnnnnnnnnnnnnnnnnnnnnnnnnnnnnnnnnnnnnnnnnnnnnnnnnnnnnnnnnnnnnnnnnnnnnnnnnnnnnnnnnnnnnnnnnnnnnnnnnnnnnnnnnnnnnnnnnnnnnnnnnnnnnnnnnnnnnnnnnnnnnnnnnnnnnnnnnnnnnnnnnnnnnnnnnnnnnnnnnnnnnnnnnnnnnnnnnnnnnnnnnnnnnnnnnnnnnnnnnnnnnnnnnnnnnnnnnnnnnnnnnnnnnnnnnnnnnnnnnnnnnnnnnnnnnnnnnnnnnnnnnnnnnnnnnnnnnnnnnnnnnnnnnnnnnnnnnnnnnnnnnnnnnnnnnnnnnnnnnnnnnnnnnnnnnnnnnnnnnnnnnnnnnnnnnnnnnnnnnnnnnnnnnnnnnnnnnnnnnnnnnnnnnnnnnnnnnnnnnnnnnnnnnnnnnnnnnnnnnnnnnnnnnnnnnnnnnnnnnnnnnnnnnnnnnnnnnnnnnnnnnnnnnnnnnnnnnnnnnnnnnnnnnnnnnnnnnnnnnnnnnnnnnnnnnnnnnnnnnnnnnnnnnnnnnnnnnnnnnnnnnnnnnnnnnnnnnnnnnnnnnnnnnnnnnnnnnnnnnnnnnnnnnnnnnnnnnnnnnnnnnnnnnnnnnnnnnnnnnnnnnnnnnnnnnnnnnnnnnnnnnnnnnnnnnnnnnnnnnnnnnnnnnnnnnnnnnnnnnnnnnnnnnnnnnnnnnnnnnnnnnnnnnnnnnnnnnnnnnnnnnnnnnnnnnnnnnnnnnnnnnnnnnnnnnnnnnnnnnnnnnnnnnnnnnnnnnnnnnnnnnnnnnnnnnnnnnnnnnnnnnnnnnnnnnnnnnnnnnnnnnnnnnnnnnnnnnnnnnnnnnnnnnnnnnnnnnnnnnnnnnnnnnnnnnnnnnnnnnnnnnnnnnnnnnnnnnnnnnnnnnnnnnnnnnnnnnnnnnnnnnnnnnnnnnnnnnnnnnnnnnnnnnnnnnnnnnnnnnnnnnnnnnnnnnnnnnnnnnnnnnnnnnnnnnnnnnnnnnnnnnnnnnnnnnnnnnnnnnnnnnnnnnnnnnnnnnnnnnnnnnnnnnnnnnnnnnnnnnnnnnnnnnnnnnnnnnnnnnnnnnnnnnnnnnnnnnnnnnnnnnnnnnnnnnnnnnnnnnnnnnnnnnnnnnnnnnnnnnnnnnnnnnnnnnnnnnnnnnnnnnnnnnnnnnnnnnnnnnnnnnnnnnnnnnnnnnnnnnnnnnnnnnnnnnnnnnnnnnnnnnnnnnnnnnnnnnnnnnnnnnnnnnnnnnnnnnnnnnnnnnnnnnnnnnnnnnnnnnnnnnnnnnnnnnnnnnnnnnnnnnnnnnnnnnnnnnnnnnnnnnnnnnnnnnnnnnnnnnnnnnnnnnnnnnnnnnnnnnnnnnnnnnnnnnnnnnnnnnnnnnnnnnnnnnnnnnnnnnnnnnnnnnnnnnnnnnnnnnnnnnnnnnnnnnnnnnnnnnnnnnnnnnnnnnnnnnnnnnnnnnnnnnnnnnnnnnnnnnnnnnnnnnnnnnnnnnnnnnnnnnnnnnnnnnnnnnnnnnnnnnnnnnnnnnnnnnnnnnnnnnnnnnnnnnnnnnnnnnnnnnnnnnnnnnnnnnnnnnnnnnnnnnnnnnnnnnnnnnnnnnnnnnnnnnnnnnnnnnnnnnnnnnnnnnnnnnnnnnnnnnnnnnnnnnnnnnnnnnnnnnnnnnnnnnnnnnnnnnnnnnnnnnnnnnnnnnnnnnnnnnnnnnnnnnnnnnnnnnnnnnnnnnnnnnnnnnnnnnnnnnnnnnnnnnnnnnnnnnnnnnnnnnnnnnnnnnnnnnnnnnnnnnnnnnnnnnnnnnnnnnnnnnnnnnnnnnnnnnnnnnnnnnnnnnnnnnnnnnnnnnnnnnnnnnnnnnnnnnnnnnnnnnnnnnnnnnnnnnnnnnnnnnnnnnnnnnnnnnnnnnnnnnnnnnnnnnnnnnnnnnnnnnnnnnnnnnnnnnnnnnnnnnnnnnnnnnnnnnnnnnnnnnnnnnnnnnnnnnnnnnnnnnnnnnnnnnnnnnnnnnnnnnnnnnnnnnnnnnnnnnnnnnnnnnnnnnnnnnnnnnnnnnnnnnnnnnnnnnnnnnnnnnnnnnnnnnnnnnnnnnnnnnnnnnnnnnnnnnnnnnnnnnnnnnnnnnnnnnnnnnnnnnnnnnnnnnnnnnnnnnnnnnnnnnnnnnnnnnnnnnnnnnnnnnnnnnnnnnnnnnnnnnnnnnnnnnnnnnnnnnnnnnnnnnnnnnnnnnnnnnnnnnnnnnnnnnnnnnnnnnnnnnnnnnnnnnnnnnnnnnnnnnnnnnnnnnnnnnnnnnnnnnnnnnnnnnnnnnnnnnnnnnnnnnnnnnnnnnnnnnnnnnnnnnnnnnnnnnnnnnnnnnnnnnnnnnnnnnnnnnnnnnnnnnnnnnnnnnnnnnnnnnnnnnnnnnnnnnnnnnnnnnnnnnnnnnnnnnnnnnnnnnnnnnnnnnnnnnnnnnnnnnnnnnnnnnnnnnnnnnnnnnnnnnnnnnnnnnnnnnnnnnnnnnnnnnnnnnnnnnnnnnnnnnnnnnnnnnnnnnnnnnnnnnnnnnnnnnnnnnnnnnnnnnnnnnnnnnnnnnnnnnnnnnnnnnnnnnnnnnnnnnnnnnnnnnnnnnnnnnnnnnnnnnnnnnnnnnnnnnnnnnnnnnnnnnnnnnnnnnnnnnnnnnnnnnnnnnnnnnnnnnnnnnnnnnnnnnnnnnnnnnnnnnnnnnnnnnnnnnnnnnnnnnnnnnnnnnnnnnnnnnnnnnnnnnnnnnnnnnnnnnnnnnnnnnnnnnnnnnnnnnnnnnnnnnnnnnnnnnnnnnnnnnnnnnnnnnnnnnnnnnnnnnnnnnnnnnnnnnnnnnnnnnnnnnnnnnnnnnnnnnnnnnnnnnnnnnnnnnnnnnnnnnnnnnnnnnnnnnnnnnnnnnnnnnnnnnnnnnnnnnnnnnnnnnnnnnnnnnnnnnnnnnnnnnnnnnnnnnnnnnnnnnnnnnnnnnnnnnnnnnnnnnnnnnnnnnnnnnnnnnnnnnnnnnnnnnnnnnnnnnnnnnnnnnnnnnnnnnnnnnnnnnnnnnnnnnnnnnnnnnnnnnnnnnnnnnnnnnnnnnnnnnnnnnnnnnnnnnnnnnnnnnnnnnnnnnnnnnnnnnnnnnnnnnnnnnnnnnnnnnnnnnnnnnnnnnnnnnnnnnnnnnnnnnnnnnnnnnnnnnnnnnnnnnnnnnnnnnnnnnnnnnnnnnnnnnnnnnnnnnnnnnnnnnnnnnnnnnnnnnnnnnnnnnnnnnnnnnnnnnnnnnnnnnnnnnnnnnnnnnnnnnnnnnnnnnnnnnnnnnnnnnnnnnnnnnnnnnnnnnnnnnnnnnnnnnnnnnnnnnnnnnnnnnnnnnnnnnnnnnnnnnnnnnnnnnnnnnnnnnnnnnnnnnnnnnnnnnnnnnnnnnnnnnnnnnnnnnnnnnnnnnnnnnnnnnnnnnnnnnnnnnnnnnnnnnnnnnnnnnnnnnnnnnnnnnnnnnnnnnnnnnnnnnnnnnnnnnnnnnnnnnnnnnnnnnnnnnnnnnnnnnnnnnnnnnnnnnnnnnnnnnnnnnnnnnnnnnnnnnnnnnnnnnnnnnnnnnnnnnnnnnnnnnnnnnnnnnnnnnnnnnnnnnnnnnnnnnnnnnnnnnnnnnnnnnnnnnnnnnnnnnnnnnnnnnnnnnnnnnnnnnnnnnnnnnnnnnnnnnnnnnnnnnnnnnnnnnnnnnnnnnnnnnnnnnnnnnnnnnnnnnnnnnnnnnnnnnnnnnnnnnnnnnnnnnnnnnnnnnnnnnnnnnnnnnnnnnnnnnnnnnnnnnnnnnnnnnnnnnnnnnnnnnnnnnnnnnnnnnnnnnnnnnnnnnnnnnnnnnnnnnnnnnnnnnnnnnnnnnnnnnnnnnnnnnnnnnnnnnnnnnnnnnnnnnnnnnnnnnnnnnnnnnnnnnnnnnnnnnnnnnnnnnnnnnnnnnnnnnnnnnnnnnnnnnnnnnnnnnnnnnnnnnnnnnnnnnnnnnnnnnnnnnnnnnnnnnnnnnnnnnnnnnnnnnnnnnnnnnnnnnnnnnnnnnnnnnnnnnnnnnnnnnnnnnnnnnnnnnnnnnnnnnnnnnnnnnnnnnnnnnnnnnnnnnnnnnnnnnnnnnnnnnnnnnnnnnnnnnnnnnnnnnnnnnnnnnnnnnnnnnnnnnnnnnnnnnnnnnnnnnnnnnnnnnnnnnnnnnnnnnnnnnnnnnnnnnnnnnnnnnnnnnnnnnnnnnnnnnnnnnnnnnnnnnnnnnnnnnnnnnnnnnnnnnnnnnnnnnnnnnnnnnnnnnnnnnnnnnnnnnnnnnnnnnnnnnnnnnnnnnnnnnnnnnnnnnnnnnnnnnnnnnnnnnnnnnnnnnnnnnnnnnnnnnnnnnnnnnnnnnnnnnnnnnnnnnnnnnnnnnnnnnnnnnnnnnnnnnnnnnnnnnnnnnnnnnnnnnnnnnnnnnnnnnnnnnnnnnnnnnnnnnnnnnnnnnnnnnnnnnnnnnnnnnnnnnnnnnnnnnnnnnnnnnnnnnnnnnnnnnnnnnnnnnnnnnnnnnnnnnnnnnnnnnnnnnnnnnnnnnnnnnnnnnnnnnnnnnnnnnnnnnnnnnnnnnnnnnnnnnnnnnnnnnnnnnnnnnnnnnnnnnnnnnnnnnnnnnnnnnnnnnnnnnnnnnnnnnnnnnnnnnnnnnnnnnnnnnnnnnnnnnnnnnnnnnnnnnnnnnnnnnnnnnnnnnnnnnnnnnnnnnnnnnnnnnnnnnnnnnnnnnnnnnnnnnnnnnnnnnnnnnnnnnnnnnnnnnnnnnnnnnnnnnnnnnnnnnnnnnnnnnnnnnnnnnnnnnnnnnnnnnnnnnnnnnnnnnnnnnnnnnnnnnnnnnnnnnnnnnnnnnnnnnnnnnnnnnnnnnnnnnnnnnnnnnnnnnnnnnnnnnnnnnnnnnnnnnnnnnnnnnnnnnnnnnnnnnnnnnnnnnnnnnnnnnnnnnnnnnnnnnnnnnnnnnnnnnnnnnnnnnnnnnnnnnnnnnnnnnnnnnnnnnnnnnnnnnnnnnnnnnnnnnnnnnnnnnnnnnnnnnnnnnnnnnnnnnnnnnnnnnnnnnnnnnnnnnnnnnnnnnnnnnnnnnnnnnnnnnnnnnnnnnnnnnnnnnnnnnnnnnnnnnnnnnnnnnnnnnnnnnnnnnnnnnnnnnnnnnnnnnnnnnnnnnnnnnnnnnnnnnnnnnnnnnnnnnnnnnnnnnnnnnnnnnnnnnnnnnnnnnnnnnnnnnnnnnnnnnnnnnnnnnnnnnnnnnnnnnnnnnnnnnnnnnnnnnnnnnnnnnnnnnnnnnnnnnnnnnnnnnnnnnnnnnnnnnnnnnnnnnnnnnnnnnnnnnnnnnnnnnnnnnnnnnnnnnnnnnnnnnnnnnnnnnnnnnnnnnnnnnnnnnnnnnnnnnnnnnnnnnnnnnnnnnnnnnnnnnnnnnnnnnnnnnnnnnnnnnnnnnnnnnnnnnnnnnnnnnnnnnnnnnnnnnnnnnnnnnnnnnnnnnnnnnnnnnnnnnnnnnnnnnnnnnnnnnnnnnnnnnnnnnnnnnnnnnnnnnnnnnnnnnnnnnnnnnnnnnnnnnnnnnnnnnnnnnnnnnnnnnnnnnnnnnnnnnnnnnnnnnnnnnnnnnnnnnnnnnnnnnnnnnnnnnnnnnnnnnnnnnnnnnnnnnnnnnnnnnnnnnnnnnnnnnnnnnnnnnnnnnnnnnnnnnnnnnnnnnnnnnnnnnnnnnnnnnnnnnnnnnnnnnnnnnnnnnnnnnnnnnnnnnnnnnnnnnnnnnnnnnnnnnnnnnnnnnnnnnnnnnnnnnnnnnnnnnnnnnnnnnnnnnnnnnnnnnnnnnnnnnnnnnnnnnnnnnnnnnnnnnnnnnnnnnnnnnnnnnnnnnnnnnnnnnnnnnnnnnnnnnnnnnnnnnnnnnnnnnnnnnnnnnnnnnnnnnnnnnnnnnnnnnnnnnnnnnnnnnnnnnnnnnnnnnnnnnnnnnnnnnnnnnnnnnnnnnnnnnnnnnnnnnnnnnnnnnnnnnnnnnnnnnnnnnnnnnnnnnnnnnnnnnnnnnnnnnnnnnnnnnnnnnnnnnnnnnnnnnnnnnnnnnnnnnnnnnnnnnnnnnnnnnnnnnnnnnnnnnnnnnnnnnnnnnnnnnnnnnnnnnnnnnnnnnnnnnnnnnnnnnnnnnnnnnnnnnnnnnnnnnnnnnnnnnnnnnnnnnnnnnnnnnnnnnnnnnnnnnnnnnnnnnnnnnnnnnnnnnnnnnnnnnnnnnnnnnnnnnnnnnnnnnnnnnnnnnnnnnnnnnnnnnnnnnnnnnnnnnnnnnnnnnnnnnnnnnnnnnnnnnnnnnnnnnnnnnnnnnnnnnnnnnnnnnnnnnnnnnnnnnnnnnnnnnnnnnnnnnnnnnnnnnnnnnnnnnnnnnnnnnnnnnnnnnnnnnnnnnnnnnnnnnnnnnnnnnnnnnnnnnnnnnnnnnnnnnnnnnnnnnnnnnnnnnnnnnnnnnnnnnnnnnnnnnnnnnnnnnnnnnnnnnnnnnnnnnnnnnnnnnnnnnnnnnnnnnnnnnnnnnnnnnnnnnnnnnnnnnnnnnnnnnnnnnnnnnnnnnnnnnnnnnnnnnnnnnnnnnnnnnnnnnnnnnnnnnnnnnnnnnnnnnnnnnnnnnnnnnnnnnnnnnnnnnnnnnnnnnnnnnnnnnnnnnnnnnnnnnnnnnnnnnnnnnnnnnnnnnnnnnnnnnnnnnnnnnnnnnnnnnnnnnnnnnnnnnnnnnnnnnnnnnnnnnnnnnnnnnnnnnnnnnnnnnnnnnnnnnnnnnnnnnnnnnnnnnnnnnnnnnnnnnnnnnnnnnnnnnnnnnnnnnnnnnnnnnnnnnnnnnnnnnnnnnnnnnnnnnnnnnnnnnnnnnnnnnnnnnnnnnnnnnnnnnnnnnnnnnnnnnnnnnnnnnnnnnnnnnnnnnnnnnnnnnnnnnnnnnnnnnnnnnnnnnnnnnnnnnnnnnnnnnnnnnnnnnnnnnnnnnnnnnnnnnnnnnnnnnnnnnnnnnnnnnnnnnnnnnnnnnnnnnnnnnnnnnnnnnnnnnnnnnnnnnnnnnnnnnnnnnnnnnnnnnnnnnnnnnnnnnnnnnnnnnnnnnnnnnnnnnnnnnnnnnnnnnnnnnnnnnnnnnnnnnnnnnnnnnnnnnnnnnnnnnnnnnnnnnnnnnnnnnnnnnnnnnnnnnnnnnnnnnnnnnnnnnnnnnnnnnnnnnnnnnnnnnnnnnnnnnnnnnnnnnnnnnnnnnnnnnnnnnnnnnnnnnnnnnnnnnnnnnnnnnnnnnnnnnnnnnnnnnnnnnnnnnnnnnnnnnnnnnnnnnnnnnnnnnnnnnnnnnnnnnnnnnnnnnnnnnnnnnnnnnnnnnnnnnnnnnnnnnnnnnnnnnnnnnnnnnnnnnnnnnnnnnnnnnnnnnnnnnnnnnnnnnnnnnnnnnnnnnnnnnnnnnnnnnnnnnnnnnnnnnnnnnnnnnnnnnnnnnnnnnnnnnnnnnnnnnnnnnnnnnnnnnnnnnnnnnnnnnnnnnnnnnnnnnnnnnnnnnnnnnnnnnnnnnnnnnnnnnnnnnnnnnnnnnnnnnnnnnnnnnnnnnnnnnnnnnnnnnnnnnnnnnnnnnnnnnnnnnnnnnnnnnnnnnnnnnnnnnnnnnnnnnnnnnnnnnnnnnnnnnnnnnnnnnnnnnnnnnnnnnnnnnnnnnnnnnnnnnnnnnnnnnnnnnnnnnnnnnnnnnnnnnnnnnnnnnnnnnnnnnnnnnnnnnnnnnnnnnnnnnnnnnnnnnnnnnnnnnnnnnnnnnnnnnnnnnnnnnnnnnnnnnnnnnnnnnnnnnnnnnnnnnnnnnnnnnnnnnnnnnnnnnnnnnnnnnnnnnnnnnnnnnnnnnnnnnnnnnnnnnnnnnnnnnnnnnnnnnnnnnnnnnnnnnnnnnnnnnnnnnnnnnnnnnnnnnnnnnnnnnnnnnnnnnnnnnnnnnnnnnnnnnnnnnnnnnnnnnnnnnnnnnnnnnnnnnnnnnnnnnnnnnnnnnnnnnnnnnnnnnnnnnnnnnnnnnnnnnnnnnnnnnnnnnnnnnnnnnnnnnnnnnnnnnnnnnnnnnnnnnnnnnnnnnnnnnnnnnnnnnnnnnnnnnnnnnnnnnnnnnnnnnnnnnnnnnnnnnnnnnnnnnnnnnnnnnnnnnnnnnnnnnnnnnnnnnnnnnnnnnnnnnnnnnnnnnnnnnnnnnnnnnnnnnnnnnnnnnnnnnnnnnnnnnnnnnnnnnnnnnnnnnnnnnnnnnnnnnnnnnnnnnnnnnnnnnnnnnnnnnnnnnnnnnnnnnnnnnnnnnnnnnnnnnnnnnnnnnnnnnnnnnnnnnnnnnnnnnnnnnnnnnnnnnnnnnnnnnnnnnnnnnnnnnnnnnnnnnnnnnnnnnnnnnnnnnnnnnnnnnnnnnnnnnnnnnnnnnnnnnnnnnnnnnnnnnnnnnnnnnnnnnnnnnnnnnnnnnnnnnnnnnnnnnnnnnnnnnnnnnnnnnnnnnnnnnnnnnnnnnnnnnnnnnnnnnnnnnnnnnnnnnnnnnnnnnnnnnnnnnnnnnnnnnnnnnnnnnnnnnnnnnnnnnnnnnnnnnnnnnnnnnnnnnnnnnnnnnnnnnnnnnnnnnnnnnnnnnnnnnnnnnnnnnnnnnnnnnnnnnnnnnnnnnnnnnnnnnnnnnnnnnnnnnnnnnnnnnnnnnnnnnnnnnnnnnnnnnnnnnnnnnnnnnnnnnnnnnnnnnnnnnnnnnnnnnnnnnnnnnnnnnnnnnnnnnnnnnnnnnnnnnnnnnnnnnnnnnnnnnnnnnnnnnnnnnnnnnnnnnnnnnnnnnnnnnnnnnnnnnnnnnnnnnnnnnnnnnnnnnnnnnnnnnnnnnnnnnnnnnnnnnnnnnnnnnnnnnnnnnnnnnnnnnnnnnnnnnnnnnnnnnnnnnnnnnnnnnnnnnnnnnnnnnnnnnnnnnnnnnnnnnnnnnnnnnnnnnnnnnnnnnnnnnnnnnnnnnnnnnnnnnnnnnnnnnnnnnnnnnnnnnnnnnnnnnnnnnnnnnnnnnnnnnnnnnnnnnnnnnnnnnnnnnnnnnnnnnnnnnnnnnnnnnnnnnnnnnnnnnnnnnnnnnnnnnnnnnnnnnnnnnnnnnnnnnnnnnnnnnnnnnnnnnnnnnnnnnnnnnnnnnnnnnnnnnnnnnnnnnnnnnnnnnnnnnnnnnnnnnnnnnnnnnnnnnnnnnnnnnnnnnnnnnnnnnnnnnnnnnnnnnnnnnnnnnnnnnnnnnnnnnnnnnnnnnnnnnnnnnnnnnnnnnnnnnnnnnnnnnnnnnnnnnnnnnnnnnnnnnnnnnnnnnnnnnnnnnnnnnnnnnnnnnnnnnnnnnnnnnnnnnnnnnnnnnnnnnnnnnnnnnnnnnnnnnnnnnnnnnnnnnnnnnnnnnnnnnnnnnnnnnnnnnnnnnnnnnnnnnnnnnnnnnnnnnnnnnnnnnnnnnnnnnnnnnnnnnnnnnnnnnnnnnnnnnnnnnnnnnnnnnnnnnnnnnnnnnnnnnnnnnnnnnnnnnnnnnnnnnnnnnnnnnnnnnnnnnnnnnnnnnnnnnnnnnnnnnnnnnnnnnnnnnnnnnnnnnnnnnnnnnnnnnnnnnnnnnnnnnnnnnnnnnnnnnnnnnnnnnnnnnnnnnnnnnnnnnnnnnnnnnnnnnnnnnnnnnnnnnnnnnnnnnnnnnnnnnnnnnnnnnnnnnnnnnnnnnnnnnnnnnnnnnnnnnnnnnnnnnnnnnnnnnnnnnnnnnnnnnnnnnnnnnnnnnnnnnnnnnnnnnnnnnnnnnnnnnnnnnnnnnnnnnnnnnnnnnnnnnnnnnnnnnnnnnnnnnnnnnnnnnnnnnnnnnnnnnnnnnnnnnnnnnnnnnnnnnnnnnnnnnnnnnnnnnnnnnnnnnnnnnnnnnnnnnnnnnnnnnnnnnnnnnnnnnnnnnnnnnnnnnnnnnnnnnnnnnnnnnnnnnnnnnnnnnnnnnnnnnnnnnnnnnnnnnnnnnnnnnnnnnnnnnnnnnnnnnnnnnnnnnnnnnnnnnnnnnnnnnnnnnnnnnnnnnnnnnnnnnnnnnnnnnnnnnnnnnnnnnnnnnnnnnnnnnnnnnnnnnnnnnnnnnnnnnnnnnnnnnnnnnnnnnnnnnnnnnnnnnnnnnnnnnnnnnnnnnnnnnnnnnnnnnnnnnnnnnnnnnnnnnnnnnnnnnnnnnnnnnnnnnnnnnnnnnnnnnnnnnnnnnnnnnnnnnnnnnnnnnnnnnnnnnnnnnnnnnnnnnnnnnnnnnnnnnnnnnnnnnnnnnnnnnnnnnnnnnnnnnnnnnnnnnnnnnnnnnnnnnnnnnnnnnnnnnnnnnnnnnnnnnnnnnnnnnnnnnnnnnnnnnnnnnnnnnnnnnnnnnnnnnnnnnnnnnnnnnnnnnnnnnnnnnnnnnnnnnnnnnnnnnnnnnnnnnnnnnnnnnnnnnnnnnnnnnnnnnnnnnnnnnnnnnnnnnnnnnnnnnnnnnnnnnnnnnnnnnnnnnnnnnnnnnnnnnnnnnnnnnnnnnnnnnnnnnnnnnnnnnnnnnnnnnnnnnnnnnnnnnnnnnnnnnnnnnnnnnnnnnnnnnnnnnnnnnnnnnnnnnnnnnnnnnnnnnnnnnnnnnnnnnnnnnnnnnnnnnnnnnnnnnnnnnnnnnnnnnnnnnnnnnnnnnnnnnnnnnnnnnnnnnnnnnnnnnnnnnnnnnnnnnnnnnnnnnnnnnnnnnnnnnnnnnnnnnnnnnnnnnnnnnnnnnnnnnnnnnnnnnnnnnnnnnnnnnnnnnnnnnnnnnnnnnnnnnnnnnnnnnnnnnnnnnnnnnnnnnnnnnnnnnnnnnnnnnnnnnnnnnnnnnnnnnnnnnnnnnnnnnnnnnnnnnnnnnnnnnnnnnnnnnnnnnnnnnnnnnnnnnnnnnnnnnnnnnnnnnnnnnnnnnnnnnnnnnnnnnnnnnnnnnnnnnnnnnnnnnnnnnnnnnnnnnnnnnnnnnnnnnnnnnnnnnnnnnnnnnnnnnnnnnnnnnnnnnnnnnnnnnnnnnnnnnnnnnnnnnnnnnnnnnnnnnnnnnnnnnnnnnnnnnnnnnnnnnnnnnnnnnnnnnnnnnnnnnnnnnnnnnnnnnnnnnnnnnnnnnnnnnnnnnnnnnnnnnnnnnnnnnnnnnnnnnnnnnnnnnnnnnnnnnnnnnnnnnnnnnnnnnnnnnnnnnnnnnnnnnnnnnnnnnnnnnnnnnnnnnnnnnnnnnnnnnnnnnnnnnnnnnnnnnnnnnnnnnnnnnnnnnnnnnnnnnnnnnnnnnnnnnnnnnnnnnnnnnnnnnnnnnnnnnnnnnnnnnnnnnnnnnnnnnnnnnnnnnnnnnnnnnnnnnnnnnnnnnnnnnnnnnnnnnnnnnnnnnnnnnnnnnnnnnnnnnnnnnnnnnnnnnnnnnnnnnnnnnnnnnnnnnnnnnnnnnnnnnnnnnnnnnnnnnnnnnnnnnnnnnnnnnnnnnnnnnnnnnnnnnnnnnnnnnnnnnnnnnnnnnnnnnnnnnnnnnnnnnnnnnnnnnnnnnnnnnnnnnnnnnnnnnnnnnnnnnnnnnnnnnnnnnnnnnnnnnnnnnnnnnnnnnnnnnnnnnnnnnnnnnnnnnnnnnnnnnnnnnnnnnnnnnnnnnnnnnnnnnnnnnnnnnnnnnnnnnnnnnnnnnnnnnnnnnnnnnnnnnnnnnnnnnnnnnnnnnnnnnnnnnnnnnnnnnnnnnnnnnnnnnnnnnnnnnnnnnnnnnnnnnnnnnnnnnnnnnnnnnnnnnnnnnnnnnnnnnnnnnnnnnnnnnnnnnnnnnnnnnnnnnnnnnnnnnnnnnnnnnnnnnnnnnnnnnnnnnnnnnnnnnnnnnnnnnnnnnnnnnnnnnnnnnnnnnnnnnnnnnnnnnnnnnnnnnnnnnnnnnnnnnnnnnnnnnnnnnnnnnnnnnnnnnnnnnnnnnnnnnnnnnnnnnnnnnnnnnnnnnnnnnnnnnnnnnnnnnnnnnnnnnnnnnnnnnnnnnnnnnnnnnnnnnnnnnnnnnnnnnnnnnnnnnnnnnnnnnnnnnnnnnnnnnnnnnnnnnnnnnnnnnnnnnnnnnnnnnnnnnnnnnnnnnnnnnnnnnnnnnnnnnnnnnnnnnnnnnnnnnnnnnnnnnnnnnnnnnnnnnnnnnnnnnnnnnnnnnnnnnnnnnnnnnnnnnnnnnnnnnnnnnnnnnnnnnnnnnnnnnnnnnnnnnnnnnnnnnnnnnnnnnnnnnnnnnnnnnnnnnnnnnnnnnnnnnnnnnnnnnnnnnnnnnnnnnnnnnnnnnnnnnnnnnnnnnnnnnnnnnnnnnnnnnnnnnnnnnnnnnnnnnnnnnnnnnnnnnnnnnnnnnnnnnnnnnnnnnnnnnnnnnnnnnnnnnnnnnnnnnnnnnnnnnnnnnnnnnnnnnnnnnnnnnnnnnnnnnnnnnnnnnnnnnnnnnnnnnnnnnnnnnnnnnnnnnnnnnnnnnnnnnnnnnnnnnnnnnnnnnnnnnnnnnnnnnnnnnnnnnnnnnnnnnnnnnnnnnnnnnnnnnnnnnnnnnnnnnnnnnnnnnnnnnnnnnnnnnnnnnnnnnnnnnnnnnnnnnnnnnnnnnnnnnnnnnnnnnnnnnnnnnnnnnnnnnnnnnnnnnnnnnnnnnnnnnnnnnnnnnnnnnnnnnnnnnnnnnnnnnnnnnnnnnnnnnnnnnnnnnnnnnnnnnnnnnnnnnnnnnnnnnnnnnnnnnnnnnnnnnnnnnnnnnnnnnnnnnnnnnnnnnnnnnnnnnnnnnnnnnnnnnnnnnnnnnnnnnnnnnnnnnnnnnnnnnnnnnnnnnnnnnnnnnnnnnnnnnnnnnnnnnnnnnnnnnnnnnnnnnnnnnnnnnnnnnnnnnnnnnnnnnnnnnnnnnnnnnnnnnnnnnnnnnnnnnnnnnnnnnnnnnnnnnnnnnnnnnnnnnnnnnnnnnnnnnnnnnnnnnnnnnnnnnnnnnnnnnnnnnnnnnnnnnnnnnnnnnnnnnnnnnnnnnnnnnnnnnnnnnnnnnnnnnnnnnnnnnnnnnnnnnnnnnnnnnnnnnnnnnnnnnnnnnnnnnnnnnnnnnnnnnnnnnnnnnnnnnnnnnnnnnnnnnnnnnnnnnnnnnnnnnnnnnnnnnnnnnnnnnnnnnnnnnnnnnnnnnnnnnnnnnnnnnnnnnnnnnnnnnnnnnnnnnnnnnnnnnnnnnnnnnnnnnnnnnnnnnnnnnnnnnnnnnnnnnnnnnnnnnnnnnnnnnnnnnnnnnnnnnnnnnnnnnnnnnnnnnnnnnnnnnnnnnnnnnnnnnnnnnnnnnnnnnnnnnnnnnnnnnnnnnnnnnnnnnnnnnnnnnnnnnnnnnnnnnnnnnnnnnnnnnnnnnnnnnnnnnnnnnnnnnnnnnnnnnnnnnnnnnnnnnnnnnnnnnnnnnnnnnnnnnnnnnnnnnnnnnnnnnnnnnnnnnnnnnnnnnnnnnnnnnnnnnnnnnnnnnnnnnnnnnnnnnnnnnnnnnnnnnnnnnnnnnnnnnnnnnnnnnnnnnnnnnnnnnnnnnnnnnnnnnnnnnnnnnnnnnnnnnnnnnnnnnnnnnnnnnnnnnnnnnnnnnnnnnnnnnnnnnnnnnnnnnnnnnnnnnnnnnnnnnnnnnnnnnnnnnnnnnnnnnnnnnnnnnnnnnnnnnnnnnnnnnnnnnnnnnnnnnnnnnnnnnnnnnnnnnnnnnnnnnnnnnnnnnnnnnnnnnnnnnnnnnnnnnnnnnnnnnnnnnnnnnnnnnnnnnnnnnnnnnnnnnnnnnnnnnnnnnnnnnnnnnnnnnnnnnnnnnnnnnnnnnnnnnnnnnnnnnnnnnnnnnnnnnnnnnnnnnnnnnnnnnnnnnnnnnnnnnnnnnnnnnnnnnnnnnnnnnnnnnnnnnnnnnnnnnnnnnnnnnnnnnnnnnnnnnnnnnnnnnnnnnnnnnnnnnnnnnnnnnnnnnnnnnnnnnnnnnnnnnnnnnnnnnnnnnnnnnnnnnnnnnnnnnnnnnnnnnnnnnnnnnnnnnnnnnnnnnnnnnnnnnnnnnnnnnnnnnnnnnnnnnnnnnnnnnnnnnnnnnnnnnnnnnnnnnnnnnnnnnnnnnnnnnnnnnnnnnnnnnnnnnnnnnnnnnnnnnnnnnnnnnnnnnnnnnnnnnnnnnnnnnnnnnnnnnnnnnnnnnnnnnnnnnnnnnnnnnnnnnnnnnnnnnnnnnnnnnnnnnnnnnnnnnnnnnnnnnnnnnnnnnnnnnnnnnnnnnnnnnnnnnnnnnnnnnnnnnnnnnnnnnnnnnnnnnnnnnnnnnnnnnnnnnnnnnnnnnnnnnnnnnnnnnnnnnnnnnnnnnnnnnnnnnnnnnnnnnnnnnnnnnnnnnnnnnnnnnnnnnnnnnnnnnnnnnnnnnnnnnnnnnnnnnnnnnnnnnnnnnnnnnnnnnnnnnnnnnnnnnnnnnnnnnnnnnnnnnnnnnnnnnnnnnnnnnnnnnnnnnnnnnnnnnnnnnnnnnnnnnnnnnnnnnnnnnnnnnnnnnnnnnnnnnnnnnnnnnnnnnnnnnnnnnnnnnnnnnnnnnnnnnnnnnnnnnnnnnnnnnnnnnnnnnnnnnnnnnnnnnnnnnnnnnnnnnnnnnnnnnnnnnnnnnnnnnnnnnnnnnnnnnnnnnnnnnnnnnnnnnnnnnnnnnnnnnnnnnnnnnnnnnnnnnnnnnnnnnnnnnnnnnnnnnnnnnnnnnnnnnnnnnnnnnnnnnnnnnnnnnnnnnnnnnnnnnnnnnnnnnnnnnnnnnnnnnnnnnnnnnnnnnnnnnnnnnnnnnnnnnnnnnnnnnnnnnnnnnnnnnnnnnnnnnnnnnnnnnnnnnnnnnnnnnnnnnnnnnnnnnnnnnnnnnnnnnnnnnnnnnnnnnnnnnnnnnnnnnnnnnnnnnnnnnnnnnnnnnnnnnnnnnnnnnnnnnnnnnnnnnnnnnnnnnnnnnnnnnnnnnnnnnnnnnnnnnnnnnnnnnnnnnnnnnnnnnnnnnnnnnnnnnnnnnnnnnnnnnnnnnnnnnnnnnnnnnnnnnnnnnnnnnnnnnnnnnnnnnnnnnnnnnnnnnnnnnnnnnnnnnnnnnnnnnnnnnnnnnnnnnnnnnnnnnnnnnnnnnnnnnnnnnnnnnnnnnnnnnnnnnnnnnnnnnnnnnnnnnnnnnnnnnnnnnnnnnnnnnnnnnnnnnnnnnnnnnnnnnnnnnnnnnnnnnnnnnnnnnnnnnnnnnnnnnnnnnnnnnnnnnnnnnnnnnnnnnnnnnnnnnnnnnnnnnnnnnnnnnnnnnnnnnnnnnnnnnnnnnnnnnnnnnnnnnnnnnnnnnnnnnnnnnnnnnnnnnnnnnnnnnnnnnnnnnnnnnnnnnnnnnnnnnnnnnnnnnnnnnnnnnnnnnnnnnnnnnnnnnnnnnnnnnnnnnnnnnnnnnnnnnnnnnnnnnnnnnnnnnnnnnnnnnnnnnnnnnnnnnnnnnnnnnnnnnnnnnnnnnnnnnnnnnnnnnnnnnnnnnnnnnnnnnnnnnnnnnnnnnnnnnnnnnnnnnnnnnnnnnnnnnnnnnnnnnnnnnnnnnnnnnnnnnnnnnnnnnnnnnnnnnnnnnnnnnnnnnnnnnnnnnnnnnnnnnnnnnnnnnnnnnnnnnnnnnnnnnnnnnnnnnnnnnnnnnnnnnnnnnnnnnnnnnnnnnnnnnnnnnnnnnnnnnnnnnnnnnnnnnnnnnnnnnnnnnnnnnnnnnnnnnnnnnnnnnnnnnnnnnnnnnnnnnnnnnnnnnnnnnnnnnnnnnnnnnnnnnnnnnnnnnnnnnnnnnnnnnnnnnnnnnnnnnnnnnnnnnnnnnnnnnnnnnnnnnnnnnnnnnnnnnnnnnnnnnnnnnnnnnnnnnnnnnnnnnnnnnnnnnnnnnnnnnnnnnnnnnnnnnnnnnnnnnnnnnnnnnnnnnnnnnnnnnnnnnnnnnnnnnnnnnnnnnnnnnnnnnnnnnnnnnnnnnnnnnnnnnnnnnnnnnnnnnnnnnnnnnnnnnnnnnnnnnnnnnnnnnnnnnnnnnnnnnnnnnnnnnnnnnnnnnnnnnnnnnnnnnnnnnnnnnnnnnnnnnnnnnnnnnnnnnnnnnnnnnnnnnnnnnnnnnnnnnnnnnnnnnnnnnnnnnnnnnnnnnnnnnnnnnnnnnnnnnnnnnnnnnnnnnnnnnnnnnnnnnnnnnnnnnnnnnnnnnnnnnnnnnnnnnnnnnnnnnnnnnnnnnnnnnnnnnnnnnnnnnnnnnnnnnnnnnnnnnnnnnnnnnnnnnnnnnnnnnnnnnnnnnnnnnnnnnnnnnnnnnnnnnnnnnnnnnnnnnnnnnnnnnnnnnnnnnnnnnnnnnnnnnnnnnnnnnnnnnnnnnnnnnnnnnnnnnnnnnnnnnnnnnnnnnnnnnnnnnnnnnnnnnnnnnnnnnnnnnnnnnnnnnnnnnnnnnnnnnnnnnnnnnnnnnnnnnnnnnnnnnnnnnnnnnnnnnnnnnnnnnnnnnnnnnnnnnnnnnnnnnnnnnnnnnnnnnnnnnnnnnnnnnnnnnnnnnnnnnnnnnnnnnnnnnnnnnnnnnnnnnnnnnnnnnnnnnnnnnnnnnnnnnnnnnnnnnnnnnnnnnnnnnnnnnnnnnnnnnnnnnnnnnnnnnnnnnnnnnnnnnnnnnnnnnnnnnnnnnnnnnnnnnnnnnnnnnnnnnnnnnnnnnnnnnnnnnnnnnnnnnnnnnnnnnnnnnnnnnnnnnnnnnnnnnnnnnnnnnnnnnnnnnnnnnnnnnnnnnnnnnnnnnnnnnnnnnnnnnnnnnnnnnnnnnnnnnnnnnnnnnnnnnnnnnnnnnnnnnnnnnnnnnnnnnnnnnnnnnnnnnnnnnnnnnnnnnnnnnnnnnnnnnnnnnnnnnnnnnnnnnnnnnnnnnnnnnnnnnnnnnnnnnnnnnnnnnnnnnnnnnnnnnnnnnnnnnnnnnnnnnnnnnnnnnnnnnnnnnnnnnnnnnnnnnnnnnnnnnnnnnnnnnnnnnnnnnnnnnnnnnnnnnnnnnnnnnnnnnnnnnnnnnnnnnnnnnnnnnnnnnnnnnnnnnnnnnnnnnnnnnnnnnnnnnnnnnnnnnnnnnnnnnnnnnnnnnnnnnnnnnnnnnnnnnnnnnnnnnnnnnnnnnnnnnnnnnnnnnnnnnnnnnnnnnnnnnnnnnnnnnnnnnnnnnnnnnnnnnnnnnnnnnnnnnnnnnnnnnnnnnnnnnnnnnnnnnnnnnnnnnnnnnnnnnnnnnnnnnnnnnnnnnnnnnnnnnnnnnnnnnnnnnnnnnnnnnnnnnnnnnnnnnnnnnnnnnnnnnnnnnnnnnnnnnnnnnnnnnnnnnnnnnnnnnnnnnnnnnnnnnnnnnnnnnnnnnnnnnnnnnnnnnnnnnnnnnnnnnnnnnnnnnnnnnnnnnnnnnnnnnnnnnnnnnnnnnnnnnnnnnnnnnnnnnnnnnnnnnnnnnnnnnnnnnnnnnnnnnnnnnnnnnnnnnnnnnnnnnnnnnnnnnnnnnnnnnnnnnnnnnnnnnnnnnnnnnnnnnnnnnnnnnnnnnnnnnnnnnnnnnnnnnnnnnnnnnnnnnnnnnnnnnnnnnnnnnnnnnnnnnnnnnnnnnnnnnnnnnnnnnnnnnnnnnnnnnnnnnnnnnnnnnnnnnnnnnnnnnnnnnnnnnnnnnnnnnnnnnnnnnnnnnnnnnnnnnnnnnnnnnnnnnnnnnnnnnnnnnnnnnnnnnnnnnnnnnnnnnnnnnnnnnnnnnnnnnnnnnnnnnnnnnnnnnnnnnnnnnnnnnnnnnnnnnnnnnnnnnnnnnnnnnnnnnnnnnnnnnnnnnnnnnnnnnnnnnnnnnnnnnnnnnnnnnnnnnnnnnnnnnnnnnnnnnnnnnnnnnnnnnnnnnnnnnnnnnnnnnnnnnnnnnnnnnnnnnnnnnnnnnnnnnnnnnnnnnnnnnnnnnnnnnnnnnnnnnnnnnnnnnnnnnnnnnnnnnnnnnnnnnnnnnnnnnnnnnnnnnnnnnnnnnnnnnnnnnnnnnnnnnnnnnnnnnnnnnnnnnnnnnnnnnnnnnnnnnnnnnnnnnnnnnnnnnnnnnnnnnnnnnnnnnnnnnnnnnnnnnnnnnnnnnnnnnnnnnnnnnnnnnnnnnnnnnnnnnnnnnnnnnnnnnnnnnnnnnnnnnnnnnnnnnnnnnnnnnnnnnnnnnnnnnnnnnnnnnnnnnnnnnnnnnnnnnnnnnnnnnnnnnnnnnnnnnnnnnnnnnnnnnnnnnnnnnnnnnnnnnnnnnnnnnnnnnnnnnnnnnnnnnnnnnnnnnnnnnnnnnnnnnnnnnnnnnnnnnnnnnnnnnnnnnnnnnnnnnnnnnnnnnnnnnnnnnnnnnnnnnnnnnnnnnnnnnnnnnnnnnnnnnnnnnnnnnnnnnnnnnnnnnnnnnnnnnnnnnnnnnnnnnnnnnnnnnnnnnnnnnnnnnnnnnnnnnnnnnnnnnnnnnnnnnnnnnnnnnnnnnnnnnnnnnnnnnnnnnnnnnnnnnnnnnnnnnnnnnnnnnnnnnnnnnnnnnnnnnnnnnnnnnnnnnnnnnnnnnnnnnnnnnnnnnnnnnnnnnnnnnnnnnnnnnnnnnnnnnnnnnnnnnnnnnnnnnnnnnnnnnnnnnnnnnnnnnnnnnnnnnnnnnnnnnnnnnnnnnnnnnnnnnnnnnnnnnnnnnnnnnnnnnnnnnnnnnnnnnnnnnnnnnnnnnnnnnnnnnnnnnnnnnnnnnnnnnnnnnnnnnnnnnnnnnnnnnnnnnnnnnnnnnnnnnnnnnnnnnnnnnnnnnnnnnnnnnnnnnnnnnnnnnnnnnnnnnnnnnnnnnnnnnnnnnnnnnnnnnnnnnnnnnnnnnnnnnnnnnnnnnnnnnnnnnnnnnnnnnnnnnnnnnnnnnnnnnnnnnnnnnnnnnnnnnnnnnnnnnnnnnnnnnnnnnnnnnnnnnnnnnnnnnnnnnnnnnnnnnnnnnnnnnnnnnnnnnnnnnnnnnnnnnnnnnnnnnnnnnnnnnnnnnnnnnnnnnnnnnnnnnnnnnnnnnnnnnnnnnnnnnnnnnnnnnnnnnnnnnnnnnnnnnnnnnnnnnnnnnnnnnnnnnnnnnnnnnnnnnnnnnnnnnnnnnnnnnnnnnnnnnnnnnnnnnnnnnnnnnnnnnnnnnnnnnnnnnnnnnnnnnnnnnnnnnnnnnnnnnnnnnnnnnnnnnnnnnnnnnnnnnnnnnnnnnnnnnnnnnnnnnnnnnnnnnnnnnnnnnnnnnnnnnnnnnnnnnnnnnnnnnnnnnnnnnnnnnnnnnnnnnnnnnnnnnnnnnnnnnnnnnnnnnnnnnnnnnnnnnnnnnnnnnnnnnnnnnnnnnnnnnnnnnnnnnnnnnnnnnnnnnnnnnnnnnnnnnnnnnnnnnnnnnnnnnnnnnnnnnnnnnnnnnnnnnnnnnnnnnnnnnnnnnnnnnnnnnnnnnnnnnnnnnnnnnnnnnnnnnnnnnnnnnnnnnnnnnnnnnnnnnnnnnnnnnnnnnnnnnnnnnnnnnnnnnnnnnnnnnnnnnnnnnnnnnnnnnnnnnnnnnnnnnnnnnnnnnnnnnnnnnnnnnnnnnnnnnnnnnnnnnnnnnnnnnnnnnnnnnnnnnnnnnnnnnnnnnnnnnnnnnnnnnnnnnnnnnnnnnnnnnnnnnnnnnnnnnnnnnnnnnnnnnnnnnnnnnnnnnnnnnnnnnnnnnnnnnnnnnnnnnnnnnnnnnnnnnnnnnnnnnnnnnnnnnnnnnnnnnnnnnnnnnnnnnnnnnnnnnnnnnnnnnnnnnnnnnnnnnnnnnnnnnnnnnnnnnnnnnnnnnnnnnnnnnnnnnnnnnnnnnnnnnnnnnnnnnnnnnnnnnnnnnnnnnnnnnnnnnnnnnnnnnnnnnnnnnnnnnnnnnnnnnnnnnnnnnnnnnnnnnnnnnnnnnnnnnnnnnnnnnnnnnnnnnnnnnnnnnnnnnnnnnnnnnnnnnnnnnnnnnnnnnnnnnnnnnnnnnnnnnnnnnnnnnnnnnnnnnnnnnnnnnnnnnnnnnnnnnnnnnnnnnnnnnnnnnnnnnnnnnnnnnnnnnnnnnnnnnnnnnnnnnnnnnnnnnnnnnnnnnnnnnnnnnnnnnnnnnnnnnnnnnnnnnnnnnnnnnnnnnnnnnnnnnnnnnnnnnnnnnnnnnnnnnnnnnnnnnnnnnnnnnnnnnnnnnnnnnnnnnnnnnnnnnnnnnnnnnnnnnnnnnnnnnnnnnnnnnnnnnnnnnnnnnnnnnnnnnnnnnnnnnnnnnnnnnnnnnnnnnnnnnnnnnnnnnnnnnnnnnnnnnnnnnnnnnnnnnnnnnnnnnnnnnnnnnnnnnnnnnnnnnnnnnnnnnnnnnnnnnnnnnnnnnnnnnnnnnnnnnnnnnnnnnnnnnnnnnnnnnnnnnnnnnnnnnnnnnnnnnnnnnnnnnnnnnnnnnnnnnnnnnnnnnnnnnnnnnnnnnnnnnnnnnnnnnnnnnnnnnnnnnnnnnnnnnnnnnnnnnnnnnnnnnnnnnnnnnnnnnnnnnnnnnnnnnnnnnnnnnnnnnnnnnnnnnnnnnnnnnnnnnnnnnnnnnnnnnnnnnnnnnnnnnnnnnnnnnnnnnnnnnnnnnnnnnnnnnnnnnnnnnnnnnnnnnnnnnnnnnnnnnnnnnnnnnnnnnnnnnnnnnnnnnnnnnnnnnnnnnnnnnnnnnnnnnnnnnnnnnnnnnnnnnnnnnnnnnnnnnnnnnnnnnnnnnnnnnnnnnnnnnnnnnnnnnnnnnnnnnnnnnnnnnnnnnnnnnnnnnnnnnnnnnnnnnnnnnnnnnnnnnnnnnnnnnnnnnnnnnnnnnnnnnnnnnnnnnnnnnnnnnnnnnnnnnnnnnnnnnnnnnnnnnnnnnnnnnnnnnnnnnnnnnnnnnnnnnnnnnnnnnnnnnnnnnnnnnnnnnnnnnnnnnnnnnnnnnnnnnnnnnnnnnnnnnnnnnnnnnnnnnnnnnnnnnnnnnnnnnnnnnnnnnnnnnnnnnnnnnnnnnnnnnnnnnnnnnnnnnnnnnnnnnnnnnnnnnnnnnnnnnnnnnnnnnnnnnnnnnnnnnnnnnnnnnnnnnnnnnnnnnnnnnnnnnnnnnnnnnnnnnnnnnnnnnnnnnnnnnnnnnnnnnnnnnnnnnnnnnnnnnnnnnnnnnnnnnnnnnnnnnnnnnnnnnnnnnnnnnnnnnnnnnnnnnnnnnnnnnnnnnnnnnnnnnnnnnnnnnnnnnnnnnnnnnnnnnnnnnnnnnnnnnnnnnnnnnnnnnnnnnnnnnnnnnnnnnnnnnnnnnnnnnnnnnnnnnnnnnnnnnnnnnnnnnnnnnnnnnnnnnnnnnnnnnnnnnnnnnnnnnnnnnnnnnnnnnnnnnnnnnnnnnnnnnnnnnnnnnnnnnnnnnnnnnnnnnnnnnnnnnnnnnnnnnnnnnnnnnnnnnnnnnnnnnnnnnnnnnnnnnnnnnnnnnnnnnnnnnnnnnnnnnnnnnnnnnnnnnnnnnnnnnnnnnnnnnnnnnnnnnnnnnnnnnnnnnnnnnnnnnnnnnnnnnnnnnnnnnnnnnnnnnnnnnnnnnnnnnnnnnnnnnnnnnnnnnnnnnnnnnnnnnnnnnnnnnnnnnnnnnnnnnnnnnnnnnnnnnnnnnnnnnnnnnnnnnnnnnnnnnnnnnnnnnnnnnnnnnnnnnnnnnnnnnnnnnnnnnnnnnnnnnnnnnnnnnnnnnnnnnnnnnnnnnnnnnnnnnnnnnnnnnnnnnnnnnnnnnnnnnnnnnnnnnnnnnnnnnnnnnnnnnnnnnnnnnnnnnnnnnnnnnnnnnnnnnnnnnnnnnnnnnnnnnnnnnnnnnnnnnnnnnnnnnnnnnnnnnnnnnnnnnnnnnnnnnnnnnnnnnnnnnnnnnnnnnnnnnnnnnnnnnnnnnnnnnnnnnnnnnnnnnnnnnnnnnnnnnnnnnnnnnnnnnnnnnnnnnnnnnnnnnnnnnnnnnnnnnnnnnnnnnnnnnnnnnnnnnnnnnnnnnnnnnnnnnnnnnnnnnnnnnnnnnnnnnnnnnnnnnnnnnnnnnnnnnnnnnnnnnnnnnnnnnnnnnnnnnnnnnnnnnnnnnnnnnnnnnnnnnnnnnnnnnnnnnnnnnnnnnnnnnnnnnnnnnnnnnnnnnnnnnnnnnnnnnnnnnnnnnnnnnnnnnnnnnnnnnnnnnnnnnnnnnnnnnnnnnnnnnnnnnnnnnnnnnnnnnnnnnnnnnnnnnnnnnnnnnnnnnnnnnnnnnnnnnnnnnnnnnnnnnnnnnnnnnnnnnnnnnnnnnnnnnnnnnnnnnnnnnnnnnnnnnnnnnnnnnnnnnnnnnnnnnnnnnnnnnnnnnnnnnnnnnnnnnnnnnnnnnnnnnnnnnnnnnnnnnnnnnnnnnnnnnnnnnnnnnnnnnnnnnnnnnnnnnnnnnnnnnnnnnnnnnnnnnnnnnnnnnnnnnnnnnnnnnnnnnnnnnnnnnnnnnnnnnnnnnnnnnnnnnnnnnnnnnnnnnnnnnnnnnnnnnnnnnnnnnnnnnnnnnnnnnnnnnnnnnnnnnnnnnnnnnnnnnnnnnnnnnnnnnnnnnnnnnnnnnnnnnnnnnnnnnnnnnnnnnnnnnnnnnnnnnnnnnnnnnnnnnnnnnnnnnnnnnnnnnnnnnnnnnnnnnnnnnnnnnnnnnnnnnnnnnnnnnnnnnnnnnnnnnnnnnnnnnnnnnnnnnnnnnnnnnnnnnnnnnnnnnnnnnnnnnnnnnnnnnnnnnnnnnnnnnnnnnnnnnnnnnnnnnnnnnnnnnnnnnnnnnnnnnnnnnnnnnnnnnnnnnnnnnnnnnnnnnnnnnnnnnnnnnnnnnnnnnnnnnnnnnnnnnnnnnnnnnnnnnnnnnnnnnnnnnnnnnnnnnnnnnnnnnnnnnnnnnnnnnnnnnnnnnnnnnnnnnnnnnnnnnnnnnnnnnnnnnnnnnnnnnnnnnnnnnnnnnnnnnnnnnnnnnnnnnnnnnnnnnnnnnnnnnnnnnnnnnnnnnnnnnnnnnnnnnnnnnnnnnnnnnnnnnnnnnnnnnnnnnnnnnnnnnnnnnnnnnnnnnnnnnnnnnnnnnnnnnnnnnnnnnnnnnnnnnnnnnnnnnnnnnnnnnnnnnnnnnnnnnnnnnnnnnnnnnnnnnnnnnnnnnnnnnnnnnnnnnnnnnnnnnnnnnnnnnnnnnnnnnnnnnnnnnnnnnnnnnnnnnnnnnnnnnnnnnnnnnnnnnnnnnnnnnnnnnnnnnnnnnnnnnnnnnnnnnnnnnnnnnnnnnnnnnnnnnnnnnnnnnnnnnnnnnnnnnnnnnnnnnnnnnnnnnnnnnnnnnnnnnnnnnnnnnnnnnnnnnnnnnnnnnnnnnnnnnnnnnnnnnnnnnnnnnnnnnnnnnnnnnnnnnnnnnnnnnnnnnnnnnnnnnnnnnnnnnnnnnnnnnnnnnnnnnnnnnnnnnnnnnnnnnnnnnnnnnnnnnnnnnnnnnnnnnnnnnnnnnnnnnnnnnnnnnnnnnnnnnnnnnnnnnnnnnnnnnnnnnnnnnnnnnnnnnnnnnnnnnnnnnnnnnnnnnnnnnnnnnnnnnnnnnnnnnnnnnnnnnnnnnnnnnnnnnnnnnnnnnnnnnnnnnnnnnnnnnnnnnnnnnnnnnnnnnnnnnnnnnnnnnnnnnnnnnnnnnnnnnnnnnnnnnnnnnnnnnnnnnnnnnnnnnnnnnnnnnnnnnnnnnnnnnnnnnnnnnnnnnnnnnnnnnnnnnnnnnnnnnnnnnnnnnnnnnnnnnnnnnnnnnnnnnnnnnnnnnnnnnnnnnnnnnnnnnnnnnnnnnnnnnnnnnnnnnnnnnnnnnnnnnnnnnnnnnnnnnnnnnnnnnnnnnnnnnnnnnnnnnnnnnnnnnnnnnnnnnnnnnnnnnnnnnnnnnnnnnnnnnnnnnnnnnnnnnnnnnnnnnnnnnnnnnnnnnnnnnnnnnnnnnnnnnnnnnnnnnnnnnnnnnnnnnnnnnnnnnnnnnnnnnnnnnnnnnnnnnnnnnnnnnnnnnnnnnnnnnnnnnnnnnnnnnnnnnnnnnnnnnnnnnnnnnnnnnnnnnnnnnnnnnnnnnnnnnnnnnnnnnnnnnnnnnnnnnnnnnnnnnnnnnnnnnnnnnnnnnnnnnnnnnnnnnnnnnnnnnnnnnnnnnnnnnnnnnnnnnnnnnnnnnnnnnnnnnnnnnnnnnnnnnnnnnnnnnnnnnnnnnnnnnnnnnnnnnnnnnnnnnnnnnnnnnnnnnnnnnnnnnnnnnnnnnnnnnnnnnnnnnnnnnnnnnnnnnnnnnnnnnnnnnnnnnnnnnnnnnnnnnnnnnnnnnnnnnnnnnnnnnnnnnnnnnnnnnnnnnnnnnnnnnnnnnnnnnnnnnnnnnnnnnnnnnnnnnnnnnnnnnnnnnnnnnnnnnnnnnnnnnnnnnnnnnnnnnnnnnnnnnnnnnnnnnnnnnnnnnnnnnnnnnnnnnnnnnnnnnnnnnnnnnnnnnnnnnnnnnnnnnnnnnnnnnnnnnnnnnnnnnnnnnnnnnnnnnnnnnnnnnnnnnnnnnnnnnnnnnnnnnnnnnnnnnnnnnnnnnnnnnnnnnnnnnnnnnnnnnnnnnnnnnnnnnnnnnnnnnnnnnnnnnnnnnnnnnnnnnnnnnnnnnnnnnnnnnnnnnnnnnnnnnnnnnnnnnnnnnnnnnnnnnnnnnnnnnnnnnnnnnnnnnnnnnnnnnnnnnnnnnnnnnnnnnnnnnnnnnnnnnnnnnnnnnnnnnnnnnnnnnnnnnnnnnnnnnnnnnnnnnnnnnnnnnnnnnnnnnnnnnnnnnnnnnnnnnnnnnnnnnnnnnnnnnnnnnnnnnnnnnnnnnnnnnnnnnnnnnnnnnnnnnnnnnnnnnnnnnnnnnnnnnnnnnnnnnnnnnnnnnnnnnnnnnnnnnnnnnnnnnnnnnnnnnnnnnnnnnnnnnnnnnnnnnnnnnnnnnnnnnnnnnnnnnnnnnnnnnnnnnnnnnnnnnnnnnnnnnnnnnnnnnnnnnnnnnnnnnnnnnnnnnnnnnnnnnnnnnnnnnnnnnnnnnnnnnnnnnnnnnnnnnnnnnnnnnnnnnnnnnnnnnnnnnnnnnnnnnnnnnnnnnnnnnnnnnnnnnnnnnnnnnnnnnnnnnnnnnnnnnnnnnnnnnnnnnnnnnnnnnnnnnnnnnnnnnnnnnnnnnnnnnnnnnnnnnnnnnnnnnnnnnnnnnnnnnnnnnnnnnnnnnnnnnnnnnnnnnnnnnnnnnnnnnnnnnnnnnnnnnnnnnnnnnnnnnnnnnnnnnnnnnnnnnnnnnnnnnnnnnnnnnnnnnnnnnnnnnnnnnnnnnnnnnnnnnnnnnnnnnnnnnnnnnnnnnnnnnnnnnnnnnnnnnnnnnnnnnnnnnnnnnnnnnnnnnnnnnnnnnnnnnnnnnnnnnnnnnnnnnnnnnnnnnnnnnnnnnnnnnnnnnnnnnnnnnnnnnnnnnnnnnnnnnnnnnnnnnnnnnnnnnnnnnnnnnnnnnnnnnnnnnnnnnnnnnnnnnnnnnnnnnnnnnnnnnnnnnnnnnnnnnnnnnnnnnnnnnnnnnnnnnnnnnnnnnnnnnnnnnnnnnnnnnnnnnnnnnnnnnnnnnnnnnnnnnnnnnnnnnnnnnnnnnnnnnnnnnnnnnnnnnnnnnnnnnnnnnnnnnnnnnnnnnnnnnnnnnnnnnnnnnnnnnnnnnnnnnnnnnnnnnnnnnnnnnnnnnnnnnnnnnnnnnnnnnnnnnnnnnnnnnnnnnnnnnnnnnnnnnnnnnnnnnnnnnnnnnnnnnnnnnnnnnnnnnnnnnnnnnnnnnnnnnnnnnnnnnnnnnnnnnnnnnnnnnnnnnnnnnnnnnnnnnnnnnnnnnnnnnnnnnnnnnnnnnnnnnnnnnnnnnnnnnnnnnnnnnnnnnnnnnnnnnnnnnnnnnnnnnnnnnnnnnnnnnnnnnnnnnnnnnnnnnnnnnnnnnnnnnnnnnnnnnnnnnnnnnnnnnnnnnnnnnnnnnnnnnnnnnnnnnnnnnnnnnnnnnnnnnnnnnnnnnnnnnnnnnnnnnnnnnnnnnnnnnnnnnnnnnnnnnnnnnnnnnnnnnnnnnnnnnnnnnnnnnnnnnnnnnnnnnnnnnnnnnnnnnnnnnnnnnnnnnnnnnnnnnnnnnnnnnnnnnnnnnnnnnnnnnnnnnnnnnnnnnnnnnnnnnnnnnnnnnnnnnnnnnnnnnnnnnnnnnnnnnnnnnnnnnnnnnnnnnnnnnnnnnnnnnnnnnnnnnnnnnnnnnnnnnnnnnnnnnnnnnnnnnnnnnnnnnnnnnnnnnnnnnnnnnnnnnnnnnnnnnnnnnnnnnnnnnnnnnnnnnnnnnnnnnnnnnnnnnnnnnnnnnnnnnnnnnnnnnnnnnnnnnnnnnnnnnnnnnnnnnnnnnnnnnnnnnnnnnnnnnnnnnnnnnnnnnnnnnnnnnnnnnnnnnnnnnnnnnnnnnnnnnnnnnnnnnnnnnnnnnnnnnnnnnnnnnnnnnnnnnnnnnnnnnnnnnnnnnnnnnnnnnnnnnnnnnnnnnnnnnnnnnnnnnnnnnnnnnnnnnnnnnnnnnnnnnnnnnnnnnnnnnnnnnnnnnnnnnnnnnnnnnnnnnnnnnnnnnnnnnnnnnnnnnnnnnnnnnnnnnnnnnnnnnnnnnnnnnnnnnnnnnnnnnnnnnnnnnnnnnnnnnnnnnnnnnnnnnnnnnnnnnnnnnnnnnnnnnnnnnnnnnnnnnnnnnnnnnnnnnnnnnnnnnnnnnnnnnnnnnnnnnnnnnnnnnnnnnnnnnnnnnnnnnnnnnnnnnnnnnnnnnnnnnnnnnnnnnnnnnnnnnnnnnnnnnnnnnnnnnnnnnnnnnnnnnnnnnnnnnnnnnnnnnnnnnnnnnnnnnnnnnnnnnnnnnnnnnnnnnnnnnnnnnnnnnnnnnnnnnnnnnnnnnnnnnnnnnnnnnnnnnnnnnnnnnnnnnnnnnnnnnnnnnnnnnnnnnnnnnnnnnnnnnnnnnnnnnnnnnnnnnnnnnnnnnnnnnnnnnnnnnnnnnnnnnnnnnnnnnnnnnnnnnnnnnnnnnnnnnnnnnnnnnnnnnnnnnnnnnnnnnnnnnnnnnnnnnnnnnnnnnnnnnnnnnnnnnnnnnnnnnnnnnnnnnnnnnnnnnnnnnnnnnnnnnnnnnnnnnnnnnnnnnnnnnnnnnnnnnnnnnnnnnnnnnnnnnnnnnnnnnnnnnnnnnnnnnnnnnnnnnnnnnnnnnnnnnnnnnnnnnnnnnnnnnnnnnnnnnnnnnnnnnnnnnnnnnnnnnnnnnnnnnnnnnnnnnnnnnnnnnnnnnnnnnnnnnnnnnnnnnnnnnnnnnnnnnnnnnnnnnnnnnnnnnnnnnnnnnnnnnnnnnnnnnnnnnnnnnnnnnnnnnnnnnnnnnnnnnnnnnnnnnnnnnnnnnnnnnnnnnnnnnnnnnnnnnnnnnnnnnnnnnnnnnnnnnnnnnnnnnnnnnnnnnnnnnnnnnnnnnnnnnnnnnnnnnnnnnnnnnnnnnnnnnnnnnnnnnnnnnnnnnnnnnnnnnnnnnnnnnnnnnnnnnnnnnnnnnnnnnnnnnnnnnnnnnnnnnnnnnnnnnnnnnnnnnnnnnnnnnnnnnnnnnnnnnnnnnnnnnnnnnnnnnnnnnnnnnnnnnnnnnnnnnnnnnnnnnnnnnnnnnnnnnnnnnnnnnnnnnnnnnnnnnnnnnnnnnnnnnnnnnnnnnnnnnnnnnnnnnnnnnnnnnnnnnnnnnnnnnnnnnnnnnnnnnnnnnnnnnnnnnnnnnnnnnnnnnnnnnnnnnnnnnnnnnnnnnnnnnnnnnnnnnnnnnnnnnnnnnnnnnnnnnnnnnnnnnnnnnnnnnnnnnnnnnnnnnnnnnnnnnnnnnnnnnnnnnnnnnnnnnnnnnnnnnnnnnnnnnnnnnnnnnnnnnnnnnnnnnnnnnnnnnnnnnnnnnnnnnnnnnnnnnnnnnnnnnnnnnnnnnnnnnnnnnnnnnnnnnnnnnnnnnnnnnnnnnnnnnnnnnnnnnnnnnnnnnnnnnnnnnnnnnnnnnnnnnnnnnnnnnnnnnnnnnnnnnnnnnnnnnnnnnnnnnnnnnnnnnnnnnnnnnnnnnnnnnnnnnnnnnnnnnnnnnnnnnnnnnnnnnnnnnnnnnnnnnnnnnnnnnnnnnnnnnnnnnnnnnnnnnnnnnnnnnnnnnnnnnnnnnnnnnnnnnnnnnnnnnnnnnnnnnnnnnnnnnnnnnnnnnnnnnnnnnnnnnnnnnnnnnnnnnnnnnnnnnnnnnnnnnnnnnnnnnnnnnnnnnnnnnnnnnnnnnnnnnnnnnnnnnnnnnnnnnnnnnnnnnnnnnnnnnnnnnnnnnnnnnnnnnnnnnnnnnnnnnnnnnnnnnnnnnnnnnnnnnnnnnnnnnnnnnnnnnnnnnnnnnnnnnnnnnnnnnnnnnnnnnnnnnnnnnnnnnnnnnnnnnnnnnnnnnnnnnnnnnnnnnnnnnnnnnnnnnnnnnnnnnnnnnnnnnnnnnnnnnnnnnnnnnnnnnnnnnnnnnnnnnnnnnnnnnnnnnnnnnnnnnnnnnnnnnnnnnnnnnnnnnnnnnnnnnnnnnnnnnnnnnnnnnnnnnnnnnnnnnnnnnnnnnnnnnnnnnnnnnnnnnnnnnnnnnnnnnnnnnnnnnnnnnnnnnnnnnnnnnnnnnnnnnnnnnnnnnnnnnnnnnnnnnnnnnnnnnnnnnnnnnnnnnnnnnnnnnnnnnnnnnnnnnnnnnnnnnnnnnnnnnnnnnnnnnnnnnnnnnnnnnnnnnnnnnnnnnnnnnnnnnnnnnnnnnnnnnnnnnnnnnnnnnnnnnnnnnnnnnnnnnnnnnnnnnnnnnnnnnnnnnnnnnnnnnnnnnnnnnnnnnnnnnnnnnnnnnnnnnnnnnnnnnnnnnnnnnnnnnnnnnnnnnnnnnnnnnnnnnnnnnnnnnnnnnnnnnnnnnnnnnnnnnnnnnnnnnnnnnnnnnnnnnnnnnnnnnnnnnnnnnnnnnnnnnnnnnnnnnnnnnnnnnnnnnnnnnnnnnnnnnnnnnnnnnnnnnnnnnnnnnnnnnnnnnnnnnnnnnnnnnnnnnnnnnnnnnnnnnnnnnnnnnnnnnnnnnnnnnnnnnnnnnnnnnnnnnnnnnnnnnnnnnnnnnnnnnnnnnnnnnnnnnnnnnnnnnnnnnnnnnnnnnnnnnnnnnnnnnnnnnnnnnnnnnnnnnnnnnnnnnnnnnnnnnnnnnnnnnnnnnnnnnnnnnnnnnnnnnnnnnnnnnnnnnnnnnnnnnnnnnnnnnnnnnnnnnnnnnnnnnnnnnnnnnnnnnnnnnnnnnnnnnnnnnnnnnnnnnnnnnnnnnnnnnnnnnnnnnnnnnnnnnnnnnnnnnnnnnnnnnnnnnnnnnnnnnnnnnnnnnnnnnnnnnnnnnnnnnnnnnnnnnnnnnnnnnnnnnnnnnnnnnnnnnnnnnnnnnnnnnnnnnnnnnnnnnnnnnnnnnnnnnnnnnnnnnnnnnnnnnnnnnnnnnnnnnnnnnnnnnnnnnnnnnnnnnnnnnnnnnnnnnnnnnnnnnnnnnnnnnnnnnnnnnnnnnnnnnnnnnnnnnnnnnnnnnnnnnnnnnnnnnnnnnnnnnnnnnnnnnnnnnnnnnnnnnnnnnnnnnnnnnnnnnnnnnnnnnnnnnnnnnnnnnnnnnnnnnnnnnnnnnnnnnnnnnnnnnnnnnnnnnnnnnnnnnnnnnnnnnnnnnnnnnnnnnnnnnnnnnnnnnnnnnnnnnnnnnnnnnnnnnnnnnnnnnnnnnnnnnnnnnnnnnnnnnnnnnnnnnnnnnnnnnnnnnnnnnnnnnnnnnnnnnnnnnnnnnnnnnnnnnnnnnnnnnnnnnnnnnnnnnnnnnnnnnnnnnnnnnnnnnnnnnnnnnnnnnnnnnnnnnnnnnnnnnnnnnnnnnnnnnnnnnnnnnnnnnnnnnnnnnnnnnnnnnnnnnnnnnnnnnnnnnnnnnnnnnnnnnnnnnnnnnnnnnnnnnnnnnnnnnnnnnnnnnnnnnnnnnnnnnnnnnnnnnnnnnnnnnnnnnnnnnnnnnnnnnnnnnnnnnnnnnnnnnnnnnnnnnnnnnnnnnnnnnnnnnnnnnnnnnnnnnnnnnnnnnnnnnnnnnnnnnnnnnnnnnnnnnnnnnnnnnnnnnnnnnnnnnnnnnnnnnnnnnnnnnnnnnnnnnnnnnnnnnnnnnnnnnnnnnnnnnnnnnnnnnnnnnnnnnnnnnnnnnnnnnnnnnnnnnnnnnnnnnnnnnnnnnnnnnnnnnnnnnnnnnnnnnnnnnnnnnnnnnnnnnnnnnnnnnnnnnnnnnnnnnnnnnnnnnnnnnnnnnnnnnnnnnnnnnnnnnnnnnnnnnnnnnnnnnnnnnnnnnnnnnnnnnnnnnnnnnnnnnnnnnnnnnnnnnnnnnnnnnnnnnnnnnnnnnnnnnnnnnnnnnnnnnnnnnnnnnnnnnnnnnnnnnnnnnnnnnnnnnnnnnnnnnnnnnnnnnnnnnnnnnnnnnnnnnnnnnnnnnnnnnnnnnnnnnnnnnnnnnnnnnnnnnnnnnnnnnnnnnnnnnnnnnnnnnnnnnnnnnnnnnnnnnnnnnnnnnnnnnnnnnnnnnnnnnnnnnnnnnnnnnnnnnnnnnnnnnnnnnnnnnnnnnnnnnnnnnnnnnnnnnnnnnnnnnnnnnnnnnnnnnnnnnnnnnnnnnnnnnnnnnnnnnnnnnnnnnnnnnnnnnnnnnnnnnnnnnnnnnnnnnnnnnnnnnnnnnnnnnnnnnnnnnnnnnnnnnnnnnnnnnnnnnnnnnnnnnnnnnnnnnnnnnnnnnnnnnnnnnnnnnnnnnnnnnnnnnnnnnnnnnnnnnnnnnnnnnnnnnnnnnnnnnnnnnnnnnnnnnnnnnnnnnnnnnnnnnnnnnnnnnnnnnnnnnnnnnnnnnnnnnnnnnnnnnnnnnnnnnnnnnnnnnnnnnnnnnnnnnnnnnnnnnnnnnnnnnnnnnnnnnnnnnnnnnnnnnnnnnnnnnnnnnnnnnnnnnnnnnnnnnnnnnnnnnnnnnnnnnnnnnnnnnnnnnnnnnnnnnnnnnnnnnnnnnnnnnnnnnnnnnnnnnnnnnnnnnnnnnnnnnnnnnnnnnnnnnnnnnnnnnnnnnnnnnnnnnnnnnnnnnnnnnnnnnnnnnnnnnnnnnnnnnnnnnnnnnnnnnnnnnnnnnnnnnnnnnnnnnnnnnnnnnnnnnnnnnnnnnnnnnnnnnnnnnnnnnnnnnnnnnnnnnnnnnnnnnnnnnnnnnnnnnnnnnnnnnnnnnnnnnnnnnnnnnnnnnnnnnnnnnnnnnnnnnnnnnnnnnnnnnnnnnnnnnnnnnnnnnnnnnnnnnnnnnnnnnnnnnnnnnnnnnnnnnnnnnnnnnnnnnnnnnnnnnnnnnnnnnnnnnnnnnnnnnnnnnnnnnnnnnnnnnnnnnnnnnnnnnnnnnnnnnnnnnnnnnnnnnnnnnnnnnnnnnnnnnnnnnnnnnnnnnnnnnnnnnnnnnnnnnnnnnnnnnnnnnnnnnnnnnnnnnnnnnnnnnnnnnnnnnnnnnnnnnnnnnnnnnnnnnnnnnnnnnnnnnnnnnnnnnnnnnnnnnnnnnnnnnnnnnnnnnnnnnnnnnnnnnnnnnnnnnnnnnnnnnnnnnnnnnnnnnnnnnnnnnnnnnnnnnnnnnnnnnnnnnnnnnnnnnnnnnnnnnnnnnnnnnnnnnnnnnnnnnnnnnnnnnnnnnnnnnnnnnnnnnnnnnnnnnnnnnnnnnnnnnnnnnnnnnnnnnnnnnnnnnnnnnnnnnnnnnnnnnnnnnnnnnnnnnnnnnnnnnnnnnnnnnnnnnnnnnnnnnnnnnnnnnnnnnnnnnnnnnnnnnnnnnnnnnnnnnnnnnnnnnnnnnnnnnnnnnnnnnnnnnnnnnnnnnnnnnnnnnnnnnnnnnnnnnnnnnnnnnnnnnnnnnnnnnnnnnnnnnnnnnnnnnnnnnnnnnnnnnnnnnnnnnnnnnnnnnnnnnnnnnnnnnnnnnnnnnnnnnnnnnnnnnnnnnnnnnnnnnnnnnnnnnnnnnnnnnnnnnnnnnnnnnnnnnnnnnnnnnnnnnnnnnnnnnnnnnnnnnnnnnnnnnnnnnnnnnnnnnnnnnnnnnnnnnnnnnnnnnnnnnnnnnnnnnnnnnnnnnnnnnnnnnnnnnnnnnnnnnnnnnnnnnnnnnnnnnnnnnnnnnnnnnnnnnnnnnnnnnnnnnnnnnnnnnnnnnnnnnnnnnnnnnnnnnnnnnnnnnnnnnnnnnnnnnnnnnnnnnnnnnnnnnnnnnnnnnnnnnnnnnnnnnnnnnnnnnnnnnnnnnnnnnnnnnnnnnnnnnnnnnnnnnnnnnnnnnnnnnnnnnnnnnnnnnnnnnnnnnnnnnnnnnnnnnnnnnnnnnnnnnnnnnnnnnnnnnnnnnnnnnnnnnnnnnnnnnnnnnnnnnnnnnnnnnnnnnnnnnnnnnnnnnnnnnnnnnnnnnnnnnnnnnnnnnnnnnnnnnnnnnnnnnnnnnnnnnnnnnnnnnnnnnnnnnnnnnnnnnnnnnnnnnnnnnnnnnnnnnnnnnnnnnnnnnnnnnnnnnnnnnnnnnnnnnnnnnnnnnnnnnnnnnnnnnnnnnnnnnnnnnnnnnnnnnnnnnnnnnnnnnnnnnnnnnnnnnnnnnnnnnnnnnnnnnnnnnnnnnnnnnnnnnnnnnnnnnnnnnnnnnnnnnnnnnnnnnnnnnnnnnnnnnnnnnnnnnnnnnnnnnnnnnnnnnnnnnnnnnnnnnnnnnnnnnnnnnnnnnnnnnnnnnnnnnnnnnnnnnnnnnnnnnnnnnnnnnnnnnnnnnnnnnnnnnnnnnnnnnnnnnnnnnnnnnnnnnnnnnnnnnnnnnnnnnnnnnnnnnnnnnnnnnnnnnnnnnnnnnnnnnnnnnnnnnnnnnnnnnnnnnnnnnnnnnnnnnnnnnnnnnnnnnnnnnnnnnnnnnnnnnnnnnnnnnnnnnnnnnnnnnnnnnnnnnnnnnnnnnnnnnnnnnnnnnnnnnnnnnnnnnnnnnnnnnnnnnnnnnnnnnnnnnnnnnnnnnnnnnnnnnnnnnnnnnnnnnnnnnnnnnnnnnnnnnnnnnnnnnnnnnnnnnnnnnnnnnnnnnnnnnnnnnnnnnnnnnnnnnnnnnnnnnnnnnnnnnnnnnnnnnnnnnnnnnnnnnnnnnnnnnnnnnnnnnnnnnnnnnnnnnnnnnnnnnnnnnnnnnnnnnnnnnnnnnnnnnnnnnnnnnnnnnnnnnnnnnnnnnnnnnnnnnnnnnnnnnnnnnnnnnnnnnnnnnnnnnnnnnnnnnnnnnnnnnnnnnnnnnnnnnnnnnnnnnnnnnnnnnnnnnnnnnnnnnnnnnnnnnnnnnnnnnnnnnnnnnnnnnnnnnnnnnnnnnnnnnnnnnnnnnnnnnnnnnnnnnnnnnnnnnnnnnnnnnnnnnnnnnnnnnnnnnnnnnnnnnnnnnnnnnnnnnnnnnnnnnnnnnnnnnnnnnnnnnnnnnnnnnnnnnnnnnnnnnnnnnnnnnnnnnnnnnnnnnnnnnnnnnnnnnnnnnnnnnnnnnnnnnnnnnnnnnnnnnnnnnnnnnnnnnnnnnnnnnnnnnnnnnnnnnnnnnnnnnnnnnnnnnnnnnnnnnnnnnnnnnnnnnnnnnnnnnnnnnnnnnnnnnnnnnnnnnnnnnnnnnnnnnnnnnnnnnnnnnnnnnnnnnnnnnnnnnnnnnnnnnnnnnnnnnnnnnnnnnnnnnnnnnnnnnnnnnnnnnnnnnnnnnnnnnnnnnnnnnnnnnnnnnnnnnnnnnnnnnnnnnnnnnnnnnnnnnnnnnnnnnnnnnnnnnnnnnnnnnnnnnnnnnnnnnnnnnnnnnnnnnnnnnnnnnnnnnnnnnnnnnnnnnnnnnnnnnnnnnnnnnnnnnnnnnnnnnnnnnnnnnnnnnnnnnnnnnnnnnnnnnnnnnnnnnnnnnnnnnnnnnnnnnnnnnnnnnnnnnnnnnnnnnnnnnnnnnnnnnnnnnnnnnnnnnnnnnnnnnnnnnnnnnnnnnnnnnnnnnnnnnnnnnnnnnnnnnnnnnnnnnnnnnnnnnnnnnnnnnnnnnnnnnnnnnnnnnnnnnnnnnnnnnnnnnnnnnnnnnnnnnnnnnnnnnnnnnnnnnnnnnnnnnnnnnnnnnnnnnnnnnnnnnnnnnnnnnnnnnnnnnnnnnnnnnnnnnnnnnnnnnnnnnnnnnnnnnnnnnnnnnnnnnnnnnnnnnnnnnnnnnnnnnnnnnnnnnnnnnnnnnnnnnnnnnnnnnnnnnnnnnnnnnnnnnnnnnnnnnnnnnnnnnnnnnnnnnnnnnnnnnnnnnnnnnnnnnnnnnnnnnnnnnnnnnnnnnnnnnnnnnnnnnnnnnnnnnnnnnnnnnnnnnnnnnnnnnnnnnnnnnnnnnnnnnnnnnnnnnnnnnnnnnnnnnnnnnnnnnnnnnnnnnnnnnnnnnnnnnnnnnnnnnnnnnnnnnnnnnnnnnnnnnnnnnnnnnnnnnnnnnnnnnnnnnnnnnnnnnnnnnnnnnnnnnnnnnnnnnnnnnnnnnnnnnnnnnnnnnnnnnnnnnnnnnnnnnnnnnnnnnnnnnnnnnnnnnnnnnnnnnnnnnnnnnnnnnnnnnnnnnnnnnnnnnnnnnnnnnnnnnnnnnnnnnnnnnnnnnnnnnnnnnnnnnnnnnnnnnnnnnnnnnnnnnnnnnnnnnnnnnnnnnnnnnnnnnnnnnnnnnnnnnnnnnnnnnnnnnnnnnnnnnnnnnnnngccaacaatcaaaccttgcctctaaacgtggccgtgcaggcagcgggaatcgtggccattaccctcggtgacggcagcgctgtcggccgcatgcccatggacatgtactggaagaactccctgttcgaggccatttacctgggctccgagctcaacattggtggcctgataaccggcatccagttctacaacgacttcgtcagcaacctgcccaacatgcccactaatatttggttaggcgagaccacccagaccgatctgtcggctggctggatcccttcaacccagctcaccgcggtgttcgccggtaacgtcgattatcccagcggtccgaacaacatcaacattgccttcaccaccccttacacctacgcgggcggtaacctggtattgctggtggaacgcccgatggataccgaatggcacaattacaacgataacttcctcacccagactggggaccttgcggcccgttctctgaaggtccagtcggactcccaggactacgatcctgccgctcctcctaccggtacaagtccctccgctatgttccccaagaccactttcttcctggtcgtggacgacatgggcgcgcttaccggtaccgtgcgtgacgcgaacaacgttgccatgcccggcgctacggtttccatcactggaacccccctcaccaccctcaccgacgccaacggcgtttacaacttcccctacgtggcgatgggaccccagagcgtcgtggccaccaaacacggctacaacgtcgttacccacaacgtaaccatcatcgaagatgaaactgtcacccaggacttcgtgctcacccaactgcctcaggtcaccgtgaccggccgcatcgtgggcagcgaccaacccacagttggcctggctgacgccaccatcagcctcacaggttacgagccttaccaggctacaaccaacgccagcggccaattcaccatcactggcgtctatgccagccagacttacgaatacaccgctcaagccatcggttaccaagctgccatcggccaagccgtggttggcaccaccgacctgaacatgggcgacatcaccgtgaacgaactggccttccctccctgccaagtggttgccacagaagcagcggactattcgcacgtaaccgtcacctggatggctccggatcccaatgctcagggtatctccgaagactttgaggaatacgaagacttctccctcaccttcgatccctgggttctggtggacgttgatcaaagcggcacttatggtatgaccggctacacttggccgaacgtctattcccccatggcttacatgatcttcaaccccagcgctgccactccgccggttaccactattaccgcccacagcggaaacaaaatggctgcctgcttcgccagcactgatgctgtcaacgacgattggctgatctctccgccgatgatcgcgaccgcaagtcagttcctgaacttctacgcgaggtcctacagcgatgcttacggcctggaacgcttcaaagtgggtatttccaccggcggcactgcccccgcggacttcaccatcatcagcggccccagctacatccaggcgcccattgaatggacactgtacagctatgacctcagcgcttacgctggccagaacatccgcttcgccatccagtgcgtttccgacgacgccttctacttcgtggtggacgatgtgagcgtgggccccgttcctacagccaaggaacactttgcctccgcttcctccttcagctcccgtaataccaacacccagagcttctccaccagttcaattgttaccagaagcattggaaacgcggcttcggcatcccgcaacgtgggaaccagccatgccaataacccccgtattcaggtaccagacttccagatgttcactccttccaattcggaccgcgtacttggtggatacaaggtctatcgcctgcttgctgacaaccaggacaacgagtcactctggacgaccctgaccccatctgtcattcccagcactaccaccacctataccgacaacgcctgggccccgctgccttccggcgtttacaaatatgcagtcaaagctgtttacaccaacaacgtcctgtcccccgccgtcttctccggtgagatacacaaaggcatgatgggcaccctgaccggtaccgtgaccgaattcggcaccaacgtcccgatcgaaggagctaccatcaccgccggcgattacagcggcacctccgacaacaacggacattattccttcagcgtctatcagggagtttacaccgtcacctgctcgaaagtcggctatcaggccgcttcccagaccggtgtgagcgttaccggactgcaaaccaccacccaggacttcgtactcacagagatcaccctgcctccttgcgcggtggaagccgtggcagtgagcaacagcttggtcaacttgacctggatggagcctggcactggcggcggcgaatggatctactacgacaccggcgaaaacgatgacagcatcggcctcgtctccggtggtgaattcagtgtcgccattcgtttcccgccctccgctcttaccgactatgccggcatgagcctccacgccatatccctcttcccaggcgatgtgggcacctactccctgcgtgtctggaccggtggcaccgccagcgctcccgaaacccaggttgttgaccaacccttcaccgtgcaagccgtagacacgttccaaaccgtggttttggataaccccgtgcttatttcaggcaacgaggaactctggtttggctacaacgtcagccatgctgcgggcgcctatcccgcaggctgtgacggcggccccgccaccaacggcttcggcaacatgatctacaactccggtgaatgggcaactctgaccgacctggctccgagcctcaactacaactggaacatccgcggctacgtgggatattcagctcccaacgatgtgtgcgcgatcgatcccagcatcctcaaacacatcccgtccgacaacatcaaagccagcaaagacatcagtgcctgcaaagacaacgaccgtgtcctcgtcggctacagagtctggcgcttgctgcaaggccaggaaaacaacgattcagcctggactcagctcaccaccggacccatcaccgcgactgcctggccggacaacggatggggcggcgtgcctgacggctggtacaaatgggctgtgaaagccatctacaccggcgaagcgcaatccctgccagccttctccaatgctgtgcagaaacttacccagatcggaaccattgccggtatcgtccgcgatatggccaacgcccccatcatgggagcaaccgtatcttgcggcgacgtgactgccaccaccaacgccagcggagcctacagcatgcaggttcccgcgggcacctggagcgtaaccgccagccacccgaactacacacctgtcacccaggacggagtgattgtcgttaccaaccagaccaccacggtgaacttccagctgccgatcagcaatgtgctgctctcggacggatttgagtcctacgaaaacttcgttatcgaattcgcgccctggaccacggttgacgttgacggcagcgcgacctatggcatgaccaataccacctggcctaacacccaaacaccacaggcctacatcatcttcaatcccagtgccaccactcctcccgccactaccatcgtacctcacggaggagataaaatggcagcctgtatcgccgcaactacccctcccaacaacgactggttgattactcccgtactccacaatccgctggaacttcgcttctgggcacgctccctgacggcgcagtacggaggactggaaaagttcaagatcggtgtctccaccactggaaccaacccctccgacttcaccatcatcagcggcagcactcccctcgaagctccccttgattggacagagtatgtgtataatctcagcaactacgatggtgacacctacgtgggcatccagtgcgtgtcccatgaccactggatcttcatgctggatgacttccatatcaccggcagaactgacagcgacgatcctatcgtccctgtggtcgccaccgagttgcacggaaactacccgaaccccttcaacccggaaaccaccatcagcttcagcgttaaggataaaggccacgtaaaggtcaatatctacaacgtgaaaggccaactggtgaagaccctcgtgaacgacaacatgaacgccggcaagcacaccattgtgtggaacggccgtgacaatgctggtaaagctgtctccagtggcgtctacttctacaagatgagcgctggcaaatacagcagcaccaaaaagatgatcatgatgaagtaattcatcgggatataacctataaccaagccccgggaccgaaaggttccggggctttttctactctcctgaaaagaacgtggatgacaggatcgactggatctttgaaggtggaaaggtgaaaaggtggaatggtggaaaggttcccccgaaacaagtccaccaggctatatactgtgtcatcacgagtggggtggcaaagtccgtttgccacagagaccggaggtctctcccaaaaaggcaactccgttgcctctgccgaacagacttcggcagcccttaagttatctgcgtatatctgcgtgaaccgcgtgaaccacttgaaccttgattctgtcttttcaagtcccaaacaagcacccagaccaaaaacaaccggcatcaattatttgacaatcgcattaaatatccaacacattccgcaatatgcttcatagcgccgtcccttgctgctactggctttggagtcatcatccttaggtcatccctcaccgggttaaggatgactgccggatgacccacgccggagaggggaatgcaaatgaggcccatccctctataatatataggtgctacgataggtggaaaggaggacttcgtggtgacgtggtgtcgtggtaacgtggtgctgtcggaaaagagatagaacgcggatgacaggatcgactggatctttgagagtggaaaggtgaaaaggtggaatggaggaaagtttcccccgaaacaagtccaccatgctatatactgtgtcatcatgagtggggtggcaaagtccgtttgccacagagaccggaggtctctcccaaaaaggcaactccgttgcctctgccgaacagacttcggcagccctggtccgaaacctccccccataatactaatccgcgctcatctgcgcctttatccgcgtatatctgcgtgaaccgcttgacccgggatccagtcaccccagaggagccacccccgtttcccgcctgttcagcgtgcagacagcagtcgtgtcaggaaagcttgtccagttcttcgcggacgtttttgcagcggggatagtctttgccaaaggtgttttcccagatgctcagcaccctggtcagtagttcccgggcggtgtttgtgtcgccttgtctggcgcgcagcctgcccagagagaagaggtaatgggctgtctgggaatggttttcgccatagtggagggtatggccgtctatcgcctgcttgagcagtggttccgcttcttccaggcgtccctggcgcagcagcacactgcccagatttccggcgcagaccgccgtaaaccagtgcccctgtgggaaaaggctttccatcatttccagcgcggcgcggagcatctcctccgctttgtccggcctgtccatcagactgtagagcgaggcgaggttgttcatgcggtctgccacgttggaactgggcccggggcgtttttcgatattcagcgagcggcgcagcagtttttcagcctgctcgtagcggctggtatctttgtaaaagcgtcccaggttgttcagatagggggagaggcgggggctgcgtggcccgagctggcgggttctggcctccaccaccttcagatagagcggctcggcatcgtccatgcggtgcatatagtgatagagcagggccagatggaagagccgttcgatgtgttccgggctgtccccgccccaggcctggcaggacaactcggctgccagcagcatacattcctcaatcttggccagcagcatgcggtcccagaagtaatcggccgccatctcatagtaatgggcggcttttttgagttccccggcggctttgaagtggcgggcgatctccgcggaatgctccttgagtgcctgttcaaagacggtttccatggcttcggcggccgccaggtgcagttttttaagctccttttcgcggatgctggcatagaccgccttctgtaacaggctgtgggaaaagatgtaaaagagttcatcggcatcctgccagattttccgtccccccgctttgcccagttgctggatggggttgccttcgagcatgtgggagaggaggacaacattgaagcggaagcccagcacactggcgccgcggacgctttcctgaacctttttggagagccgggcaatgcgccgggaaatcacctcgtcgatgcctcccgccgccgcttccaagccctcttgcgctatttcgccgtggggactgagcagcttgttttccagcagataagcggcaagctgttcggcattgaaaggattgccgcccgcgcaggcgtggaaagcggaaaaggcctcgcggggcaggcggggaaggcccagcagattgaggtagagcttgcggctggcgctggagttgagggagcccagggcgaggctctccaagccatcttttttgacggcaagctccgcgggcagcctgcccttttccgtccgggcggtagccagcagaaagagcgggcgcacgccgtgttgccacagcagttccaggaattgacggctcaggggatcgagccattggacatcgtcaataaagataagcacaggggatttggcgcacagccagcgcaggtaatccagccaggcctgctgctgacggggcagcctggcttcgggggcgatcccgcgccagggcgagccatcccaggagagattcagcagcgaggcgagggcggcttcgcaatcctgtcccagcgaggaaccgcgggtgcgcttttgccacgcttcgcggaaatgctgcaccgcctgcgcgggagcctcatcctccaaaagccccaaactggcacgcagcaactgggatacgatatccagagggaggggggaatcctgcctgcaagccagcagatacacctgccgccggggagtctcgaaggcgcgcaaagcttcgcgtgccaacctgcttttgcccactcccgccgttccatgcaccaccatcgcctggggcgaggaggccgccaaaccatcgcgtatcctgctatgcagcagagcggtctccttctccctgccaatcatgcaaagcggttgtccggtgatcagttgccccggcagcatgcccagacggtaggcgcggggcgcggcttttgaggcggctttttcccttttgaggggggtgaagatgaaggagttgtgctgctggttgcgcagcttgtggtcggcgagggcttcgccggggcgggcaagctccaggagcttctgggcgcgggtgatggcttcgcccgggaagaaggttgccttccacaggtctttgccggcagccatggaaaagatgtagccggtgcagcaggcggcgcgggctttgtggcgcgtggcagcttccaaagccaggcggcaggcgcgctgcattttgttgaccttgttgtgggggaaatcgaagagcaggatggcatgcagccgcttgtgccgcacatagatggctgccaaaaaggcgtcgtagatcaccgccagcagttccagcgcctggatggttggctccagggggccgtccggaggctcgtccaggctgaggcagcagcaaacgctgtgccggacgtcagccgcgggattgagtctgtgaaagcgggaatgaatgaagtggtggccgtgttgcttgcccaagcgcttcctttccggaatatcaggcaactggggaaagggcggatgctcggcaagtttgccaggcctggcatccaactcccagcccagtctgttcaatgcctggggagagtaataaggttggttgggctggccggggttttcacgcaggacatccagttggggagaccagaacacatattcaaactggagggggttctcaaagatgcgccaggacagggtgccaaaacccacggccaggcggattacattcggcattccatgatgggggctggcgtagctgttgatcgcaccgatagtgtgattgatgcgtgccagcagcgccgcgatcagcaccggagtgctttccggcaacagggcgtggatgcagtttccctcatactggaagagcagtccgcctgcgttcctgatcaggctcagcatcctttcataggcttcggtgaaagttgcttccatcctgtcaatcacctgctgccgctgcttgagccttactcctttgatattgtaagtggcaacggtgcaaaagcgcaggatatagccggtgatctgcccctgcaggatgttttgctcatactgctgcaggatgtagctgggcaccacgcggttcatatctggctacctgccttgcctggcttaactataatctcctttctgcctacttatcccccaggctcagattggcgaaggcggtgagggtgatctccgcgtccgcgctttccagatagctgacgcgtgcccggtcgcccgcgcgggtgatgggcagacggctgctcaggttgctggaggcgataaagattatatccggcgcttcggtcagggtaaggtagtagtaggtgcgtccatccgtggtgtccgagccaaagcgggcgatggagcctgtgagggtggcctgcttgtccgctgcctccggggatatccccatccggcttccggccagggccatctgatagttgtcgcgcgcgctgcgcacgctttcacccactcccaccagggaaaagtcgcgcactgaaacgaagctgaacatcttgattagcccggcgctgtccttgagggtcataaaataggtcggcttgccgttcatgttcaccaggatggggaaggtggcatagtatttgaagttttgcaccttgccttcggcggagcgcatggcggcagtctcggtggcaccggagaccaggtagaggtggctgcttttggtgcgggtgtccgtgagcgcaaagcccaccgttccctcgtccgaacccacgctggtgaggccggagtagaaatagctgcgctgatcgcggccatagatcacgttgtaaccgggcgtcacccgcagcaggtcgcgtttgccgaacacgctgttccaaaagccgtgcacatatttgccccaccaggaaagctggggaagcacaaagtaggagggctggatgcggtcaacccaggcgggaatcttgctgtcgtcatagatgccgccgctttttttgaggggaaagtatttgatctcacccgtgccggcatgcacgatggcgagtccggtggcttccggggcactcactccgatcttgtgggtgtaggtggtgatggtccagtagggttcgccattgtcgtccagttcaaaggtatcgcctgccaggccgatgcccgcgaagccgttccaccagagatggcggtagaggtcttgtccaaagtaggcgttgcgctgatagcggatttggatgggtttgcctttcagctcgcgcacaaaggtgatatcctgcggattggtggccgagaccttgatgtagcccggggtgcctttgcttgtgttggtgatccacttccagaagccgctgtgcagcaggggacagacccagaaaagcttgccatccaccatctggatggtcgggttgccgagcaccacccggctgccgagggcgaagtcctcgcccagtttcttggctgccaaatccttggcgaaagcggaatccaggatcggcacctgatccagattgaccggcgccaccaggtcggaaaactcggtcttttccacctcgccgatcatgcggcggtagctgccggaattgaagatgccggaagagaagaagggcgccaagatcagccacagcgccagaaggggatagaccacatagaggatcttgcgcaggcgccggattgccagcagcggagccaggcagatcatcagggggacgatccagtccaaaaagcggatatgcagcaccggaagcacaaagtaaagcataaaacccagcagcaggacggacagcactatggcaggcagggctttgatcctgaacttgggaaacttgatcacgacaggtttgggcgtttgttgttgaaacatggtaacctccctgaactaagctttgtttttatactctaccagatggcggcggatttgtcaagccggaatcgctgcccgcctccaatacagaatggaaaaaagtggactcggctcgaagaccgctcctatccttgcggatacagaggcgcgaccgcccgctcaaacactccctgaaccttggaaatggccagcccgtaattggtgatcggcactccgcgccgctgggcttccacgatgcggcggctcatctccatctggttgagcatgcaggctccgcagtggatcaccagcgcgaattcctccagattgggcggaaagtcgtgtcccgcgtaaacttcatactccagttccttgcccgtgaactggctcagccagcgcggaatcttcacccgcccgatgtcatccgcctgcacgtggtgggaacaggcttcggcgatcaggatcttgtcgccgtcgcgcagcttgtcgatctgcctcaccccttccgccaggacgtccagatcgcctttgtagcgggcaaagaggatggaaaaggtggtcatcttcacctcggggggcaggtcattcaccaccttcagcaccacctgcgaatccgtgatcaccagatcaggcggctccttcagggtttgcaaggcataggccagttcccgctctttcaccaccgtcaccaccgcgtcgtgatccagcagttcgcgaatcacctgcacctgcggcaggatcaggcgtcccttgggcgcggcgaggtcgatgggagtcaccagcagcaccctgtccccggccttcaccaagtcacccgccagggggcgctcctccagcagatgggcgggcgccagcttgatcagcagttccttggcggcatcgatgttttcccccttgagggcggagacggagacccagggcagtccccgttcctcgcaccaggcgatattggcgggggcaggctcgcgcaaatccctgtggttaaagaccattaacagcggtatcttcatctcgcggatgcgtttcagggaggacagctcgctctccgcgaaggggcggccatcgttcacaaacacggctatgtccgtgcggtaaagtatcttataggtggcgagtacccgtttttcgcccagttcgccgctgtcgtccagtccagcggtgtcaaagaaggtcaccgggcccaggggcagaagttcatagcgtttgtccaccgggtctgtggtggtgcccggggtgctggaaacgatggctatctcctgtcctgccagggcgttgatcaaggacgattttccagcgttgcggttacccagcagggtgatgtttacgcgttctccgcggggtgtgctcatctatcttctcccaaaaagtcttgcggcttgcggccgctaatagcttttattatcagttctttcatgtttctttccttgtcggactggataccagcccatgtaaaaataatatatgtgaaaagcgcgaatctgtcaagcaaagagaattctggcagacaggggcctgtgtttttgatatatccacaaattacacaaattaacacggattaaaagaacagaataaggacaagtgtccagcctaaaaacaacaaccagaccctgaaacaaaccgccaccaagccctaaagccgtgtcatcccgggctgtcggggtcaccgccaaagcgcgaagcggtttggtggggtggcttgacccgggatccagtcttttaaaaacaaccagcaagccccgaaacaaagcacaacagactaaaaaccgtgtcatcccgggctgtcggggtccccgccaaagcgcgaagcggtttggtggggtggcttgacccgggatccagtcttttagaaacaaacgcgtaaggttttaaaaaagcaggcacctttccacctcaaaacacctttccacaaattctccccccatatatataggtgctacgaccccttcatgccaggcgggaagcggatcccagggcaagtatatatatacttgcccgtaattgcgcggccatgggctggctgccctccctttcccctcgcgcgcgggtggctctcatttgcatccagcgttttggcgtgagtcttccttaggtcatccttataatttataaggttgacctaaggatgatggcatcaaatccagtagcagcaaaggagggcggtatgaaggattatgcggaaggttgtggtatttttgtggaaaggtggaaaggtgcccccgaaacaagtccaccaagttatattttgtgtcatcacgggaagtcggggccccctctggggtggcttacccgtgatccagtctttttaaaagaaacatccacaaattacacaaattaacacgaattaaaagaacattaaagagtcaacacacccgactccggaacaaaaccctccagactaaaaaccgtgtcatcacagcctgcgagccgtgatccagtgcccaggtgtggcaaagtccgtttgccacagagaccggaggtctcttccaaacaggcaactccgttgcctctgccgaacggacttcggcaacccttatattacaccaatccgtgtcaatctgcgccctttatccgcgtttatctgcgtgaaccgtggaacccgggatccagtcttttggaatgtttgaacttcgctgaaaacatttttcgctaccaggaatgaaaactggacaacaaacgcagcttgggatatctgacactaagagtgtaattcacacgatcaataagaacatagcgtgctgtgcatacaaaacatattaccgacggacttctgttctgaaatatggacgttttgaacttggtaaacagtccgtatatggactaccagctgggacttgccattaggcatatgcccgaatgtaaagctatattcttatataacgcattgtagacagcacaggttgttctctgctctttccatattacactagtggtcatcatttcaccagtaggggtttttttacgcttttttcccgggagttttcatgtaaagcaccctactggacaaagagatgggagccggaaaacacagcctgaactgggacggcaccgactccaacggcgcccaactggcaagcggagtctatatctaccgcctcagcaccggaaagacgagcgccagccgcaaaatgatattgctgaagtgacggacagccgcccttccaagtccgataattaacttgaaccgccgcgcattacacacggcggttctttccaacaagccaagtatcagcagcgggaaaactgcgctgaaaaagccgctggtggggctccgtaaaatgggagtggaagccgccgcatggaacaccttgaaagtaacaagataccgccccaaattgatctttcctaacccaaaatccgcaaagcaaatttcttgacaatgatctttggcttaaatataaggttcctatcgaacaaaaggagcatgttatgtacaatcttctttgtgataattgggtaaacgtggtctatctttcgggcaaaccagatagaatatctttagttcaaactcttgaagacgcacactgtctgcaactggcatacagcaatcctatggaccggttcgctgttttcagattcctgcttgctcttggctactggtgtttcgccaacaccaacggggagcctgaacctgataagccgcttccgacctcctggatatcctggctggaagaaaacaaggggtatttcgagctttttggggatggacagagatttttccaagccgatcccagttccaggatcagagccattaccgaccttattcatgagataccaacagctcacaacctatgccatttcaatcatgtcaccgactatatcgatgggctctgcgaagcttgctgcatcaagggactgctgagattacctgtctttaccactgtcggtggcagagggataggcgcgggaatcaacaacactcctccattttacctgctctggcatgcaaatgacctcgctggcatgctggttcaaaattggcaaccctgggataatatggggattccggcatggttgggttcttttcaaaaagaaagcaggaaagtgggcttacttgccggaatgacctggctgccgcgcaaggtgcatctgcatgatcctgtctcaggtcaggcagcatgttgttcctgcggcttaccctccaaagctctcgtctattcctgcagcataaaacctgaaccagtgccggaaggccttaaatggaaagaccctcatggtgtttacaccgatcagggaaaaagtctccagtccaaaatcaaactgatgtccaatgatagatacactttcgcggaccgggattggtatagcccgttgttcagctatttgcacgcggaaggaaactccagacaaggaaaactatggttggttggatttgccagcgataaagcaaaaagcatagacatctgggacaagatcatcgagcttgagggaactgatacaaatgatgagctactggctcaattggcaaacagggctactgcccttaatgccatgcgcaagaagcctctcagaggtgatttcaaaaagtcagtgggcactccccagattgctgacattatcccccacgccgaaagcagaattgccatcaatgcgggtaaaatgactgagaacaggggctattcctggcaggatgccgatactgaatacggagaactgctcaccaaggttgcatgctctttggagccggctcaaacagtggacgccaggctcaagagaggtaaattcatttcccgcaagccctggccagttataccagaatccaaaacaaaacccgcagaggaggaccagaatgaatagaggaaccgttgacttcattgcaagcctggagaacctcaaagaaggcgatttgggcattcttagaaaactcaggggagcccggcttgatgaaaagcttcccggatttgacctgttttccgccctatggtggcctttgcggcaaaagaatcaacgcgctcccaagcgtgaagtggcttggttgatcgccaaactttttgctgaattccgctttgaacagcgcgagggagccacattgcccattcttatgggaggcatctgccggaagttggaacccaaaaaggaattaccccgtgtattggcacgctttgatcaactcgcatcgcttgacattatgcagatggaagagccgctgtcggtcattatgggtatcttgcgcaagcaccagcaggtctgcctggactgggtagggcttactgatgttctgtcattttgggagcaggaacctgtcaaaagagaatggtcggattcatttattaaagcatacaagatcaacaaggaggattcagatgttgattgaaattcatatgattcagaatcacagcccggcaaatcttaaccgggacgacttgggcgcccccaagacctgttatttcggtggagtattacgttctcgcatctccagccaatgcatcaagcgcagcatccgttttgccccggaattcgcggaccttagaggaggtatccgaacaaggcgtctggcagagaaacttgaagaaatgctggaaaacaaagataagaagctggttgccaagtttcttgaagcctgcggaatcaaaaccaaatcttccaagaaagctgcaaaaaagtccgaaaagatacccgcggaagccgatgaagatcaggatgagcagcaggcggctgatacatctgacatgctggtttttaccacttatgatgccctgcgccaaatggcagagctgctttccgactccaaactaagtgaaagcgaaaaactgctgcagttcaaagatttgctcacaaactgcgtccattctccggatatagcactttgcggcaggatgttggagaccaaagagcttaaaaacactggcgttgaaggcgccctacaggttgcacatgcgatctccacccacattgccagacctgagatagactattttgtggcggccgatgatgttcccggtgaagacgccggagcgggtcatattggcgaatccatgtttgcctcagcctgtttctacaaatacttctccattgattgggaacagttggtcaagaacctgaaaggggacacgaatctggcagcccacaccgtgggtgcctttctcctcgccgctgccaaaaccaaccccagtggcaaacagaacagcttcgccgctcataactatcccgatggcatccttgttgagttcaagaattcccctattagctacgccaacgcattcgtcaggccagtttccgtggtcaaggaatcggacctggtggaacaaagcatcggccagctttccaactacgtgaacgacatcaggcttggctattatgatgagcaatccccagttatcagcttctggttttctccaaacaatcgctattcccttggcaatgagcattccaaactggcttccagaaacattggcaacctcaatgagcttgtaggcgctgtgttggattatattggcggcttcaagtgggaagaagttcagaaaagcaaggcttatgttggcggctgacatgagtgcgccacccaacaccttattcttgcgcttggagggggctttgcagtcttggggcagcaacgaggctaagtttgctttgcgcaggactaccgacgctcccacaaaatcaggtgtcctggggctgctttgcgcggccatgggaattgggcgcgcggaggctgctgattcatggctcccaaaactcgccaacctgcgcatgggcgtgcggatagaccgccccggcatacgctggtgggacttccatactgttggagcgggacaaagaatgcgcatggcagagctgaaggcacccaaaaaaccttccatggttggagctgccctggctgataccctgacaccaagcaaagtaaaaaccagggcagagaccttgctctcacgccgcgaatatcttgccgacgccagttttctggtcgccttgcagggtgagccggaacttgtggaaaagctctccgccgctctggccaagccggtctgggcaatttatctggggcgcaaatcctgtcccccttcacgtcccgtgggcgagcatgctccgggcttttataacactttggaggaggcgctgtccgcggttcccctgcaaaagcgctggcacaatgaacccctgccgcaaatactgccttgcgtcatggactggatccccagccaggacggagaacatgcgcctgatgacgcggagattcattacgatctgccggtttcttttcagccgccccgccatttgccgcgcttcgtgatcaggcgtgagctggttgtgggagaggatgtgcaagtgagcagggaaaccggaaccagcgtttggaggcccaaaggaacccgggcggattataacaattccgagtataagaaggtcagggcggagcggcttgtgatggaccatgccgcgtgcatggtatgcaaagctcccgccacgactgttcaacacgtgaattaccgcagggcgggaggcaaggaaataccggaagacctgcgggcgctgtgccgcctctgccacgacgcctgcaccatgctggaatacggttccggcatgaccaccgaccgcatcgacccctgcgaccccatctggcgggagcgaatactggcaaagcgcaaagatatagtcgagttccgttcgcgcgggcagcgtttccgcaaaatgaagccagaggaggaaaacggatgatctacttgtccaagctattgatcgatactggaggcaatccagaccgtccccgccccggcagaaagtggctggacaatatctataacgtccaccgccgcctttccatggcgttcccttcaggtttgcgccgggagcaggatccgcatttcctgaagcccttttcgccaaacgacttccaaaaaactcccttccttttccgggtcgataacaacatcgacggaaacgataaaagggcgattattatcgtccagtccgttcttgagccggattgggattattgcttccaaaacgcgcttgatttcctggcagcgccaccggaaacaaaggagtataatccagagtttcaagcgggacaactgctccggttcaggctgcgggtaaacgccagcgtacgccgtcatattcctgagaaggtgcaacaggacggtcaaaccatagaaactggcaacatcctgcacaaaagggtttctctcacctgggatccctcttccaccccggatcaggcccttgccgactggctggctgccaaaagcccaaagctgggcttcacccttcagcgctgtgagcttcttcaactgggttgggtttatggctccaagcctgaacctaaaaatgtcaaagcaaaggaacagggacagggctactggcgtgaacacacatacaatcctctgcgcttccgttcggctctactggagggaattctcaaagtggatgacccgaaactgttcctggaaacgcttagaagcggcattggaaaagcgaaaagcttcggctttggcctgctgtccgttctgccaatcaggaatgatgaataaagacctgcactctatcccccggatcagagatcggcttagctatctctatgtggagcatgccaaaattgatcagaacgggcaagccatcgccattcacgatgccctgggagaaaccccggttccttgtgccggcttggctatgctgatgctgggaccgggcataaccatcacccatgcggcaatactttcactggctgcctgtggctgtctggtagcctgggtgggggaacatggcgtcaggttctatgccgcaggcacaggtacaacccgtagcgccgtcaatcttatgaaacaggcaaagtactgggcagacccggttttgcatttacgggttgtgcgctccatgtatcagttgaggttccaggatgagctttctcctgatttaactttgaaccagatcaggggcaaggaaggtgcccgggtgcgcgatacatatttccaactctcccaaaagtatggtgtgcccatgcagggcagaaactatcaaagagacaactggaataaagcggatcccataaaccgggcattatctgtggcaaactcctgcctctacggcatatcgcacgctgccattgttgctgcaggattctctcccggattgggctttgtccacactggcaagcaactgtcatttgtctatgatatcgcggatctatacaaaatggaaatggctgctcccgccgcattccgggcgaccgctgaagggatcggcgaactcgaccgcagagtcaggcttgcctgccgtgatgaattccacaggcagaatctactcaaacgcattgtcgcggatattagttctctcttcggtgatattatgccagaggatagcccggatgactgttttgccgaagaaccagccttgcctggaggactctggtctccagatggagaagtttccccaggcggcatatcttacgggcaggatgatctgccaaaggaagattgatggtggttttagtattggaaaatgtgccaagctccctgaggggtaagatcacacgttggctgctggaagtaaaagccggggtgtttgtgggtaaagtctcagcaatggttagagataaactgtgggataaggttagaagcaattgcagcggtggaacttgcctgatgatctggagtagtcagaccgagcaagggtttgatatcgaattctggggtgccgcatcaagagtcgttacggaatgggagggtatcaaacttatgaccaagcatccttaaactaaggcttgaaggagttcaatgacctcttagacctctattgatcaagtgtattccccatgcatgtgggggtgaaccgacatccgcaacattagcgacacactacaaaacgtattccccatgcatgtgggggtgaaccggatacacacgcatcggttgcataggctgtccggtattccccatgcatgtgggggtgaaccggatcacgtcaccaagatctggcttcggcacaggtattccccatgcatgtgggggtgaaccgcttatccgaatgctacaagctgcacgtgacctgtattccccatgcatgtgggggtgaaccgagacccttcaacctatcgcaaaagaattcaatgtattccccatgcatgtgggggtgaaccgactacaaaacgaggtgatcatatgagtgtcaagtattccccatgcatgtgggggtgaaccgcatctgttttgccttctgcattgccttgtatcgtattccccatgcatgtgggggtgaaccgaacgcccgccagccggcggcactgctggctatgtattccccatgcatgtgggggtgaaccgacgaatcccgtctatgccgcccaggccaacgcgtattccccatgcatgtgggggtgaaccgaaaccaggaattaacgtagtgccaggcaagacgtattccccatgcatgtgggggtgaaccgactttgacaaagccatccaggtaggtgatgccgtattccccatgcatgtgggggtgaaccgccgacgaaatagcgatgaagggactggtaacgtattccccatgcatgtgggggtgaaccggcggcggcggctttgtcggtatcctggtagaggtattccccatgcatgtgggggtgaaccgaggacgtagcgaggcggcttggtgacctgatggtattccccatgcatgtgggggtgaaccgcgcggagctttccttgttgtcaccggaaagaggtattccccatgcatgtgggggtgaaccgaattatcggaaataacaaagagtcttcaaggggtattccccatgcatgtgggggtgaaccgtcaacgaaaccagcaacctgctgatcgttggggtattccccatgcatgtgggggtgaaccgaggacgtagcgaggcggcttggtgacctgatggtattccccatgcatgtgggggtgaaccgcctgaatctatcaccctactgagacaggcaatgtattccccatgcatgtgggggtgaaccgatcgtccagattctcacgatcatcctggacatgtattccccatgcatgtgggggtgaaccgttataaagggcagtccagtgagcaatagcaaggtattccccatgcatgtgggggtgaaccgatggcaacaattagcaggaattaaacaagaaggtattccccatgcatgtgggggtgaaccgttccggatgcagtcatccgctgtcgatgtggagtattccccatgcatgtgggggtgaaccgttcatagcgccgcttttcagcctggctacggcgtattccccatgcatgtgggggtgaaccgacgcggcataaccgcatgggcagcgcgtattggtattccccacgcatgtgggggtgaaccgatcgacgccggcatcatcgaggatctgatcctgtattccccacgcatgtgggggtgttgcgatttcctcgcgcgcgggcgactctcatttgcatctggcgctcagaccttggtcttcctggggtcaaccttaacctttatatggatgacctaaggatgatggcaccaaagccagtagcagcaagggagagcggtatgaagtaatatgaggattatcgcgggaattattttgaggggacaagcatccaatctgggtagtttgttggtattttatcgtttggctaaagtggtggttttgtaattgacctgaaatcggggtgacggggttttatggttttttgtagttcttttttgtgtcgtgttgtaaaatattcaccctctttctatctgtgtattatgtggtttttaaaaaactggatcccgggtcaagccaccccgacagcccgggatgacacaattttagtgtctgtcgtggtctgtttcggggctgatgcttgtttttgggttggacgtttgtccttattctgttcttttaatccgtataatttgtgtaatttgtggatatttttaaaagactggatcccggctcgcaggccgatatagcttggtggacttgtttcggggctggatgactgtcccaaacggcgctatagcaagcgccactacagtaaaggcggtcgctgaaccgccttcagggcagattcttttgtcctttaccttatccggcaaaattaacttgacataatttattataggtgattatctggtgactgtcattaagtttcgtt

SEQ ID NO: 986 - DNA, 107081 bp, Artificial Sequence
  Synthetic Oligonucleotide
  misc_feature (1)..(85333): n is a, c, g, or t
nnnnnnnnnnnnnnnnnnnnnnnnnnnnnnnnnnnnnnnnnnnnnnnnnnnnnnnnnnnnnnnnnnnnnnnnnnnnnnnnnnnnnnnnnnnnnnnnnnnnnnnnnnnnnnnnnnnnnnnnnnnnnnnnnnnnnnnnnnnnnnnnnnnnnnnnnnnnnnnnnnnnnnnnnnnnnnnnnnnnnnnnnnnnnnnnnnnnnnnnnnnnnnnnnnnnnnnnnnnnnnnnnnnnnnnnnnnnnnnnnnnnnnnnnnnnnnnnnnnnnnnnnnnnnnnnnnnnnnnnnnnnnnnnnnnnnnnnnnnnnnnnnnnnnnnnnnnnnnnnnnnnnnnnnnnnnnnnnnnnnnnnnnnnnnnnnnnnnnnnnnnnnnnnnnnnnnnnnnnnnnnnnnnnnnnnnnnnnnnnnnnnnnnnnnnnnnnnnnnnnnnnnnnnnnnnnnnnnnnnnnnnnnnnnnnnnnnnnnnnnnnnnnnnnnnnnnnnnnnnnnnnnnnnnnnnnnnnnnnnnnnnnnnnnnnnnnnnnnnnnnnnnnnnnnnnnnnnnnnnnnnnnnnnnnnnnnnnnnnnnnnnnnnnnnnnnnnnnnnnnnnnnnnnnnnnnnnnnnnnnnnnnnnnnnnnnnnnnnnnnnnnnnnnnnnnnnnnnnnnnnnnnnnnnnnnnnnnnnnnnnnnnnnnnnnnnnnnnnnnnnnnnnnnnnnnnnnnnnnnnnnnnnnnnnnnnnnnnnnnnnnnnnnnnnnnnnnnnnnnnnnnnnnnnnnnnnnnnnnnnnnnnnnnnnnnnnnnnnnnnnnnnnnnnnnnnnnnnnnnnnnnnnnnnnnnnnnnnnnnnnnnnnnnnnnnnnnnnnnnnnnnnnnnnnnnnnnnnnnnnnnnnnnnnnnnnnnnnnnnnnnnnnnnnnnnnnnnnnnnnnnnnnnnnnnnnnnnnnnnnnnnnnnnnnnnnnnnnnnnnnnnnnnnnnnnnnnnnnnnnnnnnnnnnnnnnnnnnnnnnnnnnnnnnnnnnnnnnnnnnnnnnnnnnnnnnnnnnnnnnnnnnnnnnnnnnnnnnnnnnnnnnnnnnnnnnnnnnnnnnnnnnnnnnnnnnnnnnnnnnnnnnnnnnnnnnnnnnnnnnnnnnnnnnnnnnnnnnnnnnnnnnnnnnnnnnnnnnnnnnnnnnnnnnnnnnnnnnnnnnnnnnnnnnnnnnnnnnnnnnnnnnnnnnnnnnnnnnnnnnnnnnnnnnnnnnnnnnnnnnnnnnnnnnnnnnnnnnnnnnnnnnnnnnnnnnnnnnnnnnnnnnnnnnnnnnnnnnnnnnnnnnnnnnnnnnnnnnnnnnnnnnnnnnnnnnnnnnnnnnnnnnnnnnnnnnnnnnnnnnnnnnnnnnnnnnnnnnnnnnnnnnnnnnnnnnnnnnnnnnnnnnnnnnnnnnnnnnnnnnnnnnnnnnnnnnnnnnnnnnnnnnnnnnnnnnnnnnnnnnnnnnnnnnnnnnnnnnnnnnnnnnnnnnnnnnnnnnnnnnnnnnnnnnnnnnnnnnnnnnnnnnnnnnnnnnnnnnnnnnnnnnnnnnnnnnnnnnnnnnnnnnnnnnnnnnnnnnnnnnnnnnnnnnnnnnnnnnnnnnnnnnnnnnnnnnnnnnnnnnnnnnnnnnnnnnnnnnnnnnnnnnnnnnnnnnnnnnnnnnnnnnnnnnnnnnnnnnnnnnnnnnnnnnnnnnnnnnnnnnnnnnnnnnnnnnnnnnnnnnnnnnnnnnnnnnnnnnnnnnnnnnnnnnnnnnnnnnnnnnnnnnnnnnnnnnnnnnnnnnnnnnnnnnnnnnnnnnnnnnnnnnnnnnnnnnnnnnnnnnnnnnnnnnnnnnnnnnnnnnnnnnnnnnnnnnnnnnnnnnnnnnnnnnnnnnnnnnnnnnnnnnnnnnnnnnnnnnnnnnnnnnnnnnnnnnnnnnnnnnnnnnnnnnnnnnnnnnnnnnnnnnnnnnnnnnnnnnnnnnnnnnnnnnnnnnnnnnnnnnnnnnnnnnnnnnnnnnnnnnnnnnnnnnnnnnnnnnnnnnnnnnnnnnnnnnnnnnnnnnnnnnnnnnnnnnnnnnnnnnnnnnnnnnnnnnnnnnnnnnnnnnnnnnnnnnnnnnnnnnnnnnnnnnnnnnnnnnnnnnnnnnnnnnnnnnnnnnnnnnnnnnnnnnnnnnnnnnnnnnnnnnnnnnnnnnnnnnnnnnnnnnnnnnnnnnnnnnnnnnnnnnnnnnnnnnnnnnnnnnnnnnnnnnnnnnnnnnnnnnnnnnnnnnnnnnnnnnnnnnnnnnnnnnnnnnnnnnnnnnnnnnnnnnnnnnnnnnnnnnnnnnnnnnnnnnnnnnnnnnnnnnnnnnnnnnnnnnnnnnnnnnnnnnnnnnnnnnnnnnnnnnnnnnnnnnnnnnnnnnnnnnnnnnnnnnnnnnnnnnnnnnnnnnnnnnnnnnnnnnnnnnnnnnnnnnnnnnnnnnnnnnnnnnnnnnnnnnnnnnnnnnnnnnnnnnnnnnnnnnnnnnnnnnnnnnnnnnnnnnnnnnnnnnnnnnnnnnnnnnnnnnnnnnnnnnnnnnnnnnnnnnnnnnnnnnnnnnnnnnnnnnnnnnnnnnnnnnnnnnnnnnnnnnnnnnnnnnnnnnnnnnnnnnnnnnnnnnnnnnnnnnnnnnnnnnnnnnnnnnnnnnnnnnnnnnnnnnnnnnnnnnnnnnnnnnnnnnnnnnnnnnnnnnnnnnnnnnnnnnnnnnnnnnnnnnnnnnnnnnnnnnnnnnnnnnnnnnnnnnnnnnnnnnnnnnnnnnnnnnnnnnnnnnnnnnnnnnnnnnnnnnnnnnnnnnnnnnnnnnnnnnnnnnnnnnnnnnnnnnnnnnnnnnnnnnnnnnnnnnnnnnnnnnnnnnnnnnnnnnnnnnnnnnnnnnnnnnnnnnnnnnnnnnnnnnnnnnnnnnnnnnnnnnnnnnnnnnnnnnnnnnnnnnnnnnnnnnnnnnnnnnnnnnnnnnnnnnnnnnnnnnnnnnnnnnnnnnnnnnnnnnnnnnnnnnnnnnnnnnnnnnnnnnnnnnnnnnnnnnnnnnnnnnnnnnnnnnnnnnnnnnnnnnnnnnnnnnnnnnnnnnnnnnnnnnnnnnnnnnnnnnnnnnnnnnnnnnnnnnnnnnnnnnnnnnnnnnnnnnnnnnnnnnnnnnnnnnnnnnnnnnnnnnnnnnnnnnnnnnnnnnnnnnnnnnnnnnnnnnnnnnnnnnnnnnnnnnnnnnnnnnnnnnnnnnnnnnnnnnnnnnnnnnnnnnnnnnnnnnnnnnnnnnnnnnnnnnnnnnnnnnnnnnnnnnnnnnnnnnnnnnnnnnnnnnnnnnnnnnnnnnnnnnnnnnnnnnnnnnnnnnnnnnnnnnnnnnnnnnnnnnnnnnnnnnnnnnnnnnnnnnnnnnnnnnnnnnnnnnnnnnnnnnnnnnnnnnnnnnnnnnnnnnnnnnnnnnnnnnnnnnnnnnnnnnnnnnnnnnnnnnnnnnnnnnnnnnnnnnnnnnnnnnnnnnnnnnnnnnnnnnnnnnnnnnnnnnnnnnnnnnnnnnnnnnnnnnnnnnnnnnnnnnnnnnnnnnnnnnnnnnnnnnnnnnnnnnnnnnnnnnnnnnnnnnnnnnnnnnnnnnnnnnnnnnnnnnnnnnnnnnnnnnnnnnnnnnnnnnnnnnnnnnnnnnnnnnnnnnnnnnnnnnnnnnnnnnnnnnnnnnnnnnnnnnnnnnnnnnnnnnnnnnnnnnnnnnnnnnnnnnnnnnnnnnnnnnnnnnnnnnnnnnnnnnnnnnnnnnnnnnnnnnnnnnnnnnnnnnnnnnnnnnnnnnnnnnnnnnnnnnnnnnnnnnnnnnnnnnnnnnnnnnnnnnnnnnnnnnnnnnnnnnnnnnnnnnnnnnnnnnnnnnnnnnnnnnnnnnnnnnnnnnnnnnnnnnnnnnnnnnnnnnnnnnnnnnnnnnnnnnnnnnnnnnnnnnnnnnnnnnnnnnnnnnnnnnnnnnnnnnnnnnnnnnnnnnnnnnnnnnnnnnnnnnnnnnnnnnnnnnnnnnnnnnnnnnnnnnnnnnnnnnnnnnnnnnnnnnnnnnnnnnnnnnnnnnnnnnnnnnnnnnnnnnnnnnnnnnnnnnnnnnnnnnnnnnnnnnnnnnnnnnnnnnnnnnnnnnnnnnnnnnnnnnnnnnnnnnnnnnnnnnnnnnnnnnnnnnnnnnnnnnnnnnnnnnnnnnnnnnnnnnnnnnnnnnnnnnnnnnnnnnnnnnnnnnnnnnnnnnnnnnnnnnnnnnnnnnnnnnnnnnnnnnnnnnnnnnnnnnnnnnnnnnnnnnnnnnnnnnnnnnnnnnnnnnnnnnnnnnnnnnnnnnnnnnnnnnnnnnnnnnnnnnnnnnnnnnnnnnnnnnnnnnnnnnnnnnnnnnnnnnnnnnnnnnnnnnnnnnnnnnnnnnnnnnnnnnnnnnnnnnnnnnnnnnnnnnnnnnnnnnnnnnnnnnnnnnnnnnnnnnnnnnnnnnnnnnnnnnnnnnnnnnnnnnnnnnnnnnnnnnnnnnnnnnnnnnnnnnnnnnnnnnnnnnnnnnnnnnnnnnnnnnnnnnnnnnnnnnnnnnnnnnnnnnnnnnnnnnnnnnnnnnnnnnnnnnnnnnnnnnnnnnnnnnnnnnnnnnnnnnnnnnnnnnnnnnnnnnnnnnnnnnnnnnnnnnnnnnnnnnnnnnnnnnnnnnnnnnnnnnnnnnnnnnnnnnnnnnnnnnnnnnnnnnnnnnnnnnnnnnnnnnnnnnnnnnnnnnnnnnnnnnnnnnnnnnnnnnnnnnnnnnnnnnnnnnnnnnnnnnnnnnnnnnnnnnnnnnnnnnnnnnnnnnnnnnnnnnnnnnnnnnnnnnnnnnnnnnnnnnnnnnnnnnnnnnnnnnnnnnnnnnnnnnnnnnnnnnnnnnnnnnnnnnnnnnnnnnnnnnnnnnnnnnnnnnnnnnnnnnnnnnnnnnnnnnnnnnnnnnnnnnnnnnnnnnnnnnnnnnnnnnnnnnnnnnnnnnnnnnnnnnnnnnnnnnnnnnnnnnnnnnnnnnnnnnnnnnnnnnnnnnnnnnnnnnnnnnnnnnnnnnnnnnnnnnnnnnnnnnnnnnnnnnnnnnnnnnnnnnnnnnnnnnnnnnnnnnnnnnnnnnnnnnnnnnnnnnnnnnnnnnnnnnnnnnnnnnnnnnnnnnnnnnnnnnnnnnnnnnnnnnnnnnnnnnnnnnnnnnnnnnnnnnnnnnnnnnnnnnnnnnnnnnnnnnnnnnnnnnnnnnnnnnnnnnnnnnnnnnnnnnnnnnnnnnnnnnnnnnnnnnnnnnnnnnnnnnnnnnnnnnnnnnnnnnnnnnnnnnnnnnnnnnnnnnnnnnnnnnnnnnnnnnnnnnnnnnnnnnnnnnnnnnnnnnnnnnnnnnnnnnnnnnnnnnnnnnnnnnnnnnnnnnnnnnnnnnnnnnnnnnnnnnnnnnnnnnnnnnnnnnnnnnnnnnnnnnnnnnnnnnnnnnnnnnnnnnnnnnnnnnnnnnnnnnnnnnnnnnnnnnnnnnnnnnnnnnnnnnnnnnnnnnnnnnnnnnnnnnnnnnnnnnnnnnnnnnnnnnnnnnnnnnnnnnnnnnnnnnnnnnnnnnnnnnnnnnnnnnnnnnnnnnnnnnnnnnnnnnnnnnnnnnnnnnnnnnnnnnnnnnnnnnnnnnnnnnnnnnnnnnnnnnnnnnnnnnnnnnnnnnnnnnnnnnnnnnnnnnnnnnnnnnnnnnnnnnnnnnnnnnnnnnnnnnnnnnnnnnnnnnnnnnnnnnnnnnnnnnnnnnnnnnnnnnnnnnnnnnnnnnnnnnnnnnnnnnnnnnnnnnnnnnnnnnnnnnnnnnnnnnnnnnnnnnnnnnnnnnnnnnnnnnnnnnnnnnnnnnnnnnnnnnnnnnnnnnnnnnnnnnnnnnnnnnnnnnnnnnnnnnnnnnnnnnnnnnnnnnnnnnnnnnnnnnnnnnnnnnnnnnnnnnnnnnnnnnnnnnnnnnnnnnnnnnnnnnnnnnnnnnnnnnnnnnnnnnnnnnnnnnnnnnnnnnnnnnnnnnnnnnnnnnnnnnnnnnnnnnnnnnnnnnnnnnnnnnnnnnnnnnnnnnnnnnnnnnnnnnnnnnnnnnnnnnnnnnnnnnnnnnnnnnnnnnnnnnnnnnnnnnnnnnnnnnnnnnnnnnnnnnnnnnnnnnnnnnnnnnnnnnnnnnnnnnnnnnnnnnnnnnnnnnnnnnnnnnnnnnnnnnnnnnnnnnnnnnnnnnnnnnnnnnnnnnnnnnnnnnnnnnnnnnnnnnnnnnnnnnnnnnnnnnnnnnnnnnnnnnnnnnnnnnnnnnnnnnnnnnnnnnnnnnnnnnnnnnnnnnnnnnnnnnnnnnnnnnnnnnnnnnnnnnnnnnnnnnnnnnnnnnnnnnnnnnnnnnnnnnnnnnnnnnnnnnnnnnnnnnnnnnnnnnnnnnnnnnnnnnnnnnnnnnnnnnnnnnnnnnnnnnnnnnnnnnnnnnnnnnnnnnnnnnnnnnnnnnnnnnnnnnnnnnnnnnnnnnnnnnnnnnnnnnnnnnnnnnnnnnnnnnnnnnnnnnnnnnnnnnnnnnnnnnnnnnnnnnnnnnnnnnnnnnnnnnnnnnnnnnnnnnnnnnnnnnnnnnnnnnnnnnnnnnnnnnnnnnnnnnnnnnnnnnnnnnnnnnnnnnnnnnnnnnnnnnnnnnnnnnnnnnnnnnnnnnnnnnnnnnnnnnnnnnnnnnnnnnnnnnnnnnnnnnnnnnnnnnnnnnnnnnnnnnnnnnnnnnnnnnnnnnnnnnnnnnnnnnnnnnnnnnnnnnnnnnnnnnnnnnnnnnnnnnnnnnnnnnnnnnnnnnnnnnnnnnnnnnnnnnnnnnnnnnnnnnnnnnnnnnnnnnnnnnnnnnnnnnnnnnnnnnnnnnnnnnnnnnnnnnnnnnnnnnnnnnnnnnnnnnnnnnnnnnnnnnnnnnnnnnnnnnnnnnnnnnnnnnnnnnnnnnnnnnnnnnnnnnnnnnnnnnnnnnnnnnnnnnnnnnnnnnnnnnnnnnnnnnnnnnnnnnnnnnnnnnnnnnnnnnnnnnnnnnnnnnnnnnnnnnnnnnnnnnnnnnnnnnnnnnnnnnnnnnnnnnnnnnnnnnnnnnnnnnnnnnnnnnnnnnnnnnnnnnnnnnnnnnnnnnnnnnnnnnnnnnnnnnnnnnnnnnnnnnnnnnnnnnnnnnnnnnnnnnnnnnnnnnnnnnnnnnnnnnnnnnnnnnnnnnnnnnnnnnnnnnnnnnnnnnnnnnnnnnnnnnnnnnnnnnnnnnnnnnnnnnnnnnnnnnnnnnnnnnnnnnnnnnnnnnnnnnnnnnnnnnnnnnnnnnnnnnnnnnnnnnnnnnnnnnnnnnnnnnnnnnnnnnnnnnnnnnnnnnnnnnnnnnnnnnnnnnnnnnnnnnnnnnnnnnnnnnnnnnnnnnnnnnnnnnnnnnnnnnnnnnnnnnnnnnnnnnnnnnnnnnnnnnnnnnnnnnnnnnnnnnnnnnnnnnnnnnnnnnnnnnnnnnnnnnnnnnnnnnnnnnnnnnnnnnnnnnnnnnnnnnnnnnnnnnnnnnnnnnnnnnnnnnnnnnnnnnnnnnnnnnnnnnnnnnnnnnnnnnnnnnnnnnnnnnnnnnnnnnnnnnnnnnnnnnnnnnnnnnnnnnnnnnnnnnnnnnnnnnnnnnnnnnnnnnnnnnnnnnnnnnnnnnnnnnnnnnnnnnnnnnnnnnnnnnnnnnnnnnnnnnnnnnnnnnnnnnnnnnnnnnnnnnnnnnnnnnnnnnnnnnnnnnnnnnnnnnnnnnnnnnnnnnnnnnnnnnnnnnnnnnnnnnnnnnnnnnnnnnnnnnnnnnnnnnnnnnnnnnnnnnnnnnnnnnnnnnnnnnnnnnnnnnnnnnnnnnnnnnnnnnnnnnnnnnnnnnnnnnnnnnnnnnnnnnnnnnnnnnnnnnnnnnnnnnnnnnnnnnnnnnnnnnnnnnnnnnnnnnnnnnnnnnnnnnnnnnnnnnnnnnnnnnnnnnnnnnnnnnnnnnnnnnnnnnnnnnnnnnnnnnnnnnnnnnnnnnnnnnnnnnnnnnnnnnnnnnnnnnnnnnnnnnnnnnnnnnnnnnnnnnnnnnnnnnnnnnnnnnnnnnnnnnnnnnnnnnnnnnnnnnnnnnnnnnnnnnnnnnnnnnnnnnnnnnnnnnnnnnnnnnnnnnnnnnnnnnnnnnnnnnnnnnnnnnnnnnnnnnnnnnnnnnnnnnnnnnnnnnnnnnnnnnnnnnnnnnnnnnnnnnnnnnnnnnnnnnnnnnnnnnnnnnnnnnnnnnnnnnnnnnnnnnnnnnnnnnnnnnnnnnnnnnnnnnnnnnnnnnnnnnnnnnnnnnnnnnnnnnnnnnnnnnnnnnnnnnnnnnnnnnnnnnnnnnnnnnnnnnnnnnnnnnnnnnnnnnnnnnnnnnnnnnnnnnnnnnnnnnnnnnnnnnnnnnnnnnnnnnnnnnnnnnnnnnnnnnnnnnnnnnnnnnnnnnnnnnnnnnnnnnnnnnnnnnnnnnnnnnnnnnnnnnnnnnnnnnnnnnnnnnnnnnnnnnnnnnnnnnnnnnnnnnnnnnnnnnnnnnnnnnnnnnnnnnnnnnnnnnnnnnnnnnnnnnnnnnnnnnnnnnnnnnnnnnnnnnnnnnnnnnnnnnnnnnnnnnnnnnnnnnnnnnnnnnnnnnnnnnnnnnnnnnnnnnnnnnnnnnnnnnnnnnnnnnnnnnnnnnnnnnnnnnnnnnnnnnnnnnnnnnnnnnnnnnnnnnnnnnnnnnnnnnnnnnnnnnnnnnnnnnnnnnnnnnnnnnnnnnnnnnnnnnnnnnnnnnnnnnnnnnnnnnnnnnnnnnnnnnnnnnnnnnnnnnnnnnnnnnnnnnnnnnnnnnnnnnnnnnnnnnnnnnnnnnnnnnnnnnnnnnnnnnnnnnnnnnnnnnnnnnnnnnnnnnnnnnnnnnnnnnnnnnnnnnnnnnnnnnnnnnnnnnnnnnnnnnnnnnnnnnnnnnnnnnnnnnnnnnnnnnnnnnnnnnnnnnnnnnnnnnnnnnnnnnnnnnnnnnnnnnnnnnnnnnnnnnnnnnnnnnnnnnnnnnnnnnnnnnnnnnnnnnnnnnnnnnnnnnnnnnnnnnnnnnnnnnnnnnnnnnnnnnnnnnnnnnnnnnnnnnnnnnnnnnnnnnnnnnnnnnnnnnnnnnnnnnnnnnnnnnnnnnnnnnnnnnnnnnnnnnnnnnnnnnnnnnnnnnnnnnnnnnnnnnnnnnnnnnnnnnnnnnnnnnnnnnnnnnnnnnnnnnnnnnnnnnnnnnnnnnnnnnnnnnnnnnnnnnnnnnnnnnnnnnnnnnnnnnnnnnnnnnnnnnnnnnnnnnnnnnnnnnnnnnnnnnnnnnnnnnnnnnnnnnnnnnnnnnnnnnnnnnnnnnnnnnnnnnnnnnnnnnnnnnnnnnnnnnnnnnnnnnnnnnnnnnnnnnnnnnnnnnnnnnnnnnnnnnnnnnnnnnnnnnnnnnnnnnnnnnnnnnnnnnnnnnnnnnnnnnnnnnnnnnnnnnnnnnnnnnnnnnnnnnnnnnnnnnnnnnnnnnnnnnnnnnnnnnnnnnnnnnnnnnnnnnnnnnnnnnnnnnnnnnnnnnnnnnnnnnnnnnnnnnnnnnnnnnnnnnnnnnnnnnnnnnnnnnnnnnnnnnnnnnnnnnnnnnnnnnnnnnnnnnnnnnnnnnnnnnnnnnnnnnnnnnnnnnnnnnnnnnnnnnnnnnnnnnnnnnnnnnnnnnnnnnnnnnnnnnnnnnnnnnnnnnnnnnnnnnnnnnnnnnnnnnnnnnnnnnnnnnnnnnnnnnnnnnnnnnnnnnnnnnnnnnnnnnnnnnnnnnnnnnnnnnnnnnnnnnnnnnnnnnnnnnnnnnnnnnnnnnnnnnnnnnnnnnnnnnnnnnnnnnnnnnnnnnnnnnnnnnnnnnnnnnnnnnnnnnnnnnnnnnnnnnnnnnnnnnnnnnnnnnnnnnnnnnnnnnnnnnnnnnnnnnnnnnnnnnnnnnnnnnnnnnnnnnnnnnnnnnnnnnnnnnnnnnnnnnnnnnnnnnnnnnnnnnnnnnnnnnnnnnnnnnnnnnnnnnnnnnnnnnnnnnnnnnnnnnnnnnnnnnnnnnnnnnnnnnnnnnnnnnnnnnnnnnnnnnnnnnnnnnnnnnnnnnnnnnnnnnnnnnnnnnnnnnnnnnnnnnnnnnnnnnnnnnnnnnnnnnnnnnnnnnnnnnnnnnnnnnnnnnnnnnnnnnnnnnnnnnnnnnnnnnnnnnnnnnnnnnnnnnnnnnnnnnnnnnnnnnnnnnnnnnnnnnnnnnnnnnnnnnnnnnnnnnnnnnnnnnnnnnnnnnnnnnnnnnnnnnnnnnnnnnnnnnnnnnnnnnnnnnnnnnnnnnnnnnnnnnnnnnnnnnnnnnnnnnnnnnnnnnnnnnnnnnnnnnnnnnnnnnnnnnnnnnnnnnnnnnnnnnnnnnnnnnnnnnnnnnnnnnnnnnnnnnnnnnnnnnnnnnnnnnnnnnnnnnnnnnnnnnnnnnnnnnnnnnnnnnnnnnnnnnnnnnnnnnnnnnnnnnnnnnnnnnnnnnnnnnnnnnnnnnnnnnnnnnnnnnnnnnnnnnnnnnnnnnnnnnnnnnnnnnnnnnnnnnnnnnnnnnnnnnnnnnnnnnnnnnnnnnnnnnnnnnnnnnnnnnnnnnnnnnnnnnnnnnnnnnnnnnnnnnnnnnnnnnnnnnnnnnnnnnnnnnnnnnnnnnnnnnnnnnnnnnnnnnnnnnnnnnnnnnnnnnnnnnnnnnnnnnnnnnnnnnnnnnnnnnnnnnnnnnnnnnnnnnnnnnnnnnnnnnnnnnnnnnnnnnnnnnnnnnnnnnnnnnnnnnnnnnnnnnnnnnnnnnnnnnnnnnnnnnnnnnnnnnnnnnnnnnnnnnnnnnnnnnnnnnnnnnnnnnnnnnnnnnnnnnnnnnnnnnnnnnnnnnnnnnnnnnnnnnnnnnnnnnnnnnnnnnnnnnnnnnnnnnnnnnnnnnnnnnnnnnnnnnnnnnnnnnnnnnnnnnnnnnnnnnnnnnnnnnnnnnnnnnnnnnnnnnnnnnnnnnnnnnnnnnnnnnnnnnnnnnnnnnnnnnnnnnnnnnnnnnnnnnnnnnnnnnnnnnnnnnnnnnnnnnnnnnnnnnnnnnnnnnnnnnnnnnnnnnnnnnnnnnnnnnnnnnnnnnnnnnnnnnnnnnnnnnnnnnnnnnnnnnnnnnnnnnnnnnnnnnnnnnnnnnnnnnnnnnnnnnnnnnnnnnnnnnnnnnnnnnnnnnnnnnnnnnnnnnnnnnnnnnnnnnnnnnnnnnnnnnnnnnnnnnnnnnnnnnnnnnnnnnnnnnnnnnnnnnnnnnnnnnnnnnnnnnnnnnnnnnnnnnnnnnnnnnnnnnnnnnnnnnnnnnnnnnnnnnnnnnnnnnnnnnnnnnnnnnnnnnnnnnnnnnnnnnnnnnnnnnnnnnnnnnnnnnnnnnnnnnnnnnnnnnnnnnnnnnnnnnnnnnnnnnnnnnnnnnnnnnnnnnnnnnnnnnnnnnnnnnnnnnnnnnnnnnnnnnnnnnnnnnnnnnnnnnnnnnnnnnnnnnnnnnnnnnnnnnnnnnnnnnnnnnnnnnnnnnnnnnnnnnnnnnnnnnnnnnnnnnnnnnnnnnnnnnnnnnnnnnnnnnnnnnnnnnnnnnnnnnnnnnnnnnnnnnnnnnnnnnnnnnnnnnnnnnnnnnnnnnnnnnnnnnnnnnnnnnnnnnnnnnnnnnnnnnnnnnnnnnnnnnnnnnnnnnnnnnnnnnnnnnnnnnnnnnnnnnnnnnnnnnnnnnnnnnnnnnnnnnnnnnnnnnnnnnnnnnnnnnnnnnnnnnnnnnnnnnnnnnnnnnnnnnnnnnnnnnnnnnnnnnnnnnnnnnnnnnnnnnnnnnnnnnnnnnnnnnnnnnnnnnnnnnnnnnnnnnnnnnnnnnnnnnnnnnnnnnnnnnnnnnnnnnnnnnnnnnnnnnnnnnnnnnnnnnnnnnnnnnnnnnnnnnnnnnnnnnnnnnnnnnnnnnnnnnnnnnnnnnnnnnnnnnnnnnnnnnnnnnnnnnnnnnnnnnnnnnnnnnnnnnnnnnnnnnnnnnnnnnnnnnnnnnnnnnnnnnnnnnnnnnnnnnnnnnnnnnnnnnnnnnnnnnnnnnnnnnnnnnnnnnnnnnnnnnnnnnnnnnnnnnnnnnnnnnnnnnnnnnnnnnnnnnnnnnnnnnnnnnnnnnnnnnnnnnnnnnnnnnnnnnnnnnnnnnnnnnnnnnnnnnnnnnnnnnnnnnnnnnnnnnnnnnnnnnnnnnnnnnnnnnnnnnnnnnnnnnnnnnnnnnnnnnnnnnnnnnnnnnnnnnnnnnnnnnnnnnnnnnnnnnnnnnnnnnnnnnnnnnnnnnnnnnnnnnnnnnnnnnnnnnnnnnnnnnnnnnnnnnnnnnnnnnnnnnnnnnnnnnnnnnnnnnnnnnnnnnnnnnnnnnnnnnnnnnnnnnnnnnnnnnnnnnnnnnnnnnnnnnnnnnnnnnnnnnnnnnnnnnnnnnnnnnnnnnnnnnnnnnnnnnnnnnnnnnnnnnnnnnnnnnnnnnnnnnnnnnnnnnnnnnnnnnnnnnnnnnnnnnnnnnnnnnnnnnnnnnnnnnnnnnnnnnnnnnnnnnnnnnnnnnnnnnnnnnnnnnnnnnnnnnnnnnnnnnnnnnnnnnnnnnnnnnnnnnnnnnnnnnnnnnnnnnnnnnnnnnnnnnnnnnnnnnnnnnnnnnnnnnnnnnnnnnnnnnnnnnnnnnnnnnnnnnnnnnnnnnnnnnnnnnnnnnnnnnnnnnnnnnnnnnnnnnnnnnnnnnnnnnnnnnnnnnnnnnnnnnnnnnnnnnnnnnnnnnnnnnnnnnnnnnnnnnnnnnnnnnnnnnnnnnnnnnnnnnnnnnnnnnnnnnnnnnnnnnnnnnnnnnnnnnnnnnnnnnnnnnnnnnnnnnnnnnnnnnnnnnnnnnnnnnnnnnnnnnnnnnnnnnnnnnnnnnnnnnnnnnnnnnnnnnnnnnnnnnnnnnnnnnnnnnnnnnnnnnnnnnnnnnnnnnnnnnnnnnnnnnnnnnnnnnnnnnnnnnnnnnnnnnnnnnnnnnnnnnnnnnnnnnnnnnnnnnnnnnnnnnnnnnnnnnnnnnnnnnnnnnnnnnnnnnnnnnnnnnnnnnnnnnnnnnnnnnnnnnnnnnnnnnnnnnnnnnnnnnnnnnnnnnnnnnnnnnnnnnnnnnnnnnnnnnnnnnnnnnnnnnnnnnnnnnnnnnnnnnnnnnnnnnnnnnnnnnnnnnnnnnnnnnnnnnnnnnnnnnnnnnnnnnnnnnnnnnnnnnnnnnnnnnnnnnnnnnnnnnnnnnnnnnnnnnnnnnnnnnnnnnnnnnnnnnnnnnnnnnnnnnnnnnnnnnnnnnnnnnnnnnnnnnnnnnnnnnnnnnnnnnnnnnnnnnnnnnnnnnnnnnnnnnnnnnnnnnnnnnnnnnnnnnnnnnnnnnnnnnnnnnnnnnnnnnnnnnnnnnnnnnnnnnnnnnnnnnnnnnnnnnnnnnnnnnnnnnnnnnnnnnnnnnnnnnnnnnnnnnnnnnnnnnnnnnnnnnnnnnnnnnnnnnnnnnnnnnnnnnnnnnnnnnnnnnnnnnnnnnnnnnnnnnnnnnnnnnnnnnnnnnnnnnnnnnnnnnnnnnnnnnnnnnnnnnnnnnnnnnnnnnnnnnnnnnnnnnnnnnnnnnnnnnnnnnnnnnnnnnnnnnnnnnnnnnnnnnnnnnnnnnnnnnnnnnnnnnnnnnnnnnnnnnnnnnnnnnnnnnnnnnnnnnnnnnnnnnnnnnnnnnnnnnnnnnnnnnnnnnnnnnnnnnnnnnnnnnnnnnnnnnnnnnnnnnnnnnnnnnnnnnnnnnnnnnnnnnnnnnnnnnnnnnnnnnnnnnnnnnnnnnnnnnnnnnnnnnnnnnnnnnnnnnnnnnnnnnnnnnnnnnnnnnnnnnnnnnnnnnnnnnnnnnnnnnnnnnnnnnnnnnnnnnnnnnnnnnnnnnnnnnnnnnnnnnnnnnnnnnnnnnnnnnnnnnnnnnnnnnnnnnnnnnnnnnnnnnnnnnnnnnnnnnnnnnnnnnnnnnnnnnnnnnnnnnnnnnnnnnnnnnnnnnnnnnnnnnnnnnnnnnnnnnnnnnnnnnnnnnnnnnnnnnnnnnnnnnnnnnnnnnnnnnnnnnnnnnnnnnnnnnnnnnnnnnnnnnnnnnnnnnnnnnnnnnnnnnnnnnnnnnnnnnnnnnnnnnnnnnnnnnnnnnnnnnnnnnnnnnnnnnnnnnnnnnnnnnnnnnnnnnnnnnnnnnnnnnnnnnnnnnnnnnnnnnnnnnnnnnnnnnnnnnnnnnnnnnnnnnnnnnnnnnnnnnnnnnnnnnnnnnnnnnnnnnnnnnnnnnnnnnnnnnnnnnnnnnnnnnnnnnnnnnnnnnnnnnnnnnnnnnnnnnnnnnnnnnnnnnnnnnnnnnnnnnnnnnnnnnnnnnnnnnnnnnnnnnnnnnnnnnnnnnnnnnnnnnnnnnnnnnnnnnnnnnnnnnnnnnnnnnnnnnnnnnnnnnnnnnnnnnnnnnnnnnnnnnnnnnnnnnnnnnnnnnnnnnnnnnnnnnnnnnnnnnnnnnnnnnnnnnnnnnnnnnnnnnnnnnnnnnnnnnnnnnnnnnnnnnnnnnnnnnnnnnnnnnnnnnnnnnnnnnnnnnnnnnnnnnnnnnnnnnnnnnnnnnnnnnnnnnnnnnnnnnnnnnnnnnnnnnnnnnnnnnnnnnnnnnnnnnnnnnnnnnnnnnnnnnnnnnnnnnnnnnnnnnnnnnnnnnnnnnnnnnnnnnnnnnnnnnnnnnnnnnnnnnnnnnnnnnnnnnnnnnnnnnnnnnnnnnnnnnnnnnnnnnnnnnnnnnnnnnnnnnnnnnnnnnnnnnnnnnnnnnnnnnnnnnnnnnnnnnnnnnnnnnnnnnnnnnnnnnnnnnnnnnnnnnnnnnnnnnnnnnnnnnnnnnnnnnnnnnnnnnnnnnnnnnnnnnnnnnnnnnnnnnnnnnnnnnnnnnnnnnnnnnnnnnnnnnnnnnnnnnnnnnnnnnnnnnnnnnnnnnnnnnnnnnnnnnnnnnnnnnnnnnnnnnnnnnnnnnnnnnnnnnnnnnnnnnnnnnnnnnnnnnnnnnnnnnnnnnnnnnnnnnnnnnnnnnnnnnnnnnnnnnnnnnnnnnnnnnnnnnnnnnnnnnnnnnnnnnnnnnnnnnnnnnnnnnnnnnnnnnnnnnnnnnnnnnnnnnnnnnnnnnnnnnnnnnnnnnnnnnnnnnnnnnnnnnnnnnnnnnnnnnnnnnnnnnnnnnnnnnnnnnnnnnnnnnnnnnnnnnnnnnnnnnnnnnnnnnnnnnnnnnnnnnnnnnnnnnnnnnnnnnnnnnnnnnnnnnnnnnnnnnnnnnnnnnnnnnnnnnnnnnnnnnnnnnnnnnnnnnnnnnnnnnnnnnnnnnnnnnnnnnnnnnnnnnnnnnnnnnnnnnnnnnnnnnnnnnnnnnnnnnnnnnnnnnnnnnnnnnnnnnnnnnnnnnnnnnnnnnnnnnnnnnnnnnnnnnnnnnnnnnnnnnnnnnnnnnnnnnnnnnnnnnnnnnnnnnnnnnnnnnnnnnnnnnnnnnnnnnnnnnnnnnnnnnnnnnnnnnnnnnnnnnnnnnnnnnnnnnnnnnnnnnnnnnnnnnnnnnnnnnnnnnnnnnnnnnnnnnnnnnnnnnnnnnnnnnnnnnnnnnnnnnnnnnnnnnnnnnnnnnnnnnnnnnnnnnnnnnnnnnnnnnnnnnnnnnnnnnnnnnnnnnnnnnnnnnnnnnnnnnnnnnnnnnnnnnnnnnnnnnnnnnnnnnnnnnnnnnnnnnnnnnnnnnnnnnnnnnnnnnnnnnnnnnnnnnnnnnnnnnnnnnnnnnnnnnnnnnnnnnnnnnnnnnnnnnnnnnnnnnnnnnnnnnnnnnnnnnnnnnnnnnnnnnnnnnnnnnnnnnnnnnnnnnnnnnnnnnnnnnnnnnnnnnnnnnnnnnnnnnnnnnnnnnnnnnnnnnnnnnnnnnnnnnnnnnnnnnnnnnnnnnnnnnnnnnnnnnnnnnnnnnnnnnnnnnnnnnnnnnnnnnnnnnnnnnnnnnnnnnnnnnnnnnnnnnnnnnnnnnnnnnnnnnnnnnnnnnnnnnnnnnnnnnnnnnnnnnnnnnnnnnnnnnnnnnnnnnnnnnnnnnnnnnnnnnnnnnnnnnnnnnnnnnnnnnnnnnnnnnnnnnnnnnnnnnnnnnnnnnnnnnnnnnnnnnnnnnnnnnnnnnnnnnnnnnnnnnnnnnnnnnnnnnnnnnnnnnnnnnnnnnnnnnnnnnnnnnnnnnnnnnnnnnnnnnnnnnnnnnnnnnnnnnnnnnnnnnnnnnnnnnnnnnnnnnnnnnnnnnnnnnnnnnnnnnnnnnnnnnnnnnnnnnnnnnnnnnnnnnnnnnnnnnnnnnnnnnnnnnnnnnnnnnnnnnnnnnnnnnnnnnnnnnnnnnnnnnnnnnnnnnnnnnnnnnnnnnnnnnnnnnnnnnnnnnnnnnnnnnnnnnnnnnnnnnnnnnnnnnnnnnnnnnnnnnnnnnnnnnnnnnnnnnnnnnnnnnnnnnnnnnnnnnnnnnnnnnnnnnnnnnnnnnnnnnnnnnnnnnnnnnnnnnnnnnnnnnnnnnnnnnnnnnnnnnnnnnnnnnnnnnnnnnnnnnnnnnnnnnnnnnnnnnnnnnnnnnnnnnnnnnnnnnnnnnnnnnnnnnnnnnnnnnnnnnnnnnnnnnnnnnnnnnnnnnnnnnnnnnnnnnnnnnnnnnnnnnnnnnnnnnnnnnnnnnnnnnnnnnnnnnnnnnnnnnnnnnnnnnnnnnnnnnnnnnnnnnnnnnnnnnnnnnnnnnnnnnnnnnnnnnnnnnnnnnnnnnnnnnnnnnnnnnnnnnnnnnnnnnnnnnnnnnnnnnnnnnnnnnnnnnnnnnnnnnnnnnnnnnnnnnnnnnnnnnnnnnnnnnnnnnnnnnnnnnnnnnnnnnnnnnnnnnnnnnnnnnnnnnnnnnnnnnnnnnnnnnnnnnnnnnnnnnnnnnnnnnnnnnnnnnnnnnnnnnnnnnnnnnnnnnnnnnnnnnnnnnnnnnnnnnnnnnnnnnnnnnnnnnnnnnnnnnnnnnnnnnnnnnnnnnnnnnnnnnnnnnnnnnnnnnnnnnnnnnnnnnnnnnnnnnnnnnnnnnnnnnnnnnnnnnnnnnnnnnnnnnnnnnnnnnnnnnnnnnnnnnnnnnnnnnnnnnnnnnnnnnnnnnnnnnnnnnnnnnnnnnnnnnnnnnnnnnnnnnnnnnnnnnnnnnnnnnnnnnnnnnnnnnnnnnnnnnnnnnnnnnnnnnnnnnnnnnnnnnnnnnnnnnnnnnnnnnnnnnnnnnnnnnnnnnnnnnnnnnnnnnnnnnnnnnnnnnnnnnnnnnnnnnnnnnnnnnnnnnnnnnnnnnnnnnnnnnnnnnnnnnnnnnnnnnnnnnnnnnnnnnnnnnnnnnnnnnnnnnnnnnnnnnnnnnnnnnnnnnnnnnnnnnnnnnnnnnnnnnnnnnnnnnnnnnnnnnnnnnnnnnnnnnnnnnnnnnnnnnnnnnnnnnnnnnnnnnnnnnnnnnnnnnnnnnnnnnnnnnnnnnnnnnnnnnnnnnnnnnnnnnnnnnnnnnnnnnnnnnnnnnnnnnnnnnnnnnnnnnnnnnnnnnnnnnnnnnnnnnnnnnnnnnnnnnnnnnnnnnnnnnnnnnnnnnnnnnnnnnnnnnnnnnnnnnnnnnnnnnnnnnnnnnnnnnnnnnnnnnnnnnnnnnnnnnnnnnnnnnnnnnnnnnnnnnnnnnnnnnnnnnnnnnnnnnnnnnnnnnnnnnnnnnnnnnnnnnnnnnnnnnnnnnnnnnnnnnnnnnnnnnnnnnnnnnnnnnnnnnnnnnnnnnnnnnnnnnnnnnnnnnnnnnnnnnnnnnnnnnnnnnnnnnnnnnnnnnnnnnnnnnnnnnnnnnnnnnnnnnnnnnnnnnnnnnnnnnnnnnnnnnnnnnnnnnnnnnnnnnnnnnnnnnnnnnnnnnnnnnnnnnnnnnnnnnnnnnnnnnnnnnnnnnnnnnnnnnnnnnnnnnnnnnnnnnnnnnnnnnnnnnnnnnnnnnnnnnnnnnnnnnnnnnnnnnnnnnnnnnnnnnnnnnnnnnnnnnnnnnnnnnnnnnnnnnnnnnnnnnnnnnnnnnnnnnnnnnnnnnnnnnnnnnnnnnnnnnnnnnnnnnnnnnnnnnnnnnnnnnnnnnnnnnnnnnnnnnnnnnnnnnnnnnnnnnnnnnnnnnnnnnnnnnnnnnnnnnnnnnnnnnnnnnnnnnnnnnnnnnnnnnnnnnnnnnnnnnnnnnnnnnnnnnnnnnnnnnnnnnnnnnnnnnnnnnnnnnnnnnnnnnnnnnnnnnnnnnnnnnnnnnnnnnnnnnnnnnnnnnnnnnnnnnnnnnnnnnnnnnnnnnnnnnnnnnnnnnnnnnnnnnnnnnnnnnnnnnnnnnnnnnnnnnnnnnnnnnnnnnnnnnnnnnnnnnnnnnnnnnnnnnnnnnnnnnnnnnnnnnnnnnnnnnnnnnnnnnnnnnnnnnnnnnnnnnnnnnnnnnnnnnnnnnnnnnnnnnnnnnnnnnnnnnnnnnnnnnnnnnnnnnnnnnnnnnnnnnnnnnnnnnnnnnnnnnnnnnnnnnnnnnnnnnnnnnnnnnnnnnnnnnnnnnnnnnnnnnnnnnnnnnnnnnnnnnnnnnnnnnnnnnnnnnnnnnnnnnnnnnnnnnnnnnnnnnnnnnnnnnnnnnnnnnnnnnnnnnnnnnnnnnnnnnnnnnnnnnnnnnnnnnnnnnnnnnnnnnnnnnnnnnnnnnnnnnnnnnnnnnnnnnnnnnnnnnnnnnnnnnnnnnnnnnnnnnnnnnnnnnnnnnnnnnnnnnnnnnnnnnnnnnnnnnnnnnnnnnnnnnnnnnnnnnnnnnnnnnnnnnnnnnnnnnnnnnnnnnnnnnnnnnnnnnnnnnnnnnnnnnnnnnnnnnnnnnnnnnnnnnnnnnnnnnnnnnnnnnnnnnnnnnnnnnnnnnnnnnnnnnnnnnnnnnnnnnnnnnnnnnnnnnnnnnnnnnnnnnnnnnnnnnnnnnnnnnnnnnnnnnnnnnnnnnnnnnnnnnnnnnnnnnnnnnnnnnnnnnnnnnnnnnnnnnnnnnnnnnnnnnnnnnnnnnnnnnnnnnnnnnnnnnnnnnnnnnnnnnnnnnnnnnnnnnnnnnnnnnnnnnnnnnnnnnnnnnnnnnnnnnnnnnnnnnnnnnnnnnnnnnnnnnnnnnnnnnnnnnnnnnnnnnnnnnnnnnnnnnnnnnnnnnnnnnnnnnnnnnnnnnnnnnnnnnnnnnnnnnnnnnnnnnnnnnnnnnnnnnnnnnnnnnnnnnnnnnnnnnnnnnnnnnnnnnnnnnnnnnnnnnnnnnnnnnnnnnnnnnnnnnnnnnnnnnnnnnnnnnnnnnnnnnnnnnnnnnnnnnnnnnnnnnnnnnnnnnnnnnnnnnnnnnnnnnnnnnnnnnnnnnnnnnnnnnnnnnnnnnnnnnnnnnnnnnnnnnnnnnnnnnnnnnnnnnnnnnnnnnnnnnnnnnnnnnnnnnnnnnnnnnnnnnnnnnnnnnnnnnnnnnnnnnnnnnnnnnnnnnnnnnnnnnnnnnnnnnnnnnnnnnnnnnnnnnnnnnnnnnnnnnnnnnnnnnnnnnnnnnnnnnnnnnnnnnnnnnnnnnnnnnnnnnnnnnnnnnnnnnnnnnnnnnnnnnnnnnnnnnnnnnnnnnnnnnnnnnnnnnnnnnnnnnnnnnnnnnnnnnnnnnnnnnnnnnnnnnnnnnnnnnnnnnnnnnnnnnnnnnnnnnnnnnnnnnnnnnnnnnnnnnnnnnnnnnnnnnnnnnnnnnnnnnnnnnnnnnnnnnnnnnnnnnnnnnnnnnnnnnnnnnnnnnnnnnnnnnnnnnnnnnnnnnnnnnnnnnnnnnnnnnnnnnnnnnnnnnnnnnnnnnnnnnnnnnnnnnnnnnnnnnnnnnnnnnnnnnnnnnnnnnnnnnnnnnnnnnnnnnnnnnnnnnnnnnnnnnnnnnnnnnnnnnnnnnnnnnnnnnnnnnnnnnnnnnnnnnnnnnnnnnnnnnnnnnnnnnnnnnnnnnnnnnnnnnnnnnnnnnnnnnnnnnnnnnnnnnnnnnnnnnnnnnnnnnnnnnnnnnnnnnnnnnnnnnnnnnnnnnnnnnnnnnnnnnnnnnnnnnnnnnnnnnnnnnnnnnnnnnnnnnnnnnnnnnnnnnnnnnnnnnnnnnnnnnnnnnnnnnnnnnnnnnnnnnnnnnnnnnnnnnnnnnnnnnnnnnnnnnnnnnnnnnnnnnnnnnnnnnnnnnnnnnnnnnnnnnnnnnnnnnnnnnnnnnnnnnnnnnnnnnnnnnnnnnnnnnnnnnnnnnnnnnnnnnnnnnnnnnnnnnnnnnnnnnnnnnnnnnnnnnnnnnnnnnnnnnnnnnnnnnnnnnnnnnnnnnnnnnnnnnnnnnnnnnnnnnnnnnnnnnnnnnnnnnnnnnnnnnnnnnnnnnnnnnnnnnnnnnnnnnnnnnnnnnnnnnnnnnnnnnnnnnnnnnnnnnnnnnnnnnnnnnnnnnnnnnnnnnnnnnnnnnnnnnnnnnnnnnnnnnnnnnnnnnnnnnnnnnnnnnnnnnnnnnnnnnnnnnnnnnnnnnnnnnnnnnnnnnnnnnnnnnnnnnnnnnnnnnnnnnnnnnnnnnnnnnnnnnnnnnnnnnnnnnnnnnnnnnnnnnnnnnnnnnnnnnnnnnnnnnnnnnnnnnnnnnnnnnnnnnnnnnnnnnnnnnnnnnnnnnnnnnnnnnnnnnnnnnnnnnnnnnnnnnnnnnnnnnnnnnnnnnnnnnnnnnnnnnnnnnnnnnnnnnnnnnnnnnnnnnnnnnnnnnnnnnnnnnnnnnnnnnnnnnnnnnnnnnnnnnnnnnnnnnnnnnnnnnnnnnnnnnnnnnnnnnnnnnnnnnnnnnnnnnnnnnnnnnnnnnnnnnnnnnnnnnnnnnnnnnnnnnnnnnnnnnnnnnnnnnnnnnnnnnnnnnnnnnnnnnnnnnnnnnnnnnnnnnnnnnnnnnnnnnnnnnnnnnnnnnnnnnnnnnnnnnnnnnnnnnnnnnnnnnnnnnnnnnnnnnnnnnnnnnnnnnnnnnnnnnnnnnnnnnnnnnnnnnnnnnnnnnnnnnnnnnnnnnnnnnnnnnnnnnnnnnnnnnnnnnnnnnnnnnnnnnnnnnnnnnnnnnnnnnnnnnnnnnnnnnnnnnnnnnnnnnnnnnnnnnnnnnnnnnnnnnnnnnnnnnnnnnnnnnnnnnnnnnnnnnnnnnnnnnnnnnnnnnnnnnnnnnnnnnnnnnnnnnnnnnnnnnnnnnnnnnnnnnnnnnnnnnnnnnnnnnnnnnnnnnnnnnnnnnnnnnnnnnnnnnnnnnnnnnnnnnnnnnnnnnnnnnnnnnnnnnnnnnnnnnnnnnnnnnnnnnnnnnnnnnnnnnnnnnnnnnnnnnnnnnnnnnnnnnnnnnnnnnnnnnnnnnnnnnnnnnnnnnnnnnnnnnnnnnnnnnnnnnnnnnnnnnnnnnnnnnnnnnnnnnnnnnnnnnnnnnnnnnnnnnnnnnnnnnnnnnnnnnnnnnnnnnnnnnnnnnnnnnnnnnnnnnnnnnnnnnnnnnnnnnnnnnnnnnnnnnnnnnnnnnnnnnnnnnnnnnnnnnnnnnnnnnnnnnnnnnnnnnnnnnnnnnnnnnnnnnnnnnnnnnnnnnnnnnnnnnnnnnnnnnnnnnnnnnnnnnnnnnnnnnnnnnnnnnnnnnnnnnnnnnnnnnnnnnnnnnnnnnnnnnnnnnnnnnnnnnnnnnnnnnnnnnnnnnnnnnnnnnnnnnnnnnnnnnnnnnnnnnnnnnnnnnnnnnnnnnnnnnnnnnnnnnnnnnnnnnnnnnnnnnnnnnnnnnnnnnnnnnnnnnnnnnnnnnnnnnnnnnnnnnnnnnnnnnnnnnnnnnnnnnnnnnnnnnnnnnnnnnnnnnnnnnnnnnnnnnnnnnnnnnnnnnnnnnnnnnnnnnnnnnnnnnnnnnnnnnnnnnnnnnnnnnnnnnnnnnnnnnnnnnnnnnnnnnnnnnnnnnnnnnnnnnnnnnnnnnnnnnnnnnnnnnnnnnnnnnnnnnnnnnnnnnnnnnnnnnnnnnnnnnnnnnnnnnnnnnnnnnnnnnnnnnnnnnnnnnnnnnnnnnnnnnnnnnnnnnnnnnnnnnnnnnnnnnnnnnnnnnnnnnnnnnnnnnnnnnnnnnnnnnnnnnnnnnnnnnnnnnnnnnnnnnnnnnnnnnnnnnnnnnnnnnnnnnnnnnnnnnnnnnnnnnnnnnnnnnnnnnnnnnnnnnnnnnnnnnnnnnnnnnnnnnnnnnnnnnnnnnnnnnnnnnnnnnnnnnnnnnnnnnnnnnnnnnnnnnnnnnnnnnnnnnnnnnnnnnnnnnnnnnnnnnnnnnnnnnnnnnnnnnnnnnnnnnnnnnnnnnnnnnnnnnnnnnnnnnnnnnnnnnnnnnnnnnnnnnnnnnnnnnnnnnnnnnnnnnnnnnnnnnnnnnnnnnnnnnnnnnnnnnnnnnnnnnnnnnnnnnnnnnnnnnnnnnnnnnnnnnnnnnnnnnnnnnnnnnnnnnnnnnnnnnnnnnnnnnnnnnnnnnnnnnnnnnnnnnnnnnnnnnnnnnnnnnnnnnnnnnnnnnnnnnnnnnnnnnnnnnnnnnnnnnnnnnnnnnnnnnnnnnnnnnnnnnnnnnnnnnnnnnnnnnnnnnnnnnnnnnnnnnnnnnnnnnnnnnnnnnnnnnnnnnnnnnnnnnnnnnnnnnnnnnnnnnnnnnnnnnnnnnnnnnnnnnnnnnnnnnnnnnnnnnnnnnnnnnnnnnnnnnnnnnnnnnnnnnnnnnnnnnnnnnnnnnnnnnnnnnnnnnnnnnnnnnnnnnnnnnnnnnnnnnnnnnnnnnnnnnnnnnnnnnnnnnnnnnnnnnnnnnnnnnnnnnnnnnnnnnnnnnnnnnnnnnnnnnnnnnnnnnnnnnnnnnnnnnnnnnnnnnnnnnnnnnnnnnnnnnnnnnnnnnnnnnnnnnnnnnnnnnnnnnnnnnnnnnnnnnnnnnnnnnnnnnnnnnnnnnnnnnnnnnnnnnnnnnnnnnnnnnnnnnnnnnnnnnnnnnnnnnnnnnnnnnnnnnnnnnnnnnnnnnnnnnnnnnnnnnnnnnnnnnnnnnnnnnnnnnnnnnnnnnnnnnnnnnnnnnnnnnnnnnnnnnnnnnnnnnnnnnnnnnnnnnnnnnnnnnnnnnnnnnnnnnnnnnnnnnnnnnnnnnnnnnnnnnnnnnnnnnnnnnnnnnnnnnnnnnnnnnnnnnnnnnnnnnnnnnnnnnnnnnnnnnnnnnnnnnnnnnnnnnnnnnnnnnnnnnnnnnnnnnnnnnnnnnnnnnnnnnnnnnnnnnnnnnnnnnnnnnnnnnnnnnnnnnnnnnnnnnnnnnnnnnnnnnnnnnnnnnnnnnnnnnnnnnnnnnnnnnnnnnnnnnnnnnnnnnnnnnnnnnnnnnnnnnnnnnnnnnnnnnnnnnnnnnnnnnnnnnnnnnnnnnnnnnnnnnnnnnnnnnnnnnnnnnnnnnnnnnnnnnnnnnnnnnnnnnnnnnnnnnnnnnnnnnnnnnnnnnnnnnnnnnnnnnnnnnnnnnnnnnnnnnnnnnnnnnnnnnnnnnnnnnnnnnnnnnnnnnnnnnnnnnnnnnnnnnnnnnnnnnnnnnnnnnnnnnnnnnnnnnnnnnnnnnnnnnnnnnnnnnnnnnnnnnnnnnnnnnnnnnnnnnnnnnnnnnnnnnnnnnnnnnnnnnnnnnnnnnnnnnnnnnnnnnnnnnnnnnnnnnnnnnnnnnnnnnnnnnnnnnnnnnnnnnnnnnnnnnnnnnnnnnnnnnnnnnnnnnnnnnnnnnnnnnnnnnnnnnnnnnnnnnnnnnnnnnnnnnnnnnnnnnnnnnnnnnnnnnnnnnnnnnnnnnnnnnnnnnnnnnnnnnnnnnnnnnnnnnnnnnnnnnnnnnnnnnnnnnnnnnnnnnnnnnnnnnnnnnnnnnnnnnnnnnnnnnnnnnnnnnnnnnnnnnnnnnnnnnnnnnnnnnnnnnnnnnnnnnnnnnnnnnnnnnnnnnnnnnnnnnnnnnnnnnnnnnnnnnnnnnnnnnnnnnnnnnnnnnnnnnnnnnnnnnnnnnnnnnnnnnnnnnnnnnnnnnnnnnnnnnnnnnnnnnnnnnnnnnnnnnnnnnnnnnnnnnnnnnnnnnnnnnnnnnnnnnnnnnnnnnnnnnnnnnnnnnnnnnnnnnnnnnnnnnnnnnnnnnnnnnnnnnnnnnnnnnnnnnnnnnnnnnnnnnnnnnnnnnnnnnnnnnnnnnnnnnnnnnnnnnnnnnnnnnnnnnnnnnnnnnnnnnnnnnnnnnnnnnnnnnnnnnnnnnnnnnnnnnnnnnnnnnnnnnnnnnnnnnnnnnnnnnnnnnnnnnnnnnnnnnnnnnnnnnnnnnnnnnnnnnnnnnnnnnnnnnnnnnnnnnnnnnnnnnnnnnnnnnnnnnnnnnnnnnnnnnnnnnnnnnnnnnnnnnnnnnnnnnnnnnnnnnnnnnnnnnnnnnnnnnnnnnnnnnnnnnnnnnnnnnnnnnnnnnnnnnnnnnnnnnnnnnnnnnnnnnnnnnnnnnnnnnnnnnnnnnnnnnnnnnnnnnnnnnnnnnnnnnnnnnnnnnnnnnnnnnnnnnnnnnnnnnnnnnnnnnnnnnnnnnnnnnnnnnnnnnnnnnnnnnnnnnnnnnnnnnnnnnnnnnnnnnnnnnnnnnnnnnnnnnnnnnnnnnnnnnnnnnnnnnnnnnnnnnnnnnnnnnnnnnnnnnnnnnnnnnnnnnnnnnnnnnnnnnnnnnnnnnnnnnnnnnnnnnnnnnnnnnnnnnnnnnnnnnnnnnnnnnnnnnnnnnnnnnnnnnnnnnnnnnnnnnnnnnnnnnnnnnnnnnnnnnnnnnnnnnnnnnnnnnnnnnnnnnnnnnnnnnnnnnnnnnnnnnnnnnnnnnnnnnnnnnnnnnnnnnnnnnnnnnnnnnnnnnnnnnnnnnnnnnnnnnnnnnnnnnnnnnnnnnnnnnnnnnnnnnnnnnnnnnnnnnnnnnnnnnnnnnnnnnnnnnnnnnnnnnnnnnnnnnnnnnnnnnnnnnnnnnnnnnnnnnnnnnnnnnnnnnnnnnnnnnnnnnnnnnnnnnnnnnnnnnnnnnnnnnnnnnnnnnnnnnnnnnnnnnnnnnnnnnnnnnnnnnnnnnnnnnnnnnnnnnnnnnnnnnnnnnnnnnnnnnnnnnnnnnnnnnnnnnnnnnnnnnnnnnnnnnnnnnnnnnnnnnnnnnnnnnnnnnnnnnnnnnnnnnnnnnnnnnnnnnnnnnnnnnnnnnnnnnnnnnnnnnnnnnnnnnnnnnnnnnnnnnnnnnnnnnnnnnnnnnnnnnnnnnnnnnnnnnnnnnnnnnnnnnnnnnnnnnnnnnnnnnnnnnnnnnnnnnnnnnnnnnnnnnnnnnnnnnnnnnnnnnnnnnnnnnnnnnnnnnnnnnnnnnnnnnnnnnnnnnnnnnnnnnnnnnnnnnnnnnnnnnnnnnnnnnnnnnnnnnnnnnnnnnnnnnnnnnnnnnnnnnnnnnnnnnnnnnnnnnnnnnnnnnnnnnnnnnnnnnnnnnnnnnnnnnnnnnnnnnnnnnnnnnnnnnnnnnnnnnnnnnnnnnnnnnnnnnnnnnnnnnnnnnnnnnnnnnnnnnnnnnnnnnnnnnnnnnnnnnnnnnnnnnnnnnnnnnnnnnnnnnnnnnnnnnnnnnnnnnnnnnnnnnnnnnnnnnnnnnnnnnnnnnnnnnnnnnnnnnnnnnnnnnnnnnnnnnnnnnnnnnnnnnnnnnnnnnnnnnnnnnnnnnnnnnnnnnnnnnnnnnnnnnnnnnnnnnnnnnnnnnnnnnnnnnnnnnnnnnnnnnnnnnnnnnnnnnnnnnnnnnnnnnnnnnnnnnnnnnnnnnnnnnnnnnnnnnnnnnnnnnnnnnnnnnnnnnnnnnnnnnnnnnnnnnnnnnnnnnnnnnnnnnnnnnnnnnnnnnnnnnnnnnnnnnnnnnnnnnnnnnnnnnnnnnnnnnnnnnnnnnnnnnnnnnnnnnnnnnnnnnnnnnnnnnnnnnnnnnnnnnnnnnnnnnnnnnnnnnnnnnnnnnnnnnnnnnnnnnnnnnnnnnnnnnnnnnnnnnnnnnnnnnnnnnnnnnnnnnnnnnnnnnnnnnnnnnnnnnnnnnnnnnnnnnnnnnnnnnnnnnnnnnnnnnnnnnnnnnnnnnnnnnnnnnnnnnnnnnnnnnnnnnnnnnnnnnnnnnnnnnnnnnnnnnnnnnnnnnnnnnnnnnnnnnnnnnnnnnnnnnnnnnnnnnnnnnnnnnnnnnnnnnnnnnnnnnnnnnnnnnnnnnnnnnnnnnnnnnnnnnnnnnnnnnnnnnnnnnnnnnnnnnnnnnnnnnnnnnnnnnnnnnnnnnnnnnnnnnnnnnnnnnnnnnnnnnnnnnnnnnnnnnnnnnnnnnnnnnnnnnnnnnnnnnnnnnnnnnnnnnnnnnnnnnnnnnnnnnnnnnnnnnnnnnnnnnnnnnnnnnnnnnnnnnnnnnnnnnnnnnnnnnnnnnnnnnnnnnnnnnnnnnnnnnnnnnnnnnnnnnnnnnnnnnnnnnnnnnnnnnnnnnnnnnnnnnnnnnnnnnnnnnnnnnnnnnnnnnnnnnnnnnnnnnnnnnnnnnnnnnnnnnnnnnnnnnnnnnnnnnnnnnnnnnnnnnnnnnnnnnnnnnnnnnnnnnnnnnnnnnnnnnnnnnnnnnnnnnnnnnnnnnnnnnnnnnnnnnnnnnnnnnnnnnnnnnnnnnnnnnnnnnnnnnnnnnnnnnnnnnnnnnnnnnnnnnnnnnnnnnnnnnnnnnnnnnnnnnnnnnnnnnnnnnnnnnnnnnnnnnnnnnnnnnnnnnnnnnnnnnnnnnnnnnnnnnnnnnnnnnnnnnnnnnnnnnnnnnnnnnnnnnnnnnnnnnnnnnnnnnnnnnnnnnnnnnnnnnnnnnnnnnnnnnnnnnnnnnnnnnnnnnnnnnnnnnnnnnnnnnnnnnnnnnnnnnnnnnnnnnnnnnnnnnnnnnnnnnnnnnnnnnnnnnnnnnnnnnnnnnnnnnnnnnnnnnnnnnnnnnnnnnnnnnnnnnnnnnnnnnnnnnnnnnnnnnnnnnnnnnnnnnnnnnnnnnnnnnnnnnnnnnnnnnnnnnnnnnnnnnnnnnnnnnnnnnnnnnnnnnnnnnnnnnnnnnnnnnnnnnnnnnnnnnnnnnnnnnnnnnnnnnnnnnnnnnnnnnnnnnnnnnnnnnnnnnnnnnnnnnnnnnnnnnnnnnnnnnnnnnnnnnnnnnnnnnnnnnnnnnnnnnnnnnnnnnnnnnnnnnnnnnnnnnnnnnnnnnnnnnnnnnnnnnnnnnnnnnnnnnnnnnnnnnnnnnnnnnnnnnnnnnnnnnnnnnnnnnnnnnnnnnnnnnnnnnnnnnnnnnnnnnnnnnnnnnnnnnnnnnnnnnnnnnnnnnnnnnnnnnnnnnnnnnnnnnnnnnnnnnnnnnnnnnnnnnnnnnnnnnnnnnnnnnnnnnnnnnnnnnnnnnnnnnnnnnnnnnnnnnnnnnnnnnnnnnnnnnnnnnnnnnnnnnnnnnnnnnnnnnnnnnnnnnnnnnnnnnnnnnnnnnnnnnnnnnnnnnnnnnnnnnnnnnnnnnnnnnnnnnnnnnnnnnnnnnnnnnnnnnnnnnnnnnnnnnnnnnnnnnnnnnnnnnnnnnnnnnnnnnnnnnnnnnnnnnnnnnnnnnnnnnnnnnnnnnnnnnnnnnnnnnnnnnnnnnnnnnnnnnnnnnnnnnnnnnnnnnnnnnnnnnnnnnnnnnnnnnnnnnnnnnnnnnnnnnnnnnnnnnnnnnnnnnnnnnnnnnnnnnnnnnnnnnnnnnnnnnnnnnnnnnnnnnnnnnnnnnnnnnnnnnnnnnnnnnnnnnnnnnnnnnnnnnnnnnnnnnnnnnnnnnnnnnnnnnnnnnnnnnnnnnnnnnnnnnnnnnnnnnnnnnnnnnnnnnnnnnnnnnnnnnnnnnnnnnnnnnnnnnnnnnnnnnnnnnnnnnnnnnnnnnnnnnnnnnnnnnnnnnnnnnnnnnnnnnnnnnnnnnnnnnnnnnnnnnnnnnnnnnnnnnnnnnnnnnnnnnnnnnnnnnnnnnnnnnnnnnnnnnnnnnnnnnnnnnnnnnnnnnnnnnnnnnnnnnnnnnnnnnnnnnnnnnnnnnnnnnnnnnnnnnnnnnnnnnnnnnnnnnnnnnnnnnnnnnnnnnnnnnnnnnnnnnnnnnnnnnnnnnnnnnnnnnnnnnnnnnnnnnnnnnnnnnnnnnnnnnnnnnnnnnnnnnnnnnnnnnnnnnnnnnnnnnnnnnnnnnnnnnnnnnnnnnnnnnnnnnnnnnnnnnnnnnnnnnnnnnnnnnnnnnnnnnnnnnnnnnnnnnnnnnnnnnnnnnnnnnnnnnnnnnnnnnnnnnnnnnnnnnnnnnnnnnnnnnnnnnnnnnnnnnnnnnnnnnnnnnnnnnnnnnnnnnnnnnnnnnnnnnnnnnnnnnnnnnnnnnnnnnnnnnnnnnnnnnnnnnnnnnnnnnnnnnnnnnnnnnnnnnnnnnnnnnnnnnnnnnnnnnnnnnnnnnnnnnnnnnnnnnnnnnnnnnnnnnnnnnnnnnnnnnnnnnnnnnnnnnnnnnnnnnnnnnnnnnnnnnnnnnnnnnnnnnnnnnnnnnnnnnnnnnnnnnnnnnnnnnnnnnnnnnnnnnnnnnnnnnnnnnnnnnnnnnnnnnnnnnnnnnnnnnnnnnnnnnnnnnnnnnnnnnnnnnnnnnnnnnnnnnnnnnnnnnnnnnnnnnnnnnnnnnnnnnnnnnnnnnnnnnnnnnnnnnnnnnnnnnnnnnnnnnnnnnnnnnnnnnnnnnnnnnnnnnnnnnnnnnnnnnnnnnnnnnnnnnnnnnnnnnnnnnnnnnnnnnnnnnnnnnnnnnnnnnnnnnnnnnnnnnnnnnnnnnnnnnnnnnnnnnnnnnnnnnnnnnnnnnnnnnnnnnnnnnnnnnnnnnnnnnnnnnnnnnnnnnnnnnnnnnnnnnnnnnnnnnnnnnnnnnnnnnnnnnnnnnnnnnnnnnnnnnnnnnnnnnnnnnnnnnnnnnnnnnnnnnnnnnnnnnnnnnnnnnnnnnnnnnnnnnnnnnnnnnnnnnnnnnnnnnnnnnnnnnnnnnnnnnnnnnnnnnnnnnnnnnnnnnnnnnnnnnnnnnnnnnnnnnnnnnnnnnnnnnnnnnnnnnnnnnnnnnnnnnnnnnnnnnnnnnnnnnnnnnnnnnnnnnnnnnnnnnnnnnnnnnnnnnnnnnnnnnnnnnnnnnnnnnnnnnnnnnnnnnnnnnnnnnnnnnnnnnnnnnnnnnnnnnnnnnnnnnnnnnnnnnnnnnnnnnnnnnnnnnnnnnnnnnnnnnnnnnnnnnnnnnnnnnnnnnnnnnnnnnnnnnnnnnnnnnnnnnnnnnnnnnnnnnnnnnnnnnnnnnnnnnnnnnnnnnnnnnnnnnnnnnnnnnnnnnnnnnnnnnnnnnnnnnnnnnnnnnnnnnnnnnnnnnnnnnnnnnnnnnnnnnnnnnnnnnnnnnnnnnnnnnnnnnnnnnnnnnnnnnnnnnnnnnnnnnnnnnnnnnnnnnnnnnnnnnnnnnnnnnnnnnnnnnnnnnnnnnnnnnnnnnnnnnnnnnnnnnnnnnnnnnnnnnnnnnnnnnnnnnnnnnnnnnnnnnnnnnnnnnnnnnnnnnnnnnnnnnnnnnnnnnnnnnnnnnnnnnnnnnnnnnnnnnnnnnnnnnnnnnnnnnnnnnnnnnnnnnnnnnnnnnnnnnnnnnnnnnnnnnnnnnnnnnnnnnnnnnnnnnnnnnnnnnnnnnnnnnnnnnnnnnnnnnnnnnnnnnnnnnnnnnnnnnnnnnnnnnnnnnnnnnnnnnnnnnnnnnnnnnnnnnnnnnnnnnnnnnnnnnnnnnnnnnnnnnnnnnnnnnnnnnnnnnnnnnnnnnnnnnnnnnnnnnnnnnnnnnnnnnnnnnnnnnnnnnnnnnnnnnnnnnnnnnnnnnnnnnnnnnnnnnnnnnnnnnnnnnnnnnnnnnnnnnnnnnnnnnnnnnnnnnnnnnnnnnnnnnnnnnnnnnnnnnnnnnnnnnnnnnnnnnnnnnnnnnnnnnnnnnnnnnnnnnnnnnnnnnnnnnnnnnnnnnnnnnnnnnnnnnnnnnnnnnnnnnnnnnnnnnnnnnnnnnnnnnnnnnnnnnnnnnnnnnnnnnnnnnnnnnnnnnnnnnnnnnnnnnnnnnnnnnnnnnnnnnnnnnnnnnnnnnnnnnnnnnnnnnnnnnnnnnnnnnnnnnnnnnnnnnnnnnnnnnnnnnnnnnnnnnnnnnnnnnnnnnnnnnnnnnnnnnnnnnnnnnnnnnnnnnnnnnnnnnnnnnnnnnnnnnnnnnnnnnnnnnnnnnnnnnnnnnnnnnnnnnnnnnnnnnnnnnnnnnnnnnnnnnnnnnnnnnnnnnnnnnnnnnnnnnnnnnnnnnnnnnnnnnnnnnnnnnnnnnnnnnnnnnnnnnnnnnnnnnnnnnnnnnnnnnnnnnnnnnnnnnnnnnnnnnnnnnnnnnnnnnnnnnnnnnnnnnnnnnnnnnnnnnnnnnnnnnnnnnnnnnnnnnnnnnnnnnnnnnnnnnnnnnnnnnnnnnnnnnnnnnnnnnnnnnnnnnnnnnnnnnnnnnnnnnnnnnnnnnnnnnnnnnnnnnnnnnnnnnnnnnnnnnnnnnnnnnnnnnnnnnnnnnnnnnnnnnnnnnnnnnnnnnnnnnnnnnnnnnnnnnnnnnnnnnnnnnnnnnnnnnnnnnnnnnnnnnnnnnnnnnnnnnnnnnnnnnnnnnnnnnnnnnnnnnnnnnnnnnnnnnnnnnnnnnnnnnnnnnnnnnnnnnnnnnnnnnnnnnnnnnnnnnnnnnnnnnnnnnnnnnnnnnnnnnnnnnnnnnnnnnnnnnnnnnnnnnnnnnnnnnnnnnnnnnnnnnnnnnnnnnnnnnnnnnnnnnnnnnnnnnnnnnnnnnnnnnnnnnnnnnnnnnnnnnnnnnnnnnnnnnnnnnnnnnnnnnnnnnnnnnnnnnnnnnnnnnnnnnnnnnnnnnnnnnnnnnnnnnnnnnnnnnnnnnnnnnnnnnnnnnnnnnnnnnnnnnnnnnnnnnnnnnnnnnnnnnnnnnnnnnnnnnnnnnnnnnnnnnnnnnnnnnnnnnnnnnnnnnnnnnnnnnnnnnnnnnnnnnnnnnnnnnnnnnnnnnnnnnnnnnnnnnnnnnnnnnnnnnnnnnnnnnnnnnnnnnnnnnnnnnnnnnnnnnnnnnnnnnnnnnnnnnnnnnnnnnnnnnnnnnnnnnnnnnnnnnnnnnnnnnnnnnnnnnnnnnnnnnnnnnnnnnnnnnnnnnnnnnnnnnnnnnnnnnnnnnnnnnnnnnnnnnnnnnnnnnnnnnnnnnnnnnnnnnnnnnnnnnnnnnnnnnnnnnnnnnnnnnnnnnnnnnnnnnnnnnnnnnnnnnnnnnnnnnnnnnnnnnnnnnnnnnnnnnnnnnnnnnnnnnnnnnnnnnnnnnnnnnnnnnnnnnnnnnnnnnnnnnnnnnnnnnnnnnnnnnnnnnnnnnnnnnnnnnnnnnnnnnnnnnnnnnnnnnnnnnnnnnnnnnnnnnnnnnnnnnnnnnnnnnnnnnnnnnnnnnnnnnnnnnnnnnnnnnnnnnnnnnnnnnnnnnnnnnnnnnnnnnnnnnnnnnnnnnnnnnnnnnnnnnnnnnnnnnnnnnnnnnnnnnnnnnnnnnnnnnnnnnnnnnnnnnnnnnnnnnnnnnnnnnnnnnnnnnnnnnnnnnnnnnnnnnnnnnnnnnnnnnnnnnnnnnnnnnnnnnnnnnnnnnnnnnnnnnnnnnnnnnnnnnnnnnnnnnnnnnnnnnnnnnnnnnnnnnnnnnnnnnnnnnnnnnnnnnnnnnnnnnnnnnnnnnnnnnnnnnnnnnnnnnnnnnnnnnnnnnnnnnnnnnnnnnnnnnnnnnnnnnnnnnnnnnnnnnnnnnnnnnnnnnnnnnnnnnnnnnnnnnnnnnnnnnnnnnnnnnnnnnnnnnnnnnnnnnnnnnnnnnnnnnnnnnnnnnnnnnnnnnnnnnnnnnnnnnnnnnnnnnnnnnnnnnnnnnnnnnnnnnnnnnnnnnnnnnnnnnnnnnnnnnnnnnnnnnnnnnnnnnnnnnnnnnnnnnnnnnnnnnnnnnnnnnnnnnnnnnnnnnnnnnnnnnnnnnnnnnnnnnnnnnnnnnnnnnnnnnnnnnnnnnnnnnnnnnnnnnnnnnnnnnnnnnnnnnnnnnnnnnnnnnnnnnnnnnnnnnnnnnnnnnnnnnnnnnnnnnnnnnnnnnnnnnnnnnnnnnnnnnnnnnnnnnnnnnnnnnnnnnnnnnnnnnnnnnnnnnnnnnnnnnnnnnnnnnnnnnnnnnnnnnnnnnnnnnnnnnnnnnnnnnnnnnnnnnnnnnnnnnnnnnnnnnnnnnnnnnnnnnnnnnnnnnnnnnnnnnnnnnnnnnnnnnnnnnnnnnnnnnnnnnnnnnnnnnnnnnnnnnnnnnnnnnnnnnnnnnnnnnnnnnnnnnnnnnnnnnnnnnnnnnnnnnnnnnnnnnnnnnnnnnnnnnnnnnnnnnnnnnnnnnnnnnnnnnnnnnnnnnnnnnnnnnnnnnnnnnnnnnnnnnnnnnnnnnnnnnnnnnnnnnnnnnnnnnnnnnnnnnnnnnnnnnnnnnnnnnnnnnnnnnnnnnnnnnnnnnnnnnnnnnnnnnnnnnnnnnnnnnnnnnnnnnnnnnnnnnnnnnnnnnnnnnnnnnnnnnnnnnnnnnnnnnnnnnnnnnnnnnnnnnnnnnnnnnnnnnnnnnnnnnnnnnnnnnnnnnnnnnnnnnnnnnnnnnnnnnnnnnnnnnnnnnnnnnnnnnnnnnnnnnnnnnnnnnnnnnnnnnnnnnnnnnnnnnnnnnnnnnnnnnnnnnnnnnnnnnnnnnnnnnnnnnnnnnnnnnnnnnnnnnnnnnnnnnnnnnnnnnnnnnnnnnnnnnnnnnnnnnnnnnnnnnnnnnnnnnnnnnnnnnnnnnnnnnnnnnnnnnnnnnnnnnnnnnnnnnnnnnnnnnnnnnnnnnnnnnnnnnnnnnnnnnnnnnnnnnnnnnnnnnnnnnnnnnnnnnnnnnnnnnnnnnnnnnnnnnnnnnnnnnnnnnnnnnnnnnnnnnnnnnnnnnnnnnnnnnnnnnnnnnnnnnnnnnnnnnnnnnnnnnnnnnnnnnnnnnnnnnnnnnnnnnnnnnnnnnnnnnnnnnnnnnnnnnnnnnnnnnnnnnnnnnnnnnnnnnnnnnnnnnnnnnnnnnnnnnnnnnnnnnnnnnnnnnnnnnnnnnnnnnnnnnnnnnnnnnnnnnnnnnnnnnnnnnnnnnnnnnnnnnnnnnnnnnnnnnnnnnnnnnnnnnnnnnnnnnnnnnnnnnnnnnnnnnnnnnnnnnnnnnnnnnnnnnnnnnnnnnnnnnnnnnnnnnnnnnnnnnnnnnnnnnnnnnnnnnnnnnnnnnnnnnnnnnnnnnnnnnnnnnnnnnnnnnnnnnnnnnnnnnnnnnnnnnnnnnnnnnnnnnnnnnnnnnnnnnnnnnnnnnnnnnnnnnnnnnnnnnnnnnnnnnnnnnnnnnnnnnnnnnnnnnnnnnnnnnnnnnnnnnnnnnnnnnnnnnnnnnnnnnnnnnnnnnnnnnnnnnnnnnnnnnnnnnnnnnnnnnnnnnnnnnnnnnnnnnnnnnnnnnnnnnnnnnnnnnnnnnnnnnnnnnnnnnnnnnnnnnnnnnnnnnnnnnnnnnnnnnnnnnnnnnnnnnnnnnnnnnnnnnnnnnnnnnnnnnnnnnnnnnnnnnnnnnnnnnnnnnnnnnnnnnnnnnnnnnnnnnnnnnnnnnnnnnnnnnnnnnnnnnnnnnnnnnnnnnnnnnnnnnnnnnnnnnnnnnnnnnnnnnnnnnnnnnnnnnnnnnnnnnnnnnnnnnnnnnnnnnnnnnnnnnnnnnnnnnnnnnnnnnnnnnnnnnnnnnnnnnnnnnnnnnnnnnnnnnnnnnnnnnnnnnnnnnnnnnnnnnnnnnnnnnnnnnnnnnnnnnnnnnnnnnnnnnnnnnnnnnnnnnnnnnnnnnnnnnnnnnnnnnnnnnnnnnnnnnnnnnnnnnnnnnnnnnnnnnnnnnnnnnnnnnnnnnnnnnnnnnnnnnnnnnnnnnnnnnnnnnnnnnnnnnnnnnnnnnnnnnnnnnnnnnnnnnnnnnnnnnnnnnnnnnnnnnnnnnnnnnnnnnnnnnnnnnnnnnnnnnnnnnnnnnnnnnnnnnnnnnnnnnnnnnnnnnnnnnnnnnnnnnnnnnnnnnnnnnnnnnnnnnnnnnnnnnnnnnnnnnnnnnnnnnnnnnnnnnnnnnnnnnnnnnnnnnnnnnnnnnnnnnnnnnnnnnnnnnnnnnnnnnnnnnnnnnnnnnnnnnnnnnnnnnnnnnnnnnnnnnnnnnnnnnnnnnnnnnnnnnnnnnnnnnnnnnnnnnnnnnnnnnnnnnnnnnnnnnnnnnnnnnnnnnnnnnnnnnnnnnnnnnnnnnnnnnnnnnnnnnnnnnnnnnnnnnnnnnnnnnnnnnnnnnnnnnnnnnnnnnnnnnnnnnnnnnnnnnnnnnnnnnnnnnnnnnnnnnnnnnnnnnnnnnnnnnnnnnnnnnnnnnnnnnnnnnnnnnnnnnnnnnnnnnnnnnnnnnnnnnnnnnnnnnnnnnnnnnnnnnnnnnnnnnnnnnnnnnnnnnnnnnnnnnnnnnnnnnnnnnnnnnnnnnnnnnnnnnnnnnnnnnnnnnnnnnnnnnnnnnnnnnnnnnnnnnnnnnnnnnnnnnnnnnnnnnnnnnnnnnnnnnnnnnnnnnnnnnnnnnnnnnnnnnnnnnnnnnnnnnnnnnnnnnnnnnnnnnnnnnnnnnnnnnnnnnnnnnnnnnnnnnnnnnnnnnnnnnnnnnnnnnnnnnnnnnnnnnnnnnnnnnnnnnnnnnnnnnnnnnnnnnnnnnnnnnnnnnnnnnnnnnnnnnnnnnnnnnnnnnnnnnnnnnnnnnnnnnnnnnnnnnnnnnnnnnnnnnnnnnnnnnnnnnnnnnnnnnnnnnnnnnnnnnnnnnnnnnnnnnnnnnnnnnnnnnnnnnnnnnnnnnnnnnnnnnnnnnnnnnnnnnnnnnnnnnnnnnnnnnnnnnnnnnnnnnnnnnnnnnnnnnnnnnnnnnnnnnnnnnnnnnnnnnnnnnnnnnnnnnnnnnnnnnnnnnnnnnnnnnnnnnnnnnnnnnnnnnnnnnnnnnnnnnnnnnnnnnnnnnnnnnnnnnnnnnnnnnnnnnnnnnnnnnnnnnnnnnnnnnnnnnnnnnnnnnnnnnnnnnnnnnnnnnnnnnnnnnnnnnnnnnnnnnnnnnnnnnnnnnnnnnnnnnnnnnnnnnnnnnnnnnnnnnnnnnnnnnnnnnnnnnnnnnnnnnnnnnnnnnnnnnnnnnnnnnnnnnnnnnnnnnnnnnnnnnnnnnnnnnnnnnnnnnnnnnnnnnnnnnnnnnnnnnnnnnnnnnnnnnnnnnnnnnnnnnnnnnnnnnnnnnnnnnnnnnnnnnnnnnnnnnnnnnnnnnnnnnnnnnnnnnnnnnnnnnnnnnnnnnnnnnnnnnnnnnnnnnnnnnnnnnnnnnnnnnnnnnnnnnnnnnnnnnnnnnnnnnnnnnnnnnnnnnnnnnnnnnnnnnnnnnnnnnnnnnnnnnnnnnnnnnnnnnnnnnnnnnnnnnnnnnnnnnnnnnnnnnnnnnnnnnnnnnnnnnnnnnnnnnnnnnnnnnnnnnnnnnnnnnnnnnnnnnnnnnnnnnnnnnnnnnnnnnnnnnnnnnnnnnnnnnnnnnnnnnnnnnnnnnnnnnnnnnnnnnnnnnnnnnnnnnnnnnnnnnnnnnnnnnnnnnnnnnnnnnnnnnnnnnnnnnnnnnnnnnnnnnnnnnnnnnnnnnnnnnnnnnnnnnnnnnnnnnnnnnnnnnnnnnnnnnnnnnnnnnnnnnnnnnnnnnnnnnnnnnnnnnnnnnnnnnnnnnnnnnnnnnnnnnnnnnnnnnnnnnnnnnnnnnnnnnnnnnnnnnnnnnnnnnnnnnnnnnnnnnnnnnnnnnnnnnnnnnnnnnnnnnnnnnnnnnnnnnnnnnnnnnnnnnnnnnnnnnnnnnnnnnnnnnnnnnnnnnnnnnnnnnnnnnnnnnnnnnnnnnnnnnnnnnnnnnnnnnnnnnnnnnnnnnnnnnnnnnnnnnnnnnnnnnnnnnnnnnnnnnnnnnnnnnnnnnnnnnnnnnnnnnnnnnnnnnnnnnnnnnnnnnnnnnnnnnnnnnnnnnnnnnnnnnnnnnnnnnnnnnnnnnnnnnnnnnnnnnnnnnnnnnnnnnnnnnnnnnnnnnnnnnnnnnnnnnnnnnnnnnnnnnnnnnnnnnnnnnnnnnnnnnnnnnnnnnnnnnnnnnnnnnnnnnnnnnnnnnnnnnnnnnnnnnnnnnnnnnnnnnnnnnnnnnnnnnnnnnnnnnnnnnnnnnnnnnnnnnnnnnnnnnnnnnnnnnnnnnnnnnnnnnnnnnnnnnnnnnnnnnnnnnnnnnnnnnnnnnnnnnnnnnnnnnnnnnnnnnnnnnnnnnnnnnnnnnnnnnnnnnnnnnnnnnnnnnnnnnnnnnnnnnnnnnnnnnnnnnnnnnnnnnnnnnnnnnnnnnnnnnnnnnnnnnnnnnnnnnnnnnnnnnnnnnnnnnnnnnnnnnnnnnnnnnnnnnnnnnnnnnnnnnnnnnnnnnnnnnnnnnnnnnnnnnnnnnnnnnnnnnnnnnnnnnnnnnnnnnnnnnnnnnnnnnnnnnnnnnnnnnnnnnnnnnnnnnnnnnnnnnnnnnnnnnnnnnnnnnnnnnnnnnnnnnnnnnnnnnnnnnnnnnnnnnnnnnnnnnnnnnnnnnnnnnnnnnnnnnnnnnnnnnnnnnnnnnnnnnnnnnnnnnnnnnnnnnnnnnnnnnnnnnnnnnnnnnnnnnnnnnnnnnnnnnnnnnnnnnnnnnnnnnnnnnnnnnnnnnnnnnnnnnnnnnnnnnnnnnnnnnnnnnnnnnnnnnnnnnnnnnnnnnnnnnnnnnnnnnnnnnnnnnnnnnnnnnnnnnnnnnnnnnnnnnnnnnnnnnnnnnnnnnnnnnnnnnnnnnnnnnnnnnnnnnnnnnnnnnnnnnnnnnnnnnnnnnnnnnnnnnnnnnnnnnnnnnnnnnnnnnnnnnnnnnnnnnnnnnnnnnnnnnnnnnnnnnnnnnnnnnnnnnnnnnnnnnnnnnnnnnnnnnnnnnnnnnnnnnnnnnnnnnnnnnnnnnnnnnnnnnnnnnnnnnnnnnnnnnnnnnnnnnnnnnnnnnnnnnnnnnnnnnnnnnnnnnnnnnnnnnnnnnnnnnnnnnnnnnnnnnnnnnnnnnnnnnnnnnnnnnnnnnnnnnnnnnnnnnnnnnnnnnnnnnnnnnnnnnnnnnnnnnnnnnnnnnnnnnnnnnnnnnnnnnnnnnnnnnnnnnnnnnnnnnnnnnnnnnnnnnnnnnnnnnnnnnnnnnnnnnnnnnnnnnnnnnnnnnnnnnnnnnnnnnnnnnnnnnnnnnnnnnnnnnnnnnnnnnnnnnnnnnnnnnnnnnnnnnnnnnnnnnnnnnnnnnnnnnnnnnnnnnnnnnnnnnnnnnnnnnnnnnnnnnnnnnnnnnnnnnnnnnnnnnnnnnnnnnnnnnnnnnnnnnnnnnnnnnnnnnnnnnnnnnnnnnnnnnnnnnnnnnnnnnnnnnnnnnnnnnnnnnnnnnnnnnnnnnnnnnnnnnnnnnnnnnnnnnnnnnnnnnnnnnnnnnnnnnnnnnnnnnnnnnnnnnnnnnnnnnnnnnnnnnnnnnnnnnnnnnnnnnnnnnnnnnnnnnnnnnnnnnnnnnnnnnnnnnnnnnnnnnnnnnnnnnnnnnnnnnnnnnnnnnnnnnnnnnnnnnnnnnnnnnnnnnnnnnnnnnnnnnnnnnnnnnnnnnnnnnnnnnnnnnnnnnnnnnnnnnnnnnnnnnnnnnnnnnnnnnnnnnnnnnnnnnnnnnnnnnnnnnnnnnnnnnnnnnnnnnnnnnnnnnnnnnnnnnnnnnnnnnnnnnnnnnnnnnnnnnnnnnnnnnnnnnnnnnnnnnnnnnnnnnnnnnnnnnnnnnnnnnnnnnnnnnnnnnnnnnnnnnnnnnnnnnnnnnnnnnnnnnnnnnnnnnnnnnnnnnnnnnnnnnnnnnnnnnnnnnnnnnnnnnnnnnnnnnnnnnnnnnnnnnnnnnnnnnnnnnnnnnnnnnnnnnnnnnnnnnnnnnnnnnnnnnnnnnnnnnnnnnnnnnnnnnnnnnnnnnnnnnnnnnnnnnnnnnnnnnnnnnnnnnnnnnnnnnnnnnnnnnnnnnnnnnnnnnnnnnnnnnnnnnnnnnnnnnnnnnnnnnnnnnnnnnnnnnnnnnnnnnnnnnnnnnnnnnnnnnnnnnnnnnnnnnnnnnnnnnnnnnnnnnnnnnnnnnnnnnnnnnnnnnnnnnnnnnnnnnnnnnnnnnnnnnnnnnnnnnnnnnnnnnnnnnnnnnnnnnnnnnnnnnnnnnnnnnnnnnnnnnnnnnnnnnnnnnnnnnnnnnnnnnnnnnnnnnnnnnnnnnnnnnnnnnnnnnnnnnnnnnnnnnnnnnnnnnnnnnnnnnnnnnnnnnnnnnnnnnnnnnnnnnnnnnnnnnnnnnnnnnnnnnnnnnnnnnnnnnnnnnnnnnnnnnnnnnnnnnnnnnnnnnnnnnnnnnnnnnnnnnnnnnnnnnnnnnnnnnnnnnnnnnnnnnnnnnnnnnnnnnnnnnnnnnnnnnnnnnnnnnnnnnnnnnnnnnnnnnnnnnnnnnnnnnnnnnnnnnnnnnnnnnnnnnnnnnnnnnnnnnnnnnnnnnnnnnnnnnnnnnnnnnnnnnnnnnnnnnnnnnnnnnnnnnnnnnnnnnnnnnnnnnnnnnnnnnnnnnnnnnnnnnnnnnnnnnnnnnnnnnnnnnnnnnnnnnnnnnnnnnnnnnnnnnnnnnnnnnnnnnnnnnnnnnnnnnnnnnnnnnnnnnnnnnnnnnnnnnnnnnnnnnnnnnnnnnnnnnnnnnnnnnnnnnnnnnnnnnnnnnnnnnnnnnnnnnnnnnnnnnnnnnnnnnnnnnnnnnnnnnnnnnnnnnnnnnnnnnnnnnnnnnnnnnnnnnnnnnnnnnnnnnnnnnnnnnnnnnnnnnnnnnnnnnnnnnnnnnnnnnnnnnnnnnnnnnnnnnnnnnnnnnnnnnnnnnnnnnnnnnnnnnnnnnnnnnnnnnnnnnnnnnnnnnnnnnnnnnnnnnnnnnnnnnnnnnnnnnnnnnnnnnnnnnnnnnnnnnnnnnnnnnnnnnnnnnnnnnnnnnnnnnnnnnnnnnnnnnnnnnnnnnnnnnnnnnnnnnnnnnnnnnnnnnnnnnnnnnnnnnnnnnnnnnnnnnnnnnnnnnnnnnnnnnnnnnnnnnnnnnnnnnnnnnnnnnnnnnnnnnnnnnnnnnnnnnnnnnnnnnnnnnnnnnnnnnnnnnnnnnnnnnnnnnnnnnnnnnnnnnnnnnnnnnnnnnnnnnnnnnnnnnnnnnnnnnnnnnnnnnnnnnnnnnnnnnnnnnnnnnnnnnnnnnnnnnnnnnnnnnnnnnnnnnnnnnnnnnnnnnnnnnnnnnnnnnnnnnnnnnnnnnnnnnnnnnnnnnnnnnnnnnnnnnnnnnnnnnnnnnnnnnnnnnnnnnnnnnnnnnnnnnnnnnnnnnnnnnnnnnnnnnnnnnnnnnnnnnnnnnnnnnnnnnnnnnnnnnnnnnnnnnnnnnnnnnnnnnnnnnnnnnnnnnnnnnnnnnnnnnnnnnnnnnnnnnnnnnnnnnnnnnnnnnnnnnnnnnnnnnnnnnnnnnnnnnnnnnnnnnnnnnnnnnnnnnnnnnnnnnnnnnnnnnnnnnnnnnnnnnnnnnnnnnnnnnnnnnnnnnnnnnnnnnnnnnnnnnnnnnnnnnnnnnnnnnnnnnnnnnnnnnnnnnnnnnnnnnnnnnnnnnnnnnnnnnnnnnnnnnnnnnnnnnnnnnnnnnnnnnnnnnnnnnnnnnnnnnnnnnnnnnnnnnnnnnnnnnnnnnnnnnnnnnnnnnnnnnnnnnnnnnnnnnnnnnnnnnnnnnnnnnnnnnnnnnnnnnnnnnnnnnnnnnnnnnnnnnnnnnnnnnnnnnnnnnnnnnnnnnnnnnnnnnnnnnnnnnnnnnnnnnnnnnnnnnnnnnnnnnnnnnnnnnnnnnnnnnnnnnnnnnnnnnnnnnnnnnnnnnnnnnnnnnnnnnnnnnnnnnnnnnnnnnnnnnnnnnnnnnnnnnnnnnnnnnnnnnnnnnnnnnnnnnnnnnnnnnnnnnnnnnnnnnnnnnnnnnnnnnnnnnnnnnnnnnnnnnnnnnnnnnnnnnnnnnnnnnnnnnnnnnnnnnnnnnnnnnnnnnnnnnnnnnnnnnnnnnnnnnnnnnnnnnnnnnnnnnnnnnnnnnnnnnnnnnnnnnnnnnnnnnnnnnnnnnnnnnnnnnnnnnnnnnnnnnnnnnnnnnnnnnnnnnnnnnnnnnnnnnnnnnnnnnnnnnnnnnnnnnnnnnnnnnnnnnnnnnnnnnnnnnnnnnnnnnnnnnnnnnnnnnnnnnnnnnnnnnnnnnnnnnnnnnnnnnnnnnnnnnnnnnnnnnnnnnnnnnnnnnnnnnnnnnnnnnnnnnnnnnnnnnnnnnnnnnnnnnnnnnnnnnnnnnnnnnnnnnnnnnnnnnnnnnnnnnnnnnnnnnnnnnnnnnnnnnnnnnnnnnnnnnnnnnnnnnnnnnnnnnnnnnnnnnnnnnnnnnnnnnnnnnnnnnnnnnnnnnnnnnnnnnnnnnnnnnnnnnnnnnnnnnnnnnnnnnnnnnnnnnnnnnnnnnnnnnnnnnnnnnnnnnnnnnnnnnnnnnnnnnnnnnnnnnnnnnnnnnnnnnnnnnnnnnnnnnnnnnnnnnnnnnnnnnnnnnnnnnnnnnnnnnnnnnnnnnnnnnnnnnnnnnnnnnnnnnnnnnnnnnnnnnnnnnnnnnnnnnnnnnnnnnnnnnnnnnnnnnnnnnnnnnnnnnnnnnnnnnnnnnnnnnnnnnnnnnnnnnnnnnnnnnnnnnnnnnnnnnnnnnnnnnnnnnnnnnnnnnnnnnnnnnnnnnnnnnnnnnnnnnnnnnnnnnnnnnnnnnnnnnnnnnnnnnnnnnnnnnnnnnnnnnnnnnnnnnnnnnnnnnnnnnnnnnnnnnnnnnnnnnnnnnnnnnnnnnnnnnnnnnnnnnnnnnnnnnnnnnnnnnnnnnnnnnnnnnnnnnnnnnnnnnnnnnnnnnnnnnnnnnnnnnnnnnnnnnnnnnnnnnnnnnnnnnnnnnnnnnnnnnnnnnnnnnnnnnnnnnnnnnnnnnnnnnnnnnnnnnnnnnnnnnnnnnnnnnnnnnnnnnnnnnnnnnnnnnnnnnnnnnnnnnnnnnnnnnnnnnnnnnnnnnnnnnnnnnnnnnnnnnnnnnnnnnnnnnnnnnnnnnnnnnnnnnnnnnnnnnnnnnnnnnnnnnnnnnnnnnnnnnnnnnnnnnnnnnnnnnnnnnnnnnnnnnnnnnnnnnnnnnnnnnnnnnnnnnnnnnnnnnnnnnnnnnnnnnnnnnnnnnnnnnnnnnnnnnnnnnnnnnnnnnnnnnnnnnnnnnnnnnnnnnnnnnnnnnnnnnnnnnnnnnnnnnnnnnnnnnnnnnnnnnnnnnnnnnnnnnnnnnnnnnnnnnnnnnnnnnnnnnnnnnnnnnnnnnnnnnnnnnnnnnnnnnnnnnnnnnnnnnnnnnnnnnnnnnnnnnnnnnnnnnnnnnnnnnnnnnnnnnnnnnnnnnnnnnnnnnnnnnnnnnnnnnnnnnnnnnnnnnnnnnnnnnnnnnnnnnnnnnnnnnnnnnnnnnnnnnnnnnnnnnnnnnnnnnnnnnnnnnnnnnnnnnnnnnnnnnnnnnnnnnnnnnnnnnnnnnnnnnnnnnnnnnnnnnnnnnnnnnnnnnnnnnnnnnnnnnnnnnnnnnnnnnnnnnnnnnnnnnnnnnnnnnnnnnnnnnnnnnnnnnnnnnnnnnnnnnnnnnnnnnnnnnnnnnnnnnnnnnnnnnnnnnnnnnnnnnnnnnnnnnnnnnnnnnnnnnnnnnnnnnnnnnnnnnnnnnnnnnnnnnnnnnnnnnnnnnnnnnnnnnnnnnnnnnnnnnnnnnnnnnnnnnnnnnnnnnnnnnnnnnnnnnnnnnnnnnnnnnnnnnnnnnnnnnnnnnnnnnnnnnnnnnnnnnnnnnnnnnnnnnnnnnnnnnnnnnnnnnnnnnnnnnnnnnnnnnnnnnnnnnnnnnnnnnnnnnnnnnnnnnnnnnnnnnnnnnnnnnnnnnnnnnnnnnnnnnnnnnnnnnnnnnnnnnnnnnnnnnnnnnnnnnnnnnnnnnnnnnnnnnnnnnnnnnnnnnnnnnnnnnnnnnnnnnnnnnnnnnnnnnnnnnnnnnnnnnnnnnnnnnnnnnnnnnnnnnnnnnnnnnnnnnnnnnnnnnnnnnnnnnnnnnnnnnnnnnnnnnnnnnnnnnnnnnnnnnnnnnnnnnnnnnnnnnnnnnnnnnnnnnnnnnnnnnnnnnnnnnnnnnnnnnnnnnnnnnnnnnnnnnnnnnnnnnnnnnnnnnnnnnnnnnnnnnnnnnnnnnnnnnnnnnnnnnnnnnnnnnnnnnnnnnnnnnnnnnnnnnnnnnnnnnnnnnnnnnnnnnnnnnnnnnnnnnnnnnnnnnnnnnnnnnnnnnnnnnnnnnnnnnnnnnnnnnnnnnnnnnnnnnnnnnnnnnnnnnnnnnnnnnnnnnnnnnnnnnnnnnnnnnnnnnnnnnnnnnnnnnnnnnnnnnnnnnnnnnnnnnnnnnnnnnnnnnnnnnnnnnnnnnnnnnnnnnnnnnnnnnnnnnnnnnnnnnnnnnnnnnnnnnnnnnnnnnnnnnnnnnnnnnnnnnnnnnnnnnnnnnnnnnnnnnnnnnnnnnnnnnnnnnnnnnnnnnnnnnnnnnnnnnnnnnnnnnnnnnnnnnnnnnnnnnnnnnnnnnnnnnnnnnnnnnnnnnnnnnnnnnnnnnnnnnnnnnnnnnnnnnnnnnnnnnnnnnnnnnnnnnnnnnnnnnnnnnnnnnnnnnnnnnnnnnnnnnnnnnnnnnnnnnnnnnnnnnnnnnnnnnnnnnnnnnnnnnnnnnnnnnnnnnnnnnnnnnnnnnnnnnnnnnnnnnnnnnnnnnnnnnnnnnnnnnnnnnnnnnnnnnnnnnnnnnnnnnnnnnnnnnnnnnnnnnnnnnnnnnnnnnnnnnnnnnnnnnnnnnnnnnnnnnnnnnnnnnnnnnnnnnnnnnnnnnnnnnnnnnnnnnnnnnnnnnnnnnnnnnnnnnnnnnnnnnnnnnnnnnnnnnnnnnnnnnnnnnnnnnnnnnnnnnnnnnnnnnnnnnnnnnnnnnnnnnnnnnnnnnnnnnnnnnnnnnnnnnnnnnnnnnnnnnnnnnnnnnnnnnnnnnnnnnnnnnnnnnnnnnnnnnnnnnnnnnnnnnnnnnnnnnnnnnnnnnnnnnnnnnnnnnnnnnnnnnnnnnnnnnnnnnnnnnnnnnnnnnnnnnnnnnnnnnnnnnnnnnnnnnnnnnnnnnnnnnnnnnnnnnnnnnnnnnnnnnnnnnnnnnnnnnnnnnnnnnnnnnnnnnnnnnnnnnnnnnnnnnnnnnnnnnnnnnnnnnnnnnnnnnnnnnnnnnnnnnnnnnnnnnnnnnnnnnnnnnnnnnnnnnnnnnnnnnnnnnnnnnnnnnnnnnnnnnnnnnnnnnnnnnnnnnnnnnnnnnnnnnnnnnnnnnnnnnnnnnnnnnnnnnnnnnnnnnnnnnnnnnnnnnnnnnnnnnnnnnnnnnnnnnnnnnnnnnnnnnnnnnnnnnnnnnnnnnnnnnnnnnnnnnnnnnnnnnnnnnnnnnnnnnnnnnnnnnnnnnnnnnnnnnnnnnnnnnnnnnnnnnnnnnnnnnnnnnnnnnnnnnnnnnnnnnnnnnnnnnnnnnnnnnnnnnnnnnnnnnnnnnnnnnnnnnnnnnnnnnnnnnnnnnnnnnnnnnnnnnnnnnnnnnnnnnnnnnnnnnnnnnnnnnnnnnnnnnnnnnnnnnnnnnnnnnnnnnnnnnnnnnnnnnnnnnnnnnnnnnnnnnnnnnnnnnnnnnnnnnnnnnnnnnnnnnnnnnnnnnnnnnnnnnnnnnnnnnnnnnnnnnnnnnnnnnnnnnnnnnnnnnnnnnnnnnnnnnnnnnnnnnnnnnnnnnnnnnnnnnnnnnnnnnnnnnnnnnnnnnnnnnnnnnnnnnnnnnnnnnnnnnnnnnnnnnnnnnnnnnnnnnnnnnnnnnnnnnnnnnnnnnnnnnnnnnnnnnnnnnnnnnnnnnnnnnnnnnnnnnnnnnnnnnnnnnnnnnnnnnnnnnnnnnnnnnnnnnnnnnnnnnnnnnnnnnnnnnnnnnnnnnnnnnnnnnnnnnnnnnnnnnnnnnnnnnnnnnnnnnnnnnnnnnnnnnnnnnnnnnnnnnnnnnnnnnnnnnnnnnnnnnnnnnnnnnnnnnnnnnnnnnnnnnnnnnnnnnnnnnnnnnnnnnnnnnnnnnnnnnnnnnnnnnnnnnnnnnnnnnnnnnnnnnnnnnnnnnnnnnnnnnnnnnnnnnnnnnnnnnnnnnnnnnnnnnnnnnnnnnnnnnnnnnnnnnnnnnnnnnnnnnnnnnnnnnnnnnnnnnnnnnnnnnnnnnnnnnnnnnnnnnnnnnnnnnnnnnnnnnnnnnnnnnnnnnnnnnnnnnnnnnnnnnnnnnnnnnnnnnnnnnnnnnnnnnnnnnnnnnnnnnnnnnnnnnnnnnnnnnnnnnnnnnnnnnnnnnnnnnnnnnnnnnnnnnnnnnnnnnnnnnnnnnnnnnnnnnnnnnnnnnnnnnnnnnnnnnnnnnnnnnnnnnnnnnnnnnnnnnnnnnnnnnnnnnnnnnnnnnnnnnnnnnnnnnnnnnnnnnnnnnnnnnnnnnnnnnnnnnnnnnnnnnnnnnnnnnnnnnnnnnnnnnnnnnnnnnnnnnnnnnnnnnnnnnnnnnnnnnnnnnnnnnnnnnnnnnnnnnnnnnnnnnnnnnnnnnnnnnnnnnnnnnnnnnnnnnnnnnnnnnnnnnnnnnnnnnnnnnnnnnnnnnnnnnnnnnnnnnnnnnnnnnnnnnnnnnnnnnnnnnnnnnnnnnnnnnnnnnnnnnnnnnnnnnnnnnnnnnnnnnnnnnnnnnnnnnnnnnnnnnnnnnnnnnnnnnnnnnnnnnnnnnnnnnnnnnnnnnnnnnnnnnnnnnnnnnnnnnnnnnnnnnnnnnnnnnnnnnnnnnnnnnnnnnnnnnnnnnnnnnnnnnnnnnnnnnnnnnnnnnnnnnnnnnnnnnnnnnnnnnnnnnnnnnnnnnnnnnnnnnnnnnnnnnnnnnnnnnnnnnnnnnnnnnnnnnnnnnnnnnnnnnnnnnnnnnnnnnnnnnnnnnnnnnnnnnnnnnnnnnnnnnnnnnnnnnnnnnnnnnnnnnnnnnnnnnnnnnnnnnnnnnnnnnnnnnnnnnnnnnnnnnnnnnnnnnnnnnnnnnnnnnnnnnnnnnnnnnnnnnnnnnnnnnnnnnnnnnnnnnnnnnnnnnnnnnnnnnnnnnnnnnnnnnnnnnnnnnnnnnnnnnnnnnnnnnnnnnnnnnnnnnnnnnnnnnnnnnnnnnnnnnnnnnnnnnnnnnnnnnnnnnnnnnnnnnnnnnnnnnnnnnnnnnnnnnnnnnnnnnnnnnnnnnnnnnnnnnnnnnnnnnnnnnnnnnnnnnnnnnnnnnnnnnnnnnnnnnnnnnnnnnnnnnnnnnnnnnnnnnnnnnnnnnnnnnnnnnnnnnnnnnnnnnnnnnnnnnnnnnnnnnnnnnnnnnnnnnnnnnnnnnnnnnnnnnnnnnnnnnnnnnnnnnnnnnnnnnnnnnnnnnnnnnnnnnnnnnnnnnnnnnnnnnnnnnnnnnnnnnnnnnnnnnnnnnnnnnnnnnnnnnnnnnnnnnnnnnnnnnnnnnnnnnnnnnnnnnnnnnnnnnnnnnnnnnnnnnnnnnnnnnnnnnnnnnnnnnnnnnnnnnnnnnnnnnnnnnnnnnnnnnnnnnnnnnnnnnnnnnnnnnnnnnnnnnnnnnnnnnnnnnnnnnnnnnnnnnnnnnnnnnnnnnnnnnnnnnnnnnnnnnnnnnnnnnnnnnnnnnnnnnnnnnnnnnnnnnnnnnnnnnnnnnnnnnnnnnnnnnnnnnnnnnnnnnnnnnnnnnnnnnnnnnnnnnnnnnnnnnnnnnnnnnnnnnnnnnnnnnnnnnnnnnnnnnnnnnnnnnnnnnnnnnnnnnnnnnnnnnnnnnnnnnnnnnnnnnnnnnnnnnnnnnnnnnnnnnnnnnnnnnnnnnnnnnnnnnnnnnnnnnnnnnnnnnnnnnnnnnnnnnnnnnnnnnnnnnnnnnnnnnnnnnnnnnnnnnnnnnnnnnnnnnnnnnnnnnnnnnnnnnnnnnnnnnnnnnnnnnnnnnnnnnnnnnnnnnnnnnnnnnnnnnnnnnnnnnnnnnnnnnnnnnnnnnnnnnnnnnnnnnnnnnnnnnnnnnnnnnnnnnnnnnnnnnnnnnnnnnnnnnnnnnnnnnnnnnnnnnnnnnnnnnnnnnnnnnnnnnnnnnnnnnnnnnnnnnnnnnnnnnnnnnnnnnnnnnnnnnnnnnnnnnnnnnnnnnnnnnnnnnnnnnnnnnnnnnnnnnnnnnnnnnnnnnnnnnnnnnnnnnnnnnnnnnnnnnnnnnnnnnnnnnnnnnnnnnnnnnnnnnnnnnnnnnnnnnnnnnnnnnnnnnnnnnnnnnnnnnnnnnnnnnnnnnnnnnnnnnnnnnnnnnnnnnnnnnnnnnnnnnnnnnnnnnnnnnnnnnnnnnnnnnnnnnnnnnnnnnnnnnnnnnnnnnnnnnnnnnnnnnnnnnnnnnnnnnnnnnnnnnnnnnnnnnnnnnnnnnnnnnnnnnnnnnnnnnnnnnnnnnnnnnnnnnnnnnnnnnnnnnnnnnnnnnnnnnnnnnnnnnnnnnnnnnnnnnnnnnnnnnnnnnnnnnnnnnnnnnnnnnnnnnnnnnnnnnnnnnnnnnnnnnnnnnnnnnnnnnnnnnnnnnnnnnnnnnnnnnnnnnnnnnnnnnnnnnnnnnnnnnnnnnnnnnnnnnnnnnnnnnnnnnnnnnnnnnnnnnnnnnnnnnnnnnnnnnnnnnnnnnnnnnnnnnnnnnnnnnnnnnnnnnnnnnnnnnnnnnnnnnnnnnnnnnnnnnnnnnnnnnnnnnnnnnnnnnnnnnnnnnnnnnnnnnnnnnnnnnnnnnnnnnnnnnnnnnnnnnnnnnnnnnnnnnnnnnnnnnnnnnnnnnnnnnnnnnnnnnnnnnnnnnnnnnnnnnnnnnnnnnnnnnnnnnnnnnnnnnnnnnnnnnnnnnnnnnnnnnnnnnnnnnnnnnnnnnnnnnnnnnnnnnnnnnnnnnnnnnnnnnnnnnnnnnnnnnnnnnnnnnnnnnnnnnnnnnnnnnnnnnnnnnnnnnnnnnnnnnnnnnnnnnnnnnnnnnnnnnnnnnnnnnnnnnnnnnnnnnnnnnnnnnnnnnnnnnnnnnnnnnnnnnnnnnnnnnnnnnnnnnnnnnnnnnnnnnnnnnnnnnnnnnnnnnnnnnnnnnnnnnnnnnnnnnnnnnnnnnnnnnnnnnnnnnnnnnnnnnnnnnnnnnnnnnnnnnnnnnnnnnnnnnnnnnnnnnnnnnnnnnnnnnnnnnnnnnnnnnnnnnnnnnnnnnnnnnnnnnnnnnnnnnnnnnnnnnnnnnnnnnnnnnnnnnnnnnnnnnnnnnnnnnnnnnnnnnnnnnnnnnnnnnnnnnnnnnnnnnnnnnnnnnnnnnnnnnnnnnnnnnnnnnnnnnnnnnnnnnnnnnnnnnnnnnnnnnnnnnnnnnnnnnnnnnnnnnnnnnnnnnnnnnnnnnnnnnnnnnnnnnnnnnnnnnnnnnnnnnnnnnnnnnnnnnnnnnnnnnnnnnnnnnnnnnnnnnnnnnnnnnnnnnnnnnnnnnnnnnnnnnnnnnnnnnnnnnnnnnnnnnnnnnnnnnnnnnnnnnnnnnnnnnnnnnnnnnnnnnnnnnnnnnnnnnnnnnnnnnnnnnnnnnnnnnnnnnnnnnnnnnnnnnnnnnnnnnnnnnnnnnnnnnnnnnnnnnnnnnnnnnnnnnnnnnnnnnnnnnnnnnnnnnnnnnnnnnnnnnnnnnnnnnnnnnnnnnnnnnnnnnnnnnnnnnnnnnnnnnnnnnnnnnnnnnnnnnnnnnnnnnnnnnnnnnnnnnnnnnnnnnnnnnnnnnnnnnnnnnnnnnnnnnnnnnnnnnnnnnnnnnnnnnnnnnnnnnnnnnnnnnnnnnnnnnnnnnnnnnnnnnnnnnnnnnnnnnnnnnnnnnnnnnnnnnnnnnnnnnnnnnnnnnnnnnnnnnnnnnnnnnnnnnnnnnnnnnnnnnnnnnnnnnnnnnnnnnnnnnnnnnnnnnnnnnnnnnnnnnnnnnnnnnnnnnnnnnnnnnnnnnnnnnnnnnnnnnnnnnnnnnnnnnnnnnnnnnnnnnnnnnnnnnnnnnnnnnnnnnnnnnnnnnnnnnnnnnnnnnnnnnnnnnnnnnnnnnnnnnnnnnnnnnnnnnnnnnnnnnnnnnnnnnnnnnnnnnnnnnnnnnnnnnnnnnnnnnnnnnnnnnnnnnnnnnnnnnnnnnnnnnnnnnnnnnnnnnnnnnnnnnnnnnnnnnnnnnnnnnnnnnnnnnnnnnnnnnnnnnnnnnnnnnnnnnnnnnnnnnnnnnnnnnnnnnnnnnnnnnnnnnnnnnnnnnnnnnnnnnnnnnnnnnnnnnnnnnnnnnnnnnnnnnnnnnnnnnnnnnnnnnnnnnnnnnnnnnnnnnnnnnnnnnnnnnnnnnnnnnnnnnnnnnnnnnnnnnnnnnnnnnnnnnnnnnnnnnnnnnnnnnnnnnnnnnnnnnnnnnnnnnnnnnnnnnnnnnnnnnnnnnnnnnnnnnnnnnnnnnnnnnnnnnnnnnnnnnnnnnnnnnnnnnnnnnnnnnnnnnnnnnnnnnnnnnnnnnnnnnnnnnnnnnnnnnnnnnnnnnnnnnnnnnnnnnnnnnnnnnnnnnnnnnnnnnnnnnnnnnnnnnnnnnnnnnnnnnnnnnnnnnnnnnnnnnnnnnnnnnnnnnnnnnnnnnnnnnnnnnnnnnnnnnnnnnnnnnnnnnnnnnnnnnnnnnnnnnnnnnnnnnnnnnnnnnnnnnnnnnnnnnnnnnnnnnnnnnnnnnnnnnnnnnnnnnnnnnnnnnnnnnnnnnnnnnnnnnnnnnnnnnnnnnnnnnnnnnnnnnnnnnnnnnnnnnnnnnnnnnnnnnnnnnnnnnnnnnnnnnnnnnnnnnnnnnnnnnnnnnnnnnnnnnnnnnnnnnnnnnnnnnnnnnnnnnnnnnnnnnnnnnnnnnnnnnnnnnnnnnnnnnnnnnnnnnnnnnnnnnnnnnnnnnnnnnnnnnnnnnnnnnnnnnnnnnnnnnnnnnnnnnnnnnnnnnnnnnnnnnnnnnnnnnnnnnnnnnnnnnnnnnnnnnnnnnnnnnnnnnnnnnnnnnnnnnnnnnnnnnnnnnnnnnnnnnnnnnnnnnnnnnnnnnnnnnnnnnnnnnnnnnnnnnnnnnnnnnnnnnnnnnnnnnnnnnnnnnnnnnnnnnnnnnnnnnnnnnnnnnnnnnnnnnnnnnnnnnnnnnnnnnnnnnnnnnnnnnnnnnnnnnnnnnnnnnnnnnnnnnnnnnnnnnnnnnnnnnnnnnnnnnnnnnnnnnnnnnnnnnnnnnnnnnnnnnnnnnnnnnnnnnnnnnnnnnnnnnnnnnnnnnnnnnnnnnnnnnnnnnnnnnnnnnnnnnnnnnnnnnnnnnnnnnnnnnnnnnnnnnnnnnnnnnnnnnnnnnnnnnnnnnnnnnnnnnnnnnnnnnnnnnnnnnnnnnnnnnnnnnnnnnnnnnnnnnnnnnnnnnnnnnnnnnnnnnnnnnnnnnnnnnnnnnnnnnnnnnnnnnnnnnnnnnnnnnnnnnnnnnnnnnnnnnnnnnnnnnnnnnnnnnnnnnnnnnnnnnnnnnnnnnnnnnnnnnnnnnnnnnnnnnnnnnnnnnnnnnnnnnnnnnnnnnnnnnnnnnnnnnnnnnnnnnnnnnnnnnnnnnnnnnnnnnnnnnnnnnnnnnnnnnnnnnnnnnnnnnnnnnnnnnnnnnnnnnnnnnnnnnnnnnnnnnnnnnnnnnnnnnnnnnnnnnnnnnnnnnnnnnnnnnnnnnnnnnnnnnnnnnnnnnnnnnnnnnnnnnnnnnnnnnnnnnnnnnnnnnnnnnnnnnnnnnnnnnnnnnnnnnnnnnnnnnnnnnnnnnnnnnnnnnnnnnnnnnnnnnnnnnnnnnnnnnnnnnnnnnnnnnnnnnnnnnnnnnnnnnnnnnnnnnnnnnnnnnnnnnnnnnnnnnnnnnnnnnnnnnnnnnnnnnnnnnnnnnnnnnnnnnnnnnnnnnnnnnnnnnnnnnnnnnnnnnnnnnnnnnnnnnnnnnnnnnnnnnnnnnnnnnnnnnnnnnnnnnnnnnnnnnnnnnnnnnnnnnnnnnnnnnnnnnnnnnnnnnnnnnnnnnnnnnnnnnnnnnnnnnnnnnnnnnnnnnnnnnnnnnnnnnnnnnnnnnnnnnnnnnnnnnnnnnnnnnnnnnnnnnnnnnnnnnnnnnnnnnnnnnnnnnnnnnnnnnnnnnnnnnnnnnnnnnnnnnnnnnnnnnnnnnnnnnnnnnnnnnnnnnnnnnnnnnnnnnnnnnnnnnnnnnnnnnnnnnnnnnnnnnnnnnnnnnnnnnnnnnnnnnnnnnnnnnnnnnnnnnnnnnnnnnnnnnnnnnnnnnnnnnnnnnnnnnnnnnnnnnnnnnnnnnnnnnnnnnnnnnnnnnnnnnnnnnnnnnnnnnnnnnnnnnnnnnnnnnnnnnnnnnnnnnnnnnnnnnnnnnnnnnnnnnnnnnnnnnnnnnnnnnnnnnnnnnnnnnnnnnnnnnnnnnnnnnnnnnnnnnnnnnnnnnnnnnnnnnnnnnnnnnnnnnnnnnnnnnnnnnnnnnnnnnnnnnnnnnnnnnnnnnnnnnnnnnnnnnnnnnnnnnnnnnnnnnnnnnnnnnnnnnnnnnnnnnnnnnnnnnnnnnnnnnnnnnnnnnnnnnnnnnnnnnnnnnnnnnnnnnnnnnnnnnnnnnnnnnnnnnnnnnnnnnnnnnnnnnnnnnnnnnnnnnnnnnnnnnnnnnnnnnnnnnnnnnnnnnnnnnnnnnnnnnnnnnnnnnnnnnnnnnnnnnnnnnnnnnnnnnnnnnnnnnnnnnnnnnnnnnnnnnnnnnnnnnnnnnnnnnnnnnnnnnnnnnnnnnnnnnnnnnnnnnnnnnnnnnnnnnnnnnnnnnnnnnnnnnnnnnnnnnnnnnnnnnnnnnnnnnnnnnnnnnnnnnnnnnnnnnnnnnnnnnnnnnnnnnnnnnnnnnnnnnnnnnnnnnnnnnnnnnnnnnnnnnnnnnnnnnnnnnnnnnnnnnnnnnnnnnnnnnnnnnnnnnnnnnnnnnnnnnnnnnnnnnnnnnnnnnnnnnnnnnnnnnnnnnnnnnnnnnnnnnnnnnnnnnnnnnnnnnnnnnnnnnnnnnnnnnnnnnnnnnnnnnnnnnnnnnnnnnnnnnnnnnnnnnnnnnnnnnnnnnnnnnnnnnnnnnnnnnnnnnnnnnnnnnnnnnnnnnnnnnnnnnnnnnnnnnnnnnnnnnnnnnnnnnnnnnnnnnnnnnnnnnnnnnnnnnnnnnnnnnnnnnnnnnnnnnnnnnnnnnnnnnnnnnnnnnnnnnnnnnnnnnnnnnnnnnnnnnnnnnnnnnnnnnnnnnnnnnnnnnnnnnnnnnnnnnnnnnnnnnnnnnnnnnnnnnnnnnnnnnnnnnnnnnnnnnnnnnnnnnnnnnnnnnnnnnnnnnnnnnnnnnnnnnnnnnnnnnnnnnnnnnnnnnnnnnnnnnnnnnnnnnnnnnnnnnnnnnnnnnnnnnnnnnnnnnnnnnnnnnnnnnnnnnnnnnnnnnnnnnnnnnnnnnnnnnnnnnnnnnnnnnnnnnnnnnnnnnnnnnnnnnnnnnnnnnnnnnnnnnnnnnnnnnnnnnnnnnnnnnnnnnnnnnnnnnnnnnnnnnnnnnnnnnnnnnnnnnnnnnnnnnnnnnnnnnnnnnnnnnnnnnnnnnnnnnnnnnnnnnnnnnnnnnnnnnnnnnnnnnnnnnnnnnnnnnnnnnnnnnnnnnnnnnnnnnnnnnnnnnnnnnnnnnnnnnnnnnnnnnnnnnnnnnnnnnnnnnnnnnnnnnnnnnnnnnnnnnnnnnnnnnnnnnnnnnnnnnnnnnnnnnnnnnnnnnnnnnnnnnnnnnnnnnnnnnnnnnnnnnnnnnnnnnnnnnnnnnnnnnnnnnnnnnnnnnnnnnnnnnnnnnnnnnnnnnnnnnnnnnnnnnnnnnnnnnnnnnnnnnnnnnnnnnnnnnnnnnnnnnnnnnnnnnnnnnnnnnnnnnnnnnnnnnnnnnnnnnnnnnnnnnnnnnnnnnnnnnnnnnnnnnnnnnnnnnnnnnnnnnnnnnnnnnnnnnnnnnnnnnnnnnnnnnnnnnnnnnnnnnnnnnnnnnnnnnnnnnnnnnnnnnnnnnnnnnnnnnnnnnnnnnnnnnnnnnnnnnnnnnnnnnnnnnnnnnnnnnnnnnnnnnnnnnnnnnnnnnnnnnnnnnnnnnnnnnnnnnnnnnnnnnnnnnnnnnnnnnnnnnnnnnnnnnnnnnnnnnnnnnnnnnnnnnnnnnnnnnnnnnnnnnnnnnnnnnnnnnnnnnnnnnnnnnnnnnnnnnnnnnnnnnnnnnnnnnnnnnnnnnnnnnnnnnnnnnnnnnnnnnnnnnnnnnnnnnnnnnnnnnnnnnnnnnnnnnnnnnnnnnnnnnnnnnnnnnnnnnnnnnnnnnnnnnnnnnnnnnnnnnnnnnnnnnnnnnnnnnnnnnnnnnnnnnnnnnnnnnnnnnnnnnnnnnnnnnnnnnnnnnnnnnnnnnnnnnnnnnnnnnnnnnnnnnnnnnnnnnnnnnnnnnnnnnnnnnnnnnnnnnnnnnnnnnnnnnnnnnnnnnnnnnnnnnnnnnnnnnnnnnnnnnnnnnnnnnnnnnnnnnnnnnnnnnnnnnnnnnnnnnnnnnnnnnnnnnnnnnnnnnnnnnnnnnnnnnnnnnnnnnnnnnnnnnnnnnnnnnnnnnnnnnnnnnnnnnnnnnnnnnnnnnnnnnnnnnnnnnnnnnnnnnnnnnnnnnnnnnnnnnnnnnnnnnnnnnnnnnnnnnnnnnnnnnnnnnnnnnnnnnnnnnnnnnnnnnnnnnnnnnnnnnnnnnnnnnnnnnnnnnnnnnnnnnnnnnnnnnnnnnnnnnnnnnnnnnnnnnnnnnnnnnnnnnnnnnnnnnnnnnnnnnnnnnnnnnnnnnnnnnnnnnnnnnnnnnnnnnnnnnnnnnnnnnnnnnnnnnnnnnnnnnnnnnnnnnnnnnnnnnnnnnnnnnnnnnnnnnnnnnnnnnnnnnnnnnnnnnnnnnnnnnnnnnnnnnnnnnnnnnnnnnnnnnnnnnnnnnnnnnnnnnnnnnnnnnnnnnnnnnnnnnnnnnnnnnnnnnnnnnnnnnnnnnnnnnnnnnnnnnnnnnnnnnnnnnnnnnnnnnnnnnnnnnnnnnnnnnnnnnnnnnnnnnnnnnnnnnnnnnnnnnnnnnnnnnnnnnnnnnnnnnnnnnnnnnnnnnnnnnnnnnnnnnnnnnnnnnnnnnnnnnnnnnnnnnnnnnnnnnnnnnnnnnnnnnnnnnnnnnnnnnnnnnnnnnnnnnnnnnnnnnnnnnnnnnnnnnnnnnnnnnnnnnnnnnnnnnnnnnnnnnnnnnnnnnnnnnnnnnnnnnnnnnnnnnnnnnnnnnnnnnnnnnnnnnnnnnnnnnnnnnnnnnnnnnnnnnnnnnnnnnnnnnnnnnnnnnnnnnnnnnnnnnnnnnnnnnnnnnnnnnnnnnnnnnnnnnnnnnnnnnnnnnnnnnnnnnnnnnnnnnnnnnnnnnnnnnnnnnnnnnnnnnnnnnnnnnnnnnnnnnnnnnnnnnnnnnnnnnnnnnnnnnnnnnnnnnnnnnnnnnnnnnnnnnnnnnnnnnnnnnnnnnnnnnnnnnnnnnnnnnnnnnnnnnnnnnnnnnnnnnnnnnnnnnnnnnnnnnnnnnnnnnnnnnnnnnnnnnnnnnnnnnnnnnnnnnnnnnnnnnnnnnnnnnnnnnnnnnnnnnnnnnnnnnnnnnnnnnnnnnnnnnnnnnnnnnnnnnnnnnnnnnnnnnnnnnnnnnnnnnnnnnnnnnnnnnnnnnnnnnnnnnnnnnnnnnnnnnnnnnnnnnnnnnnnnnnnnnnnnnnnnnnnnnnnnnnnnnnnnnnnnnnnnnnnnnnnnnnnnnnnnnnnnnnnnnnnnnnnnnnnnnnnnnnnnnnnnnnnnnnnnnnnnnnnnnnnnnnnnnnnnnnnnnnnnnnnnnnnnnnnnnnnnnnnnnnnnnnnnnnnnnnnnnnnnnnnnnnnnnnnnnnnnnnnnnnnnnnnnnnnnnnnnnnnnnnnnnnnnnnnnnnnnnnnnnnnnnnnnnnnnnnnnnnnnnnnnnnnnnnnnnnnnnnnnnnnnnnnnnnnnnnnnnnnnnnnnnnnnnnnnnnnnnnnnnnnnnnnnnnnnnnnnnnnnnnnnnnnnnnnnnnnnnnnnnnnnnnnnnnnnnnnnnnnnnnnnnnnnnnnnnnnnnnnnnnnnnnnnnnnnnnnnnnnnnnnnnnnnnnnnnnnnnnnnnnnnnnnnnnnnnnnnnnnnnnnnnnnnnnnnnnnnnnnnnnnnnnnnnnnnnnnnnnnnnnnnnnnnnnnnnnnnnnnnnnnnnnnnnnnnnnnnnnnnnnnnnnnnnnnnnnnnnnnnnnnnnnnnnnnnnnnnnnnnnnnnnnnnnnnnnnnnnnnnnnnnnnnnnnnnnnnnnnnnnnnnnnnnnnnnnnnnnnnnnnnnnnnnnnnnnnnnnnnnnnnnnnnnnnnnnnnnnnnnnnnnnnnnnnnnnnnnnnnnnnnnnnnnnnnnnnnnnnnnnnnnnnnnnnnnnnnnnnnnnnnnnnnnnnnnnnnnnnnnnnnnnnnnnnnnnnnnnnnnnnnnnnnnnnnnnnnnnnnnnnnnnnnnnnnnnnnnnnnnnnnnnnnnnnnnnnnnnnnnnnnnnnnnnnnnnnnnnnnnnnnnnnnnnnnnnnnnnnnnnnnnnnnnnnnnnnnnnnnnnnnnnnnnnnnnnnnnnnnnnnnnnnnnnnnnnnnnnnnnnnnnnnnnnnnnnnnnnnnnnnnnnnnnnnnnnnnnnnnnnnnnnnnnnnnnnnnnnnnnnnnnnnnnnnnnnnnnnnnnnnnnnnnnnnnnnnnnnnnnnnnnnnnnnnnnnnnnnnnnnnnnnnnnnnnnnnnnnnnnnnnnnnnnnnnnnnnnnnnnnnnnnnnnnnnnnnnnnnnnnnnnnnnnnnnnnnnnnnnnnnnnnnnnnnnnnnnnnnnnnnnnnnnnnnnnnnnnnnnnnnnnnnnnnnnnnnnnnnnnnnnnnnnnnnnnnnnnnnnnnnnnnnnnnnnnnnnnnnnnnnnnnnnnnnnnnnnnnnnnnnnnnnnnnnnnnnnnnnnnnnnnnnnnnnnnnnnnnnnnnnnnnnnnnnnnnnnnnnnnnnnnnnnnnnnnnnnnnnnnnnnnnnnnnnnnnnnnnnnnnnnnnnnnnnnnnnnnnnnnnnnnnnnnnnnnnnnnnnnnnnnnnnnnnnnnnnnnnnnnnnnnnnnnnnnnnnnnnnnnnnnnnnnnnnnnnnnnnnnnnnnnnnnnnnnnnnnnnnnnnnnnnnnnnnnnnnnnnnnnnnnnnnnnnnnnnnnnnnnnnnnnnnnnnnnnnnnnnnnnnnnnnnnnnnnnnnnnnnnnnnnnnnnnnnnnnnnnnnnnnnnnnnnnnnnnnnnnnnnnnnnnnnnnnnnnnnnnnnnnnnnnnnnnnnnnnnnnnnnnnnnnnnnnnnnnnnnnnnnnnnnnnnnnnnnnnnnnnnnnnnnnnnnnnnnnnnnnnnnnnnnnnnnnnnnnnnnnnnnnnnnnnnnnnnnnnnnnnnnnnnnnnnnnnnnnnnnnnnnnnnnnnnnnnnnnnnnnnnnnnnnnnnnnnnnnnnnnnnnnnnnnnnnnnnnnnnnnnnnnnnnnnnnnnnnnnnnnnnnnnnnnnnnnnnnnnnnnnnnnnnnnnnnnnnnnnnnnnnnnnnnnnnnnnnnnnnnnnnnnnnnnnnnnnnnnnnnnnnnnnnnnnnnnnnnnnnnnnnnnnnnnnnnnnnnnnnnnnnnnnnnnnnnnnnnnnnnnnnnnnnnnnnnnnnnnnnnnnnnnnnnnnnnnnnnnnnnnnnnnnnnnnnnnnnnnnnnnnnnnnnnnnnnnnnnnnnnnnnnnnnnnnnnnnnnnnnnnnnnnnnnnnnnnnnnnnnnnnnnnnnnnnnnnnnnnnnnnnnnnnnnnnnnnnnnnnnnnnnnnnnnnnnnnnnnnnnnnnnnnnnnnnnnnnnnnnnnnnnnnnnnnnnnnnnnnnnnnnnnnnnnnnnnnnnnnnnnnnnnnnnnnnnnnnnnnnnnnnnnnnnnnnnnnnnnnnnnnnnnnnnnnnnnnnnnnnnnnnnnnnnnnnnnnnnnnnnnnnnnnnnnnnnnnnnnnnnnnnnnnnnnnnnnnnnnnnnnnnnnnnnnnnnnnnnnnnnnnnnnnnnnnnnnnnnnnnnnnnnnnnnnnnnnnnnnnnnnnnnnnnnnnnnnnnnnnnnnnnnnnnnnnnnnnnnnnnnnnnnnnnnnnnnnnnnnnnnnnnnnnnnnnnnnnnnnnnnnnnnnnnnnnnnnnnnnnnnnnnnnnnnnnnnnnnnnnnnnnnnnnnnnnnnnnnnnnnnnnnnnnnnnnnnnnnnnnnnnnnnnnnnnnnnnnnnnnnnnnnnnnnnnnnnnnnnnnnnnnnnnnnnnnnnnnnnnnnnnnnnnnnnnnnnnnnnnnnnnnnnnnnnnnnnnnnnnnnnnnnnnnnnnnnnnnnnnnnnnnnnnnnnnnnnnnnnnnnnnnnnnnnnnnnnnnnnnnnnnnnnnnnnnnnnnnnnnnnnnnnnnnnnnnnnnnnnnnnnnnnnnnnnnnnnnnnnnnnnnnnnnnnnnnnnnnnnnnnnnnnnnnnnnnnnnnnnnnnnnnnnnnnnnnnnnnnnnnnnnnnnnnnnnnnnnnnnnnnnnnnnnnnnnnnnnnnnnnnnnnnnnnnnnnnnnnnnnnnnnnnnnnnnnnnnnnnnnnnnnnnnnnnnnnnnnnnnnnnnnnnnnnnnnnnnnnnnnnnnnnnnnnnnnnnnnnnnnnnnnnnnnnnnnnnnnnnnnnnnnnnnnnnnnnnnnnnnnnnnnnnnnnnnnnnnnnnnnnnnnnnnnnnnnnnnnnnnnnnnnnnnnnnnnnnnnnnnnnnnnnnnnnnnnnnnnnnnnnnnnnnnnnnnnnnnnnnnnnnnnnnnnnnnnnnnnnnnnnnnnnnnnnnnnnnnnnnnnnnnnnnnnnnnnnnnnnnnnnnnnnnnnnnnnnnnnnnnnnnnnnnnnnnnnnnnnnnnnnnnnnnnnnnnnnnnnnnnnnnnnnnnnnnnnnnnnnnnnnnnnnnnnnnnnnnnnnnnnnnnnnnnnnnnnnnnnnnnnnnnnnnnnnnnnnnnnnnnnnnnnnnnnnnnnnnnnnnnnnnnnnnnnnnnnnnnnnnnnnnnnnnnnnnnnnnnnnnnnnnnnnnnnnnnnnnnnnnnnnnnnnnnnnnnnnnnnnnnnnnnnnnnnnnnnnnnnnnnnnnnnnnnnnnnnnnnnnnnnnnnnnnnnnnnnnnnnnnnnnnnnnnnnnnnnnnnnnnnnnnnnnnnnnnnnnnnnnnnnnnnnnnnnnnnnnnnnnnnnnnnnnnnnnnnnnnnnnnnnnnnnnnnnnnnnnnnnnnnnnnnnnnnnnnnnnnnnnnnnnnnnnnnnnnnnnnnnnnnnnnnnnnnnnnnnnnnnnnnnnnnnnnnnnnnnnnnnnnnnnnnnnnnnnnnnnnnnnnnnnnnnnnnnnnnnnnnnnnnnnnnnnnnnnnnnnnnnnnnnnnnnnnnnnnnnnnnnnnnnnnnnnnnnnnnnnnnnnnnnnnnnnnnnnnnnnnnnnnnnnnnnnnnnnnnnnnnnnnnnnnnnnnnnnnnnnnnnnnnnnnnnnnnnnnnnnnnnnnnnnnnnnnnnnnnnnnnnnnnnnnnnnnnnnnnnnnnnnnnnnnnnnnnnnnnnnnnnnnnnnnnnnnnnnnnnnnnnnnnnnnnnnnnnnnnnnnnnnnnnnnnnnnnnnnnnnnnnnnnnnnnnnnnnnnnnnnnnnnnnnnnnnnnnnnnnnnnnnnnnnnnnnnnnnnnnnnnnnnnnnnnnnnnnnnnnnnnnnnnnnnnnnnnnnnnnnnnnnnnnnnnnnnnnnnnnnnnnnnnnnnnnnnnnnnnnnnnnnnnnnnnnnnnnnnnnnnnnnnnnnnnnnnnnnnnnnnnnnnnnnnnnnnnnnnnnnnnnnnnnnnnnnnnnnnnnnnnnnnnnnnnnnnnnnnnnnnnnnnnnnnnnnnnnnnnnnnnnnnnnnnnnnnnnnnnnnnnnnnnnnnnnnnnnnnnnnnnnnnnnnnnnnnnnnnnnnnnnnnnnnnnnnnnnnnnnnnnnnnnnnnnnnnnnnnnnnnnnnnnnnnnnnnnnnnnnnnnnnnnnnnnnnnnnnnnnnnnnnnnnnnnnnnnnnnnnnnnnnnnnnnnnnnnnnnnnnnnnnnnnnnnnnnnnnnnnnnnnnnnnnnnnnnnnnnnnnnnnnnnnnnnnnnnnnnnnnnnnnnnnnnnnnnnnnnnnnnnnnnnnnnnnnnnnnnnnnnnnnnnnnnnnnnnnnnnnnnnnnnnnnnnnnnnnnnnnnnnnnnnnnnnnnnnnnnnnnnnnnnnnnnnnnnnnnnnnnnnnnnnnnnnnnnnnnnnnnnnnnnnnnnnnnnnnnnnnnnnnnnnnnnnnnnnnnnnnnnnnnnnnnnnnnnnnnnnnnnnnnnnnnnnnnnnnnnnnnnnnnnnnnnnnnnnnnnnnnnnnnnnnnnnnnnnnnnnnnnnnnnnnnnnnnnnnnnnnnnnnnnnnnnnnnnnnnnnnnnnnnnnnnnnnnnnnnnnnnnnnnnnnnnnnnnnnnnnnnnnnnnnnnnnnnnnnnnnnnnnnnnnnnnnnnnnnnnnnnnnnnnnnnnnnnnnnnnnnnnnnnnnnnnnnnnnnnnnnnnnnnnnnnnnnnnnnnnnnnnnnnnnnnnnnnnnnnnnnnnnnnnnnnnnnnnnnnnnnnnnnnnnnnnnnnnnnnnnnnnnnnnnnnnnnnnnnnnnnnnnnnnnnnnnnnnnnnnnnnnnnnnnnnnnnnnnnnnnnnnnnnnnnnnnnnnnnnnnnnnnnnnnnnnnnnnnnnnnnnnnnnnnnnnnnnnnnnnnnnnnnnnnnnnnnnnnnnnnnnnnnnnnnnnnnnnnnnnnnnnnnnnnnnnnnnnnnnnnnnnnnnnnnnnnnnnnnnnnnnnnnnnnnnnnnnnnnnnnnnnnnnnnnnnnnnnnnnnnnnnnnnnnnnnnnnnnnnnnnnnnnnnnnnnnnnnnnnnnnnnnnnnnnnnnnnnnnnnnnnnnnnnnnnnnnnnnnnnnnnnnnnnnnnnnnnnnnnnnnnnnnnnnnnnnnnnnnnnnnnnnnnnnnnnnnnnnnnnnnnnnnnnnnnnnnnnnnnnnnnnnnnnnnnnnnnnnnnnnnnnnnnnnnnnnnnnnnnnnnnnnnnnnnnnnnnnnnnnnnnnnnnnnnnnnnnnnnnnnnnnnnnnnnnnnnnnnnnnnnnnnnnnnnnnnnnnnnnnnnnnnnnnnnnnnnnnnnnnnnnnnnnnnnnnnnnnnnnnnnnnnnnnnnnnnnnnnnnnnnnnnnnnnnnnnnnnnnnnnnnnnnnnnnnnnnnnnnnnnnnnnnnnnnnnnnnnnnnnnnnnnnnnnnnnnnnnnnnnnnnnnnnnnnnnnnnnnnnnnnnnnnnnnnnnnnnnnnnnnnnnnnnnnnnnnnnnnnnnnnnnnnnnnnnnnnnnnnnnnnnnnnnnnnnnnnnnnnnnnnnnnnnnnnnnnnnnnnnnnnnnnnnnnnnnnnnnnnnnnnnnnnnnnnnnnnnnnnnnnnnnnnnnnnnnnnnnnnnnnnnnnnnnnnnnnnnnnnnnnnnnnnnnnnnnnnnnnnnnnnnnnnnnnnnnnnnnnnnnnnnnnnnnnnnnnnnnnnnnnnnnnnnnnnnnnnnnnnnnnnnnnnnnnnnnnnnnnnnnnnnnnnnnnnnnnnnnnnnnnnnnnnnnnnnnnnnnnnnnnnnnnnnnnnnnnnnnnnnnnnnnnnnnnnnnnnnnnnnnnnnnnnnnnnnnnnnnnnnnnnnnnnnnnnnnnnnnnnnnnnnnnnnnnnnnnnnnnnnnnnnnnnnnnnnnnnnnnnnnnnnnnnnnnnnnnnnnnnnnnnnnnnnnnnnnnnnnnnnnnnnnnnnnnnnnnnnnnnnnnnnnnnnnnnnnnnnnnnnnnnnnnnnnnnnnnnnnnnnnnnnnnnnnnnnnnnnnnnnnnnnnnnnnnnnnnnnnnnnnnnnnnnnnnnnnnnnnnnnnnnnnnnnnnnnnnnnnnnnnnnnnnnnnnnnnnnnnnnnnnnnnnnnnnnnnnnnnnnnnnnnnnnnnnnnnnnnnnnnnnnnnnnnnnnnnnnnnnnnnnnnnnnnnnnnnnnnnnnnnnnnnnnnnnnnnnnnnnnnnnnnnnnnnnnnnnnnnnnnnnnnnnnnnnnnnnnnnnnnnnnnnnnnnnnnnnnnnnnnnnnnnnnnnnnnnnnnnnnnnnnnnnnnnnnnnnnnnnnnnnnnnnnnnnnnnnnnnnnnnnnnnnnnnnnnnnnnnnnnnnnnnnnnnnnnnnnnnnnnnnnnnnnnnnnnnnnnnnnnnnnnnnnnnnnnnnnnnnnnnnnnnnnnnnnnnnnnnnnnnnnnnnnnnnnnnnnnnnnnnnnnnnnnnnnnnnnnnnnnnnnnnnnnnnnnnnnnnnnnnnnnnnnnnnnnnnnnnnnnnnnnnnnnnnnnnnnnnnnnnnnnnnnnnnnnnnnnnnnnnnnnnnnnnnnnnnnnnnnnnnnnnnnnnnnnnnnnnnnnnnnnnnnnnnnnnnnnnnnnnnnnnnnnnnnnnnnnnnnnnnnnnnnnnnnnnnnnnnnnnnnnnnnnnnnnnnnnnnnnnnnnnnnnnnnnnnnnnnnnnnnnnnnnnnnnnnnnnnnnnnnnnnnnnnnnnnnnnnnnnnnnnnnnnnnnnnnnnnnnnnnnnnnnnnnnnnnnnnnnnnnnnnnnnnnnnnnnnnnnnnnnnnnnnnnnnnnnnnnnnnnnnnnnnnnnnnnnnnnnnnnnnnnnnnnnnnnnnnnnnnnnnnnnnnnnnnnnnnnnnnnnnnnnnnnnnnnnnnnnnnnnnnnnnnnnnnnnnnnnnnnnnnnnnnnnnnnnnnnnnnnnnnnnnnnnnnnnnnnnnnnnnnnnnnnnnnnnnnnnnnnnnnnnnnnnnnnnnnnnnnnnnnnnnnnnnnnnnnnnnnnnnnnnnnnnnnnnnnnnnnnnnnnnnnnnnnnnnnnnnnnnnnnnnnnnnnnnnnnnnnnnnnnnnnnnnnnnnnnnnnnnnnnnnnnnnnnnnnnnnnnnnnnnnnnnnnnnnnnnnnnnnnnnnnnnnnnnnnnnnnnnnnnnnnnnnnnnnnnnnnnnnnnnnnnnnnnnnnnnnnnnnnnnnnnnnnnnnnnnnnnnnnnnnnnnnnnnnnnnnnnnnnnnnnnnnnnnnnnnnnnnnnnnnnnnnnnnnnnnnnnnnnnnnnnnnnnnnnnnnnnnnnnnnnnnnnnnnnnnnnnnnnnnnnnnnnnnnnnnnnnnnnnnnnnnnnnnnnnnnnnnnnnnnnnnnnnnnnnnnnnnnnnnnnnnnnnnnnnnnnnnnnnnnnnnnnnnnnnnnnnnnnnnnnnnnnnnnnnnnnnnnnnnnnnnnnnnnnnnnnnnnnnnnnnnnnnnnnnnnnnnnnnnnnnnnnnnnnnnnnnnnnnnnnnnnnnnnnnnnnnnnnnnnnnnnnnnnnnnnnnnnnnnnnnnnnnnnnnnnnnnnnnnnnnnnnnnnnnnnnnnnnnnnnnnnnnnnnnnnnnnnnnnnnnnnnnnnnnnnnnnnnnnnnnnnnnnnnnnnnnnnnnnnnnnnnnnnnnnnnnnnnnnnnnnnnnnnnnnnnnnnnnnnnnnnnnnnnnnnnnnnnnnnnnnnnnnnnnnnnnnnnnnnnnnnnnnnnnnnnnnnnnnnnnnnnnnnnnnnnnnnnnnnnnnnnnnnnnnnnnnnnnnnnnnnnnnnnnnnnnnnnnnnnnnnnnnnnnnnnnnnnnnnnnnnnnnnnnnnnnnnnnnnnnnnnnnnnnnnnnnnnnnnnnnnnnnnnnnnnnnnnnnnnnnnnnnnnnnnnnnnnnnnnnnnnnnnnnnnnnnnnnnnnnnnnnnnnnnnnnnnnnnnnnnnnnnnnnnnnnnnnnnnnnnnnnnnnnnnnnnnnnnnnnnnnnnnnnnnnnnnnnnnnnnnnnnnnnnnnnnnnnnnnnnnnnnnnnnnnnnnnnnnnnnnnnnnnnnnnnnnnnnnnnnnnnnnnnnnnnnnnnnnnnnnnnnnnnnnnnnnnnnnnnnnnnnnnnnnnnnnnnnnnnnnnnnnnnnnnnnnnnnnnnnnnnnnnnnnnnnnnnnnnnnnnnnnnnnnnnnnnnnnnnnnnnnnnnnnnnnnnnnnnnnnnnnnnnnnnnnnnnnnnnnnnnnnnnnnnnnnnnnnnnnnnnnnnnnnnnnnnnnnnnnnnnnnnnnnnnnnnnnnnnnnnnnnnnnnnnnnnnnnnnnnnnnnnnnnnnnnnnnnnnnnnnnnnnnnnnnnnnnnnnnnnnnnnnnnnnnnnnnnnnnnnnnnnnnnnnnnnnnnnnnnnnnnnnnnnnnnnnnnnnnnnnnnnnnnnnnnnnnnnnnnnnnnnnnnnnnnnnnnnnnnnnnnnnnnnnnnnnnnnnnnnnnnnnnnnnnnnnnnnnnnnnnnnnnnnnnnnnnnnnnnnnnnnnnnnnnnnnnnnnnnnnnnnnnnnnnnnnnnnnnnnnnnnnnnnnnnnnnnnnnnnnnnnnnnnnnnnnnnnnnnnnnnnnnnnnnnnnnnnnnnnnnnnnnnnnnnnnnnnnnnnnnnnnnnnnnnnnnnnnnnnnnnnnnnnnnnnnnnnnnnnnnnnnnnnnnnnnnnnnnnnnnnnnnnnnnnnnnnnnnnnnnnnnnnnnnnnnnnnnnnnnnnnnnnnnnnnnnnnnnnnnnnnnnnnnnnnnnnnnnnnnnnnnnnnnnnnnnnnnnnnnnnnnnnnnnnnnnnnnnnnnnnnnnnnnnnnnnnnnnnnnnnnnnnnnnnnnnnnnnnnnnnnnnnnnnnnnnnnnnnnnnnnnnnnnnnnnnnnnnnnnnnnnnnnnnnnnnnnnnnnnnnnnnnnnnnnnnnnnnnnnnnnnnnnnnnnnnnnnnnnnnnnnnnnnnnnnnnnnnnnnnnnnnnnnnnnnnnnnnnnnnnnnnnnnnnnnnnnnnnnnnnnnnnnnnnnnnnnnnnnnnnnnnnnnnnnnnnnnnnnnnnnnnnnnnnnnnnnnnnnnnnnnnnnnnnnnnnnnnnnnnnnnnnnnnnnnnnnnnnnnnnnnnnnnnnnnnnnnnnnnnnnnnnnnnnnnnnnnnnnnnnnnnnnnnnnnnnnnnnnnnnnnnnnnnnnnnnnnnnnnnnnnnnnnnnnnnnnnnnnnnnnnnnnnnnnnnnnnnnnnnnnnnnnnnnnnnnnnnnnnnnnnnnnnnnnnnnnnnnnnnnnnnnnnnnnnnnnnnnnnnnnnnnnnnnnnnnnnnnnnnnnnnnnnnnnnnnnnnnnnnnnnnnnnnnnnnnnnnnnnnnnnnnnnnnnnnnnnnnnnnnnnnnnnnnnnnnnnnnnnnnnnnnnnnnnnnnnnnnnnnnnnnnnnnnnnnnnnnnnnnnnnnnnnnnnnnnnnnnnnnnnnnnnnnnnnnnnnnnnnnnnnnnnnnnnnnnnnnnnnnnnnnnnnnnnnnnnnnnnnnnnnnnnnnnnnnnnnnnnnnnnnnnnnnnnnnnnnnnnnnnnnnnnnnnnnnnnnnnnnnnnnnnnnnnnnnnnnnnnnnnnnnnnnnnnnnnnnnnnnnnnnnnnnnnnnnnnnnnnnnnnnnnnnnnnnnnnnnnnnnnnnnnnnnnnnnnnnnnnnnnnnnnnnnnnnnnnnnnnnnnnnnnnnnnnnnnnnnnnnnnnnnnnnnnnnnnnnnnnnnnnnnnnnnnnnnnnnnnnnnnnnnnnnnnnnnnnnnnnnnnnnnnnnnnnnnnnnnnnnnnnnnnnnnnnnnnnnnnnnnnnnnnnnnnnnnnnnnnnnnnnnnnnnnnnnnnnnnnnnnnnnnnnnnnnnnnnnnnnnnnnnnnnnnnnnnnnnnnnnnnnnnnnnnnnnnnnnnnnnnnnnnnnnnnnnnnnnnnnnnnnnnnnnnnnnnnnnnnnnnnnnnnnnnnnnnnnnnnnnnnnnnnnnnnnnnnnnnnnnnnnnnnnnnnnnnnnnnnnnnnnnnnnnnnnnnnnnnnnnnnnnnnnnnnnnnnnnnnnnnnnnnnnnnnnnnnnnnnnnnnnnnnnnnnnnnnnnnnnnnnnnnnnnnnnnnnnnnnnnnnnnnnnnnnnnnnnnnnnnnnnnnnnnnnnnnnnnnnnnnnnnnnnnnnnnnnnnnnnnnnnnnnnnnnnnnnnnnnnnnnnnnnnnnnnnnnnnnnnnnnnnnnnnnnnnnnnnnnnnnnnnnnnnnnnnnnnnnnnnnnnnnnnnnnnnnnnnnnnnnnnnnnnnnnnnnnnnnnnnnnnnnnnnnnnnnnnnnnnnnnnnnnnnnnnnnnnnnnnnnnnnnnnnnnnnnnnnnnnnnnnnnnnnnnnnnnnnnnnnnnnnnnnnnnnnnnnnnnnnnnnnnnnnnnnnnnnnnnnnnnnnnnnnnnnnnnnnnnnnnnnnnnnnnnnnnnnnnnnnnnnnnnnnnnnnnnnnnnnnnnnnnnnnnnnnnnnnnnnnnnnnnnnnnnnnnnnnnnnnnnnnnnnnnnnnnnnnnnnnnnnnnnnnnnnnnnnnnnnnnnnnnnnnnnnnnnnnnnnnnnnnnnnnnnnnnnnnnnnnnnnnnnnnnnnnnnnnnnnnnnnnnnnnnnnnnnnnnnnnnnnnnnnnnnnnnnnnnnnnnnnnnnnnnnnnnnnnnnnnnnnnnnnnnnnnnnnnnnnnnnnnnnnnnnnnnnnnnnnnnnnnnnnnnnnnnnnnnnnnnnnnnnnnnnnnnnnnnnnnnnnnnnnnnnnnnnnnnnnnnnnnnnnnnnnnnnnnnnnnnnnnnnnnnnnnnnnnnnnnnnnnnnnnnnnnnnnnnnnnnnnnnnnnnnnnnnnnnnnnnnnnnnnnnnnnnnnnnnnnnnnnnnnnnnnnnnnnnnnnnnnnnnnnnnnnnnnnnnnnnnnnnnnnnnnnnnnnnnnnnnnnnnnnnnnnnnnnnnnnnnnnnnnnnnnnnnnnnnnnnnnnnnnnnnnnnnnnnnnnnnnnnnnnnnnnnnnnnnnnnnnnnnnnnnnnnnnnnnnnnnnnnnnnnnnnnnnnnnnnnnnnnnnnnnnnnnnnnnnnnnnnnnnnnnnnnnnnnnnnnnnnnnnnnnnnnnnnnnnnnnnnnnnnnnnnnnnnnnnnnnnnnnnnnnnnnnnnnnnnnnnnnnnnnnnnnnnnnnnnnnnnnnnnnnnnnnnnnnnnnnnnnnnnnnnnnnnnnnnnnnnnnnnnnnnnnnnnnnnnnnnnnnnnnnnnnnnnnnnnnnnnnnnnnnnnnnnnnnnnnnnnnnnnnnnnnnnnnnnnnnnnnnnnnnnnnnnnnnnnnnnnnnnnnnnnnnnnnnnnnnnnnnnnnnnnnnnnnnnnnnnnnnnnnnnnnnnnnnnnnnnnnnnnnnnnnnnnnnnnnnnnnnnnnnnnnnnnnnnnnnnnnnnnnnnnnnnnnnnnnnnnnnnnnnnnnnnnnnnnnnnnnnnnnnnnnnnnnnnnnnnnnnnnnnnnnnnnnnnnnnnnnnnnnnnnnnnnnnnnnnnnnnnnnnnnnnnnnnnnnnnnnnnnnnnnnnnnnnnnnnnnnnnnnnnnnnnnnnnnnnnnnnnnnnnnnnnnnnnnnnnnnnnnnnnnnnnnnnnnnnnnnnnnnnnnnnnnnnnnnnnnnnnnnnnnnnnnnnnnnnnnnnnnnnnnnnnnnnnnnnnnnnnnnnnnnnnnnnnnnnnnnnnnnnnnnnnnnnnnnnnnnnnnnnnnnnnnnnnnnnnnnnnnnnnnnnnnnnnnnnnnnnnnnnnnnnnnnnnnnnnnnnnnnnnnnnnnnnnnnnnnnnnnnnnnnnnnnnnnnnnnnnnnnnnnnnnnnnnnnnnnnnnnnnnnnnnnnnnnnnnnnnnnnnnnnnnnnnnnnnnnnnnnnnnnnnnnnnnnnnnnnnnnnnnnnnnnnnnnnnnnnnnnnnnnnnnnnnnnnnnnnnnnnnnnnnnnnnnnnnnnnnnnnnnnnnnnnnnnnnnnnnnnnnnnnnnnnnnnnnnnnnnnnnnnnnnnnnnnnnnnnnnnnnnnnnnnnnnnnnnnnnnnnnnnnnnnnnnnnnnnnnnnnnnnnnnnnnnnnnnnnnnnnnnnnnnnnnnnnnnnnnnnnnnnnnnnnnnnnnnnnnnnnnnnnnnnnnnnnnnnnnnnnnnnnnnnnnnnnnnnnnnnnnnnnnnnnnnnnnnnnnnnnnnnnnnnnnnnnnnnnnnnnnnnnnnnnnnnnnnnnnnnnnnnnnnnnnnnnnnnnnnnnnnnnnnnnnnnnnnnnnnnnnnnnnnnnnnnnnnnnnnnnnnnnnnnnnnnnnnnnnnnnnnnnnnnnnnnnnnnnnnnnnnnnnnnnnnnnnnnnnnnnnnnnnnnnnnnnnnnnnnnnnnnnnnnnnnnnnnnnnnnnnnnnnnnnnnnnnnnnnnnnnnnnnnnnnnnnnnnnnnnnnnnnnnnnnnnnnnnnnnnnnnnnnnnnnnnnnnnnnnnnnnnnnnnnnnnnnnnnnnnnnnnnnnnnnnnnnnnnnnnnnnnnnnnnnnnnnnnnnnnnnnnnnnnnnnnnnnnnnnnnnnnnnnnnnnnnnnnnnnnnnnnnnnnnnnnnnnnnnnnnnnnnnnnnnnnnnnnnnnnnnnnnnnnnnnnnnnnnnnnnnnnnnnnnnnnnnnnnnnnnnnnnnnnnnnnnnnnnnnnnnnnnnnnnnnnnnnnnnnnnnnnnnnnnnnnnnnnnnnnnnnnnnnnnnnnnnnnnnnnnnnnnnnnnnnnnnnnnnnnnnnnnnnnnnnnnnnnnnnnnnnnnnnnnnnnnnnnnnnnnnnnnnnnnnnnnnnnnnnnnnnnnnnnnnnnnnnnnnnnnnnnnnnnnnnnnnnnnnnnnnnnnnnnnnnnnnnnnnnnnnnnnnnnnnnnnnnnnnnnnnnnnnnnnnnnnnnnnnnnnnnnnnnnnnnnnnnnnnnnnnnnnnnnnnnnnnnnnnnnnnnnnnnnnnnnnnnnnnnnnnnnnnnnnnnnnnnnnnnnnnnnnnnnnnnnnnnnnnnnnnnnnnnnnnnnnnnnnnnnnnnnnnnnnnnnnnnnnnnnnnnnnnnnnnnnnnnnnnnnnnnnnnnnnnnnnnnnnnnnnnnnnnnnnnnnnnnnnnnnnnnnnnnnnnnnnnnnnnnnnnnnnnnnnnnnnnnnnnnnnnnnnnnnnnnnnnnnnnnnnnnnnnnnnnnnnnnnnnnnnnnnnnnnnnnnnnnnnnnnnnnnnnnnnnnnnnnnnnnnnnnnnnnnnnnnnnnnnnnnnnnnnnnnnnnnnnnnnnnnnnnnnnnnnnnnnnnnnnnnnnnnnnnnnnnnnnnnnnnnnnnnnnnnnnnnnnnnnnnnnnnnnnnnnnnnnnnnnnnnnnnnnnnnnnnnnnnnnnnnnnnnnnnnnnnnnnnnnnnnnnnnnnnnnnnnnnnnnnnnnnnnnnnnnnnnnnnnnnnnnnnnnnnnnnnnnnnnnnnnnnnnnnnnnnnnnnnnnnnnnnnnnnnnnnnnnnnnnnnnnnnnnnnnnnnnnnnnnnnnnnnnnnnnnnnnnnnnnnnnnnnnnnnnnnnnnnnnnnnnnnnnnnnnnnnnnnnnnnnnnnnnnnnnnnnnnnnnnnnnnnnnnnnnnnnnnnnnnnnnnnnnnnnnnnnnnnnnnnnnnnnnnnnnnnnnnnnnnnnnnnnnnnnnnnnnnnnnnnnnnnnnnnnnnnnnnnnnnnnnnnnnnnnnnnnnnnnnnnnnnnnnnnnnnnnnnnnnnnnnnnnnnnnnnnnnnnnnnnnnnnnnnnnnnnnnnnnnnnnnnnnnnnnnnnnnnnnnnnnnnnnnnnnnnnnnnnnnnnnnnnnnnnnnnnnnnnnnnnnnnnnnnnnnnnnnnnnnnnnnnnnnnnnnnnnnnnnnnnnnnnnnnnnnnnnnnnnnnnnnnnnnnnnnnnnnnnnnnnnnnnnnnnnnnnnnnnnnnnnnnnnnnnnnnnnnnnnnnnnnnnnnnnnnnnnnnnnnnnnnnnnnnnnnnnnnnnnnnnnnnnnnnnnnnnnnnnnnnnnnnnnnnnnnnnnnnnnnnnnnnnnnnnnnnnnnnnnnnnnnnnnnnnnnnnnnnnnnnnnnnnnnnnnnnnnnnnnnnnnnnnnnnnnnnnnnnnnnnnnnnnnnnnnnnnnnnnnnnnnnnnnnnnnnnnnnnnnnnnnnnnnnnnnnnnnnnnnnnnnnnnnnnnnnnnnnnnnnnnnnnnnnnnnnnnnnnnnnnnnnnnnnnnnnnnnnnnnnnnnnnnnnnnnnnnnnnnnnnnnnnnnnnnnnnnnnnnnnnnnnnnnnnnnnnnnnnnnnnnnnnnnnnnnnnnnnnnnnnnnnnnnnnnnnnnnnnnnnnnnnnnnnnnnnnnnnnnnnnnnnnnnnnnnnnnnnnnnnnnnnnnnnnnnnnnnnnnnnnnnnnnnnnnnnnnnnnnnnnnnnnnnnnnnnnnnnnnnnnnnnnnnnnnnnnnnnnnnnnnnnnnnnnnnnnnnnnnnnnnnnnnnnnnnnnnnnnnnnnnnnnnnnnnnnnnnnnnnnnnnnnnnnnnnnnnnnnnnnnnnnnnnnnnnnnnnnnnnnnnnnnnnnnnnnnnnnnnnnnnnnnnnnnnnnnnnnnnnnnnnnnnnnnnnnnnnnnnnnnnnnnnnnnnnnnnnnnnnnnnnnnnnnnnnnnnnnnnnnnnnnnnnnnnnnnnnnnnnnnnnnnnnnnnnnnnnnnnnnnnnnnnnnnnnnnnnnnnnnnnnnnnnnnnnnnnnnnnnnnnnnnnnnnnnnnnnnnnnnnnnnnnnnnnnnnnnnnnnnnnnnnnnnnnnnnnnnnnnnnnnnnnnnnnnnnnnnnnnnnnnnnnnnnnnnnnnnnnnnnnnnnnnnnnnnnnnnnnnnnnnnnnnnnnnnnnnnnnnnnnnnnnnnnnnnnnnnnnnnnnnnnnnnnnnnnnnnnnnnnnnnnnnnnnnnnnnnnnnnnnnnnnnnnnnnnnnnnnnnnnnnnnnnnnnnnnnnnnnnnnnnnnnnnnnnnnnnnnnnnnnnnnnnnnnnnnnnnnnnnnnnnnnnnnnnnnnnnnnnnnnnnnnnnnnnnnnnnnnnnnnnnnnnnnnnnnnnnnnnnnnnnnnnnnnnnnnnnnnnnnnnnnnnnnnnnnnnnnnnnnnnnnnnnnnnnnnnnnnnnnnnnnnnnnnnnnnnnnnnnnnnnnnnnnnnnnnnnnnnnnnnnnnnnnnnnnnnnnnnnnnnnnnnnnnnnnnnnnnnnnnnnnnnnnnnnnnnnnnnnnnnnnnnnnnnnnnnnnnnnnnnnnnnnnnnnnnnnnnnnnnnnnnnnnnnnnnnnnnnnnnnnnnnnnnnnnnnnnnnnnnnnnnnnnnnnnnnnnnnnnnnnnnnnnnnnnnnnnnnnnnnnnnnnnnnnnnnnnnnnnnnnnnnnnnnnnnnnnnnnnnnnnnnnnnnnnnnnnnnnnnnnnnnnnnnnnnnnnnnnnnnnnnnnnnnnnnnnnnnnnnnnnnnnnnnnnnnnnnnnnnnnnnnnnnnnnnnnnnnnnnnnnnnnnnnnnnnnnnnnnnnnnnnnnnnnnnnnnnnnnnnnnnnnnnnnnnnnnnnnnnnnnnnnnnnnnnnnnnnnnnnnnnnnnnnnnnnnnnnnnnnnnnnnnnnnnnnnnnnnnnnnnnnnnnnnnnnnnnnnnnnnnnnnnnnnnnnnnnnnnnnnnnnnnnnnnnnnnnnnnnnnnnnnnnnnnnnnnnnnnnnnnnnnnnnnnnnnnnnnnnnnnnnnnnnnnnnnnnnnnnnnnnnnnnnnnnnnnnnnnnnnnnnnnnnnnnnnnnnnnnnnnnnnnnnnnnnnnnnnnnnnnnnnnnnnnnnnnnnnnnnnnnnnnnnnnnnnnnnnnnnnnnnnnnnnnnnnnnnnnnnnnnnnnnnnnnnnnnnnnnnnnnnnnnnnnnnnnnnnnnnnnnnnnnnnnnnnnnnnnnnnnnnnnnnnnnnnnnnnnnnnnnnnnnnnnnnnnnnnnnnnnnnnnnnnnnnnnnnnnnnnnnnnnnnnnnnnnnnnnnnnnnnnnnnnnnnnnnnnnnnnnnnnnnnnnnnnnnnnnnnnnnnnnnnnnnnnnnnnnnnnnnnnnnnnnnnnnnnnnnnnnnnnnnnnnnnnnnnnnnnnnnnnnnnnnnnnnnnnnnnnnnnnnnnnnnnnnnnnnnnnnnnnnnnnnnnnnnnnnnnnnnnnnnnnnnnnnnnnnnnnnnnnnnnnnnnnnnnnnnnnnnnnnnnnnnnnnnnnnnnnnnnnnnnnnnnnnnnnnnnnnnnnnnnnnnnnnnnnnnnnnnnnnnnnnnnnnnnnnnnnnnnnnnnnnnnnnnnnnnnnnnnnnnnnnnnnnnnnnnnnnnnnnnnnnnnnnnnnnnnnnnnnnnnnnnnnnnnnnnnnnnnnnnnnnnnnnnnnnnnnnnnnnnnnnnnnnnnnnnnnnnnnnnnnnnnnnnnnnnnnnnnnnnnnnnnnnnnnnnnnnnnnnnnnnnnnnnnnnnnnnnnnnnnnnnnnnnnnnnnnnnnnnnnnnnnnnnnnnnnnnnnnnnnnnnnnnnnnnnnnnnnnnnnnnnnnnnnnnnnnnnnnnnnnnnnnnnnnnnnnnnnnnnnnnnnnnnnnnnnnnnnnnnnnnnnnnnnnnnnnnnnnnnnnnnnnnnnnnnnnnnnnnnnnnnnnnnnnnnnnnnnnnnnnnnnnnnnnnnnnnnnnnnnnnnnnnnnnnnnnnnnnnnnnnnnnnnnnnnnnnnnnnnnnnnnnnnnnnnnnnnnnnnnnnnnnnnnnnnnnnnnnnnnnnnnnnnnnnnnnnnnnnnnnnnnnnnnnnnnnnnnnnnnnnnnnnnnnnnnnnnnnnnnnnnnnnnnnnnnnnnnnnnnnnnnnnnnnnnnnnnnnnnnnnnnnnnnnnnnnnnnnnnnnnnnnnnnnnnnnnnnnnnnnnnnnnnnnnnnnnnnnnnnnnnnnnnnnnnnnnnnnnnnnnnnnnnnnnnnnnnnnnnnnnnnnnnnnnnnnnnnnnnnnnnnnnnnnnnnnnnnnnnnnnnnnnnnnnnnnnnnnnnnnnnnnnnnnnnnnnnnnnnnnnnnnnnnnnnnnnnnnnnnnnnnnnnnnnnnnnnnnnnnnnnnnnnnnnnnnnnnnnnnnnnnnnnnnnnnnnnnnnnnnnnnnnnnnnnnnnnnnnnnnnnnnnnnnnnnnnnnnnnnnnnnnnnnnnnnnnnnnnnnnnnnnnnnnnnnnnnnnnnnnnnnnnnnnnnnnnnnnnnnnnnnnnnnnnnnnnnnnnnnnnnnnnnnnnnnnnnnnnnnnnnnnnnnnnnnnnnnnnnnnnnnnnnnnnnnnnnnnnnnnnnnnnnnnnnnnnnnnnnnnnnnnnnnnnnnnnnnnnnnnnnnnnnnnnnnnnnnnnnnnnnnnnnnnnnnnnnnnnnnnnnnnnnnnnnnnnnnnnnnnnnnnnnnnnnnnnnnnnnnnnnnnnnnnnnnnnnnnnnnnnnnnnnnnnnnnnnnnnnnnnnnnnnnnnnnnnnnnnnnnnnnnnnnnnnnnnnnnnnnnnnnnnnnnnnnnnnnnnnnnnnnnnnnnnnnnnnnnnnnnnnnnnnnnnnnnnnnnnnnnnnnnnnnnnnnnnnnnnnnnnnnnnnnnnnnnnnnnnnnnnnnnnnnnnnnnnnnnnnnnnnnnnnnnnnnnnnnnnnnnnnnnnnnnnnnnnnnnnnnnnnnnnnnnnnnnnnnnnnnnnnnnnnnnnnnnnnnnnnnnnnnnnnnnnnnnnnnnnnnnnnnnnnnnnnnnnnnnnnnnnnnnnnnnnnnnnnnnnnnnnnnnnnnnnnnnnnnnnnnnnnnnnnnnnnnnnnnnnnnnnnnnnnnnnnnnnnnnnnnnnnnnnnnnnnnnnnnnnnnnnnnnnnnnnnnnnnnnnnnnnnnnnnnnnnnnnnnnnnnnnnnnnnnnnnnnnnnnnnnnnnnnnnnnnnnnnnnnnnnnnnnnnnnnnnnnnnnnnnnnnnnnnnnnnnnnnnnnnnnnnnnnnnnnnnnnnnnnnnnnnnnnnnnnnnnnnnnnnnnnnnnnnnnnnnnnnnnnnnnnnnnnnnnnnnnnnnnnnnnnnnnnnnnnnnnnnnnnnnnnnnnnnnnnnnnnnnnnnnnnnnnnnnnnnnnnnnnnnnnnnnnnnnnnnnnnnnnnnnnnnnnnnnnnnnnnnnnnnnnnnnnnnnnnnnnnnnnnnnnnnnnnnnnnnnnnnnnnnnnnnnnnnnnnnnnnnnnnnnnnnnnnnnnnnnnnnnnnnnnnnnnnnnnnnnnnnnnnnnnnnnnnnnnnnnnnnnnnnnnnnnnnnnnnnnnnnnnnnnnnnnnnnnnnnnnnnnnnnnnnnnnnnnnnnnnnnnnnnnnnnnnnnnnnnnnnnnnnnnnnnnnnnnnnnnnnnnnnnnnnnnnnnnnnnnnnnnnnnnnnnnnnnnnnnnnnnnnnnnnnnnnnnnnnnnnnnnnnnnnnnnnnnnnnnnnnnnnnnnnnnnnnnnnnnnnnnnnnnnnnnnnnnnnnnnnnnnnnnnnnnnnnnnnnnnnnnnnnnnnnnnnnnnnnnnnnnnnnnnnnnnnnnnnnnnnnnnnnnnnnnnnnnnnnnnnnnnnnnnnnnnnnnnnnnnnnnnnnnnnnnnnnnnnnnnnnnnnnnnnnnnnnnnnnnnnnnnnnnnnnnnnnnnnnnnnnnnnnnnnnnnnnnnnnnnnnnnnnnnnnnnnnnnnnnnnnnnnnnnnnnnnnnnnnnnnnnnnnnnnnnnnnnnnnnnnnnnnnnnnnnnnnnnnnnnnnnnnnnnnnnnnnnnnnnnnnnnnnnnnnnnnnnnnnnnnnnnnnnnnnnnnnnnnnnnnnnnnnnnnnnnnnnnnnnnnnnnnnnnnnnnnnnnnnnnnnnnnnnnnnnnnnnnnnnnnnnnnnnnnnnnnnnnnnnnnnnnnnnnnnnnnnnnnnnnnnnnnnnnnnnnnnnnnnnnnnnnnnnnnnnnnnnnnnnnnnnnnnnnnnnnnnnnnnnnnnnnnnnnnnnnnnnnnnnnnnnnnnnnnnnnnnnnnnnnnnnnnnnnnnnnnnnnnnnnnnnnnnnnnnnnnnnnnnnnnnnnnnnnnnnnnnnnnnnnnnnnnnnnnnnnnnnnnnnnnnnnnnnnnnnnnnnnnnnnnnnnnnnnnnnnnnnnnnnnnnnnnnnnnnnnnnnnnnnnnnnnnnnnnnnnnnnnnnnnnnnnnnnnnnnnnnnnnnnnnnnnnnnnnnnnnnnnnnnnnnnnnnnnnnnnnnnnnnnnnnnnnnnnnnnnnnnnnnnnnnnnnnnnnnnnnnnnnnnnnnnnnnnnnnnnnnnnnnnnnnnnnnnnnnnnnnnnnnnnnnnnnnnnnnnnnnnnnnnnnnnnnnnnnnnnnnnnnnnnnnnnnnnnnnnnnnnnnnnnnnnnnnnnnnnnnnnnnnnnnnnnnnnnnnnnnnnnnnnnnnnnnnnnnnnnnnnnnnnnnnnnnnnnnnnnnnnnnnnnnnnnnnnnnnnnnnnnnnnnnnnnnnnnnnnnnnnnnnnnnnnnnnnnnnnnnnnnnnnnnnnnnnnnnnnnnnnnnnnnnnnnnnnnnnnnnnnnnnnnnnnnnnnnnnnnnnnnnnnnnnnnnnnnnnnnnnnnnnnnnnnnnnnnnnnnnnnnnnnnnnnnnnnnnnnnnnnnnnnnnnnnnnnnnnnnnnnnnnnnnnnnnnnnnnnnnnnnnnnnnnnnnnnnnnnnnnnnnnnnnnnnnnnnnnnnnnnnnnnnnnnnnnnnnnnnnnnnnnnnnnnnnnnnnnnnnnnnnnnnnnnnnnnnnnnnnnnnnnnnnnnnnnnnnnnnnnnnnnnnnnnnnnnnnnnnnnnnnnnnnnnnnnnnnnnnnnnnnnnnnnnnnnnnnnnnnnnnnnnnnnnnnnnnnnnnnnnnnnnnnnnnnnnnnnnnnnnnnnnnnnnnnnnnnnnnnnnnnnnnnnnnnnnnnnnnnnnnnnnnnnnnnnnnnnnnnnnnnnnnnnnnnnnnnnnnnnnnnnnnnnnnnnnnnnnnnnnnnnnnnnnnnnnnnnnnnnnnnnnnnnnnnnnnnnnnnnnnnnnnnnnnnnnnnnnnnnnnnnnnnnnnnnnnnnnnnnnnnnnnnnnnnnnnnnnnnnnnnnnnnnnnnnnnnnnnnnnnnnnnnnnnnnnnnnnnnnnnnnnnnnnnnnnnnnnnnnnnnnnnnnnnnnnnnnnnnnnnnnnnnnnnnnnnnnnnnnnnnnnnnnnnnnnnnnnnnnnnnnnnnnnnnnnnnnnnnnnnnnnnnnnnnnnnnnnnnnnnnnnnnnnnnnnnnnnnnnnnnnnnnnnnnnnnnnnnnnnnnnnnnnnnnnnnnnnnnnnnnnnnnnnnnnnnnnnnnnnnnnnnnnnnnnnnnnnnnnnnnnnnnnnnnnnnnnnnnnnnnnnnnnnnnnnnnnnnnnnnnnnnnnnnnnnnnnnnnnnnnnnnnnnnnnnnnnnnnnnnnnnnnnnnnnnnnnnnnnnnnnnnnnnnnnnnnnnnnnnnnnnnnnnnnnnnnnnnnnnnnnnnnnnnnnnnnnnnnnnnnnnnnnnnnnnnnnnnnnnnnnnnnnnnnnnnnnnnnnnnnnnnnnnnnnnnnnnnnnnnnnnnnnnnnnnnnnnnnnnnnnnnnnnnnnnnnnnnnnnnnnnnnnnnnnnnnnnnnnnnnnnnnnnnnnnnnnnnnnnnnnnnnnnnnnnnnnnnnnnnnnnnnnnnnnnnnnnnnnnnnnnnnnnnnnnnnnnnnnnnnnnnnnnnnnnnnnnnnnnnnnnnnnnnnnnnnnnnnnnnnnnnnnnnnnnnnnnnnnnnnnnnnnnnnnnnnnnnnnnnnnnnnnnnnnnnnnnnnnnnnnnnnnnnnnnnnnnnnnnnnnnnnnnnnnnnnnnnnnnnnnnnnnnnnnnnnnnnnnnnnnnnnnnnnnnnnnnnnnnnnnnnnnnnnnnnnnnnnnnnnnnnnnnnnnnnnnnnnnnnnnnnnnnnnnnnnnnnnnnnnnnnnnnnnnnnnnnnnnnnnnnnnnnnnnnnnnnnnnnnnnnnnnnnnnnnnnnnnnnnnnnnnnnnnnnnnnnnnnnnnnnnnnnnnnnnnnnnnnnnnnnnnnnnnnnnnnnnnnnnnnnnnnnnnnnnnnnnnnnnnnnnnnnnnnnnnnnnnnnnnnnnnnnnnnnnnnnnnnnnnnnnnnnnnnnnnnnnnnnnnnnnnnnnnnnnnnnnnnnnnnnnnnnnnnnnnnnnnnnnnnnnnnnnnnnnnnnnnnnnnnnnnnnnnnnnnnnnnnnnnnnnnnnnnnnnnnnnnnnnnnnnnnnnnnnnnnnnnnnnnnnnnnnnnnnnnnnnnnnnnnnnnnnnnnnnnnnnnnnnnnnnnnnnnnnnnnnnnnnnnnnnnnnnnnnnnnnnnnnnnnnnnnnnnnnnnnnnnnnnnnnnnnnnnnnnnnnnnnnnnnnnnnnnnnnnnnnnnnnnnnnnnnnnnnnnnnnnnnnnnnnnnnnnnnnnnnnnnnnnnnnnnnnnnnnnnnnnnnnnnnnnnnnnnnnnnnnnnnnnnnnnnnnnnnnnnnnnnnnnnnnnnnnnnnnnnnnnnnnnnnnnnnnnnnnnnnnnnnnnnnnnnnnnnnnnnnnnnnnnnnnnnnnnnnnnnnnnnnnnnnnnnnnnnnnnnnnnnnnnnnnnnnnnnnnnnnnnnnnnnnnnnnnnnnnnnnnnnnnnnnnnnnnnnnnnnnnnnnnnnnnnnnnnnnnnnnnnnnnnnnnnnnnnnnnnnnnnnnnnnnnnnnnnnnnnnnnnnnnnnnnnnnnnnnnnnnnnnnnnnnnnnnnnnnnnnnnnnnnnnnnnnnnnnnnnnnnnnnnnnnnnnnnnnnnnnnnnnnnnnnnnnnnnnnnnnnnnnnnnnnnnnnnnnnnnnnnnnnnnnnnnnnnnnnnnnnnnnnnnnnnnnnnnnnnnnnnnnnnnnnnnnnnnnnnnnnnnnnnnnnnnnnnnnnnnnnnnnnnnnnnnnnnnnnnnnnnnnnnnnnnnnnnnnnnnnnnnnnnnnnnnnnnnnnnnnnnnnnnnnnnnnnnnnnnnnnnnnnnnnnnnnnnnnnnnnnnnnnnnnnnnnnnnnnnnnnnnnnnnnnnnnnnnnnnnnnnnnnnnnnnnnnnnnnnnnnnnnnnnnnnnnnnnnnnnnnnnnnnnnnnnnnnnnnnnnnnnnnnnnnnnnnnnnnnnnnnnnnnnnnnnnnnnnnnnnnnnnnnnnnnnnnnnnnnnnnnnnnnnnnnnnnnnnnnnnnnnnnnnnnnnnnnnnnnnnnnnnnnnnnnnnnnnnnnnnnnnnnnnnnnnnnnnnnnnnnnnnnnnnnnnnnnnnnnnnnnnnnnnnnnnnnnnnnnnnnnnnnnnnnnnnnnnnnnnnnnnnnnnnnnnnnnnnnnnnnnnnnnnnnnnnnnnnnnnnnnnnnnnnnnnnnnnnnnnnnnnnnnnnnnnnnnnnnnnnnnnnnnnnnnnnnnnnnnnnnnnnnnnnnnnnnnnnnnnnnnnnnnnnnnnnnnnnnnnnnnnnnnnnnnnnnnnnnnnnnnnnnnnnnnnnnnnnnnnnnnnnnnnnnnnnnnnnnnnnnnnnnnnnnnnnnnnnnnnnnnnnnnnnnnnnnnnnnnnnnnnnnnnnnnnnnnnnnnnnnnnnnnnnnnnnnnnnnnnnnnnnnnnnnnnnnnnnnnnnnnnnnnnnnnnnnnnnnnnnnnnnnnnnnnnnnnnnnnnnnnnnnnnnnnnnnnnnnnnnnnnnnnnnnnnnnnnnnnnnnnnnnnnnnnnnnnnnnnnnnnnnnnnnnnnnnnnnnnnnnnnnnnnnnnnnnnnnnnnnnnnnnnnnnnnnnnnnnnnnnnnnnnnnnnnnnnnnnnnnnnnnnnnnnnnnnnnnnnnnnnnnnnnnnnnnnnnnnnnnnnnnnnnnnnnnnnnnnnnnnnnnnnnnnnnnnnnnnnnnnnnnnnnnnnnnnnnnnnnnnnnnnnnnnnnnnnnnnnnnnnnnnnnnnnnnnnnnnnnnnnnnnnnnnnnnnnnnnnnnnnnnnnnnnnnnnnnnnnnnnnnnnnnnnnnnnnnnnnnnnnnnnnnnnnnnnnnnnnnnnnnnnnnnnnnnnnnnnnnnnnnnnnnnnnnnnnnnnnnnnnnnnnnnnnnnnnnnnnnnnnnnnnnnnnnnnnnnnnnnnnnnnnnnnnnnnnnnnnnnnnnnnnnnnnnnnnnnnnnnnnnnnnnnnnnnnnnnnnnnnnnnnnnnnnnnnnnnnnnnnnnnnnnnnnnnnnnnnnnnnnnnnnnnnnnnnnnnnnnnnnnnnnnnnnnnnnnnnnnnnnnnnnnnnnnnnnnnnnnnnnnnnnnnnnnnnnnnnnnnnnnnnnnnnnnnnnnnnnnnnnnnnnnnnnnnnnnnnnnnnnnnnnnnnnnnnnnnnnnnnnnnnnnnnnnnnnnnnnnnnnnnnnnnnnnnnnnnnnnnnnnnnnnnnnnnnnnnnnnnnnnnnnnnnnnnnnnnnnnnnnnnnnnnnnnnnnnnnnnnnnnnnnnnnnnnnnnnnnnnnnnnnnnnnnnnnnnnnnnnnnnnnnnnnnnnnnnnnnnnnnnnnnnnnnnnnnnnnnnnnnnnnnnnnnnnnnnnnnnnnnnnnnnnnnnnnnnnnnnnnnnnnnnnnnnnnnnnnnnnnnnnnnnnnnnnnnnnnnnnnnnnnnnnnnnnnnnnnnnnnnnnnnnnnnnnnnnnnnnnnnnnnnnnnnnnnnnnnnnnnnnnnnnnnnnnnnnnnnnnnnnnnnnnnnnnnnnnnnnnnnnnnnnnnnnnnnnnnnnnnnnnnnnnnnnnnnnnnnnnnnnnnnnnnnnnnnnnnnnnnnnnnnnnnnnnnnnnnnnnnnnnnnnnnnnnnnnnnnnnnnnnnnnnnnnnnnnnnnnnnnnnnnnnnnnnnnnnnnnnnnnnnnnnnnnnnnnnnnnnnnnnnnnnnnnnnnnnnnnnnnnnnnnnnnnnnnnnnnnnnnnnnnnnnnnnnnnnnnnnnnnnnnnnnnnnnnnnnnnnnnnnnnnnnnnnnnnnnnnnnnnnnnnnnnnnnnnnnnnnnnnnnnnnnnnnnnnnnnnnnnnnnnnnnnnnnnnnnnnnnnnnnnnnnnnnnnnnnnnnnnnnnnnnnnnnnnnnnnnnnnnnnnnnnnnnnnnnnnnnnnnnnnnnnnnnnnnnnnnnnnnnnnnnnnnnnnnnnnnnnnnnnnnnnnnnnnnnnnnnnnnnnnnnnnnnnnnnnnnnnnnnnnnnnnnnnnnnnnnnnnnnnnnnnnnnnnnnnnnnnnnnnnnnnnnnnnnnnnnnnnnnnnnnnnnnnnnnnnnnnnnnnnnnnnnnnnnnnnnnnnnnnnnnnnnnnnnnnnnnnnnnnnnnnnnnnnnnnnnnnnnnnnnnnnnnnnnnnnnnnnnnnnnnnnnnnnnnnnnnnnnnnnnnnnnnnnnnnnnnnnnnnnnnnnnnnnnnnnnnnnnnnnnnnnnnnnnnnnnnnnnnnnnnnnnnnnnnnnnnnnnnnnnnnnnnnnnnnnnnnnnnnnnnnnnnnnnnnnnnnnnnnnnnnnnnnnnnnnnnnnnnnnnnnnnnnnnnnnnnnnnnnnnnnnnnnnnnnnnnnnnnnnnnnnnnnnnnnnnnnnnnnnnnnnnnnnnnnnnnnnnnnnnnnnnnnnnnnnnnnnnnnnnnnnnnnnnnnnnnnnnnnnnnnnnnnnnnnnnnnnnnnnnnnnnnnnnnnnnnnnnnnnnnnnnnnnnnnnnnnnnnnnnnnnnnnnnnnnnnnnnnnnnnnnnnnnnnnnnnnnnnnnnnnnnnnnnnnnnnnnnnnnnnnnnnnnnnnnnnnnnnnnnnnnnnnnnnnnnnnnnnnnnnnnnnnnnnnnnnnnnnnnnnnnnnnnnnnnnnnnnnnnnnnnnnnnnnnnnnnnnnnnnnnnnnnnnnnnnnnnnnnnnnnnnnnnnnnnnnnnnnnnnnnnnnnnnnnnnnnnnnnnnnnnnnnnnnnnnnnnnnnnnnnnnnnnnnnnnnnnnnnnnnnnnnnnnnnnnnnnnnnnnnnnnnnnnnnnnnnnnnnnnnnnnnnnnnnnnnnnnnnnnnnnnnnnnnnnnnnnnnnnnnnnnnnnnnnnnnnnnnnnnnnnnnnnnnnnnnnnnnnnnnnnnnnnnnnnnnnnnnnnnnnnnnnnnnnnnnnnnnnnnnnnnnnnnnnnnnnnnnnnnnnnnnnnnnnnnnnnnnnnnnnnnnnnnnnnnnnnnnnnnnnnnnnnnnnnnnnnnnnnnnnnnnnnnnnnnnnnnnnnnnnnnnnnnnnnnnnnnnnnnnnnnnnnnnnnnnnnnnnnnnnnnnnnnnnnnnnnnnnnnnnnnnnnnnnnnnnnnnnnnnnnnnnnnnnnnnnnnnnnnnnnnnnnnnnnnnnnnnnnnnnnnnnnnnnnnnnnnnnnnnnnnnnnnnnnnnnnnnnnnnnnnnnnnnnnnnnnnnnnnnnnnnnnnnnnnnnnnnnnnnnnnnnnnnnnnnnnnnnnnnnnnnnnnnnnnnnnnnnnnnnnnnnnnnnnnnnnnnnnnnnnnnnnnnnnnnnnnnnnnnnnnnnnnnnnnnnnnnnnnnnnnnnnnnnnnnnnnnnnnnnnnnnnnnnnnnnnnnnnnnnnnnnnnnnnnnnnnnnnnnnnnnnnnnnnnnnnnnnnnnnnnnnnnnnnnnnnnnnnnnnnnnnnnnnnnnnnnnnnnnnnnnnnnnnnnnnnnnnnnnnnnnnnnnnnnnnnnnnnnnnnnnnnnnnnnnnnnnnnnnnnnnnnnnnnnnnnnnnnnnnnnnnnnnnnnnnnnnnnnnnnnnnnnnnnnnnnnnnnnnnnnnnnnnnnnnnnnnnnnnnnnnnnnnnnnnnnnnnnnnnnnnnnnnnnnnnnnnnnnnnnnnnnnnnnnnnnnnnnnnnnnnnnnnnnnnnnnnnnnnnnnnnnnnnnnnnnnnnnnnnnnnnnnnnnnnnnnnnnnnnnnnnnnnnnnnnnnnnnnnnnnnnnnnnnnnnnnnnnnnnnnnnnnnnnnnnnnnnnnnnnnnnnnnnnnnnnnnnnnnnnnnnnnnnnnnnnnnnnnnnnnnnnnnnnnnnnnnnnnnnnnnnnnnnnnnnnnnnnnnnnnnnnnnnnnnnnnnnnnnnnnnnnnnnnnnnnnnnnnnnnnnnnnnnnnnnnnnnnnnnnnnnnnnnnnnnnnnnnnnnnnnnnnnnnnnnnnnnnnnnnnnnnnnnnnnnnnnnnnnnnnnnnnnnnnnnnnnnnnnnnnnnnnnnnnnnnnnnnnnnnnnnnnnnnnnnnnnnnnnnnnnnnnnnnnnnnnnnnnnnnnnnnnnnnnnnnnnnnnnnnnnnnnnnnnnnnnnnnnnnnnnnnnnnnnnnnnnnnnnnnnnnnnnnnnnnnnnnnnnnnnnnnnnnnnnnnnnnnnnnnnnnnnnnnnnnnnnnnnnnnnnnnnnnnnnnnnnnnnnnnnnnnnnnnnnnnnnnnnnnnnnnnnnnnnnnnnnnnnnnnnnnnnnnnnnnnnnnnnnnnnnnnnnnnnnnnnnnnnnnnnnnnnnnnnnnnnnnnnnnnnnnnnnnnnnnnnnnnnnnnnnnnnnnnnnnnnnnnnnnnnnnnnnnnnnnnnnnnnnnnnnnnnnnnnnnnnnnnnnnnnnnnnnnnnnnnnnnnnnnnnnnnnnnnnnnnnnnnnnnnnnnnnnnnnnnnnnnnnnnnnnnnnnnnnnnnnnnnnnnnnnnnnnnnnnnnnnnnnnnnnnnnnnnnnnnnnnnnnnnnnnnnnnnnnnnnnnnnnnnnnnnnnnnnnnnnnnnnnnnnnnnnnnnnnnnnnnnnnnnnnnnnnnnnnnnnnnnnnnnnnnnnnnnnnnnnnnnnnnnnnnnnnnnnnnnnnnnnnnnnnnnnnnnnnnnnnnnnnnnnnnnnnnnnnnnnnnnnnnnnnnnnnnnnnnnnnnnnnnnnnnnnnnnnnnnnnnnnnnnnnnnnnnnnnnnnnnnnnnnnnnnnnnnnnnnnnnnnnnnnnnnnnnnnnnnnnnnnnnnnnnnnnnnnnnnnnnnnnnnnnnnnnnnnnnnnnnnnnnnnnnnnnnnnnnnnnnnnnnnnnnnnnnnnnnnnnnnnnnnnnnnnnnnnnnnnnnnnnnnnnnnnnnnnnnnnnnnnnnnnnnnnnnnnnnnnnnnnnnnnnnnnnnnnnnnnnnnnnnnnnnnnnnnnnnnnnnnnnnnnnnnnnnnnnnnnnnnnnnnnnnnnnnnnnnnnnnnnnnnnnnnnnnnnnnnnnnnnnnnnnnnnnnnnnnnnnnnnnnnnnnnnnnnnnnnnnnnnnnnnnnnnnnnnnnnnnnnnnnnnnnnnnnnnnnnnnnnnnnnnnnnnnnnnnnnnnnnnnnnnnnnnnnnnnnnnnnnnnnnnnnnnnnnnnnnnnnnnnnnnnnnnnnnnnnnnnnnnnnnnnnnnnnnnnnnnnnnnnnnnnnnnnnnnnnnnnnnnnnnnnnnnnnnnnnnnnnnnnnnnnnnnnnnnnnnnnnnnnnnnnnnnnnnnnnnnnnnnnnnnnnnnnnnnnnnnnnnnnnnnnnnnnnnnnnnnnnnnnnnnnnnnnnnnnnnnnnnnnnnnnnnnnnnnnnnnnnnnnnnnnnnnnnnnnnnnnnnnnnnnnnnnnnnnnnnnnnnnnnnnnnnnnnnnnnnnnnnnnnnnnnnnnnnnnnnnnnnnnnnnnnnnnnnnnnnnnnnnnnnnnnnnnnnnnnnnnnnnnnnnnnnnnnnnnnnnnnnnnnnnnnnnnnnnnnnnnnnnnnnnnnnnnnnnnnnnnnnnnnnnnnnnnnnnnnnnnnnnnnnnnnnnnnnnnnnnnnnnnnnnnnnnnnnnnnnnnnnnnnnnnnnnnnnnnnnnnnnnnnnnnnnnnnnnnnnnnnnnnnnnnnnnnnnnnnnnnnnnnnnnnnnnnnnnnnnnnnnnnnnnnnnnnnnnnnnnnnnnnnnnnnnnnnnnnnnnnnnnnnnnnnnnnnnnnnnnnnnnnnnnnnnnnnnnnnnnnnnnnnnnnnnnnnnnnnnnnnnnnnnnnnnnnnnnnnnnnnnnnnnnnnnnnnnnnnnnnnnnnnnnnnnnnnnnnnnnnnnnnnnnnnnnnnnnnnnnnnnnnnnnnnnnnnnnnnnnnnnnnnnnnnnnnnnnnnnnnnnnnnnnnnnnnnnnnnnnnnnnnnnnnnnnnnnnnnnnnnnnnnnnnnnnnnnnnnnnnnnnnnnnnnnnnnnnnnnnnnnnnnnnnnnnnnnnnnnnnnnnnnnnnnnnnnnnnnnnnnnnnnnnnnnnnnnnnnnnnnnnnnnnnnnnnnnnnnnnnnnnnnnnnnnnnnnnnnnnnnnnnnnnnnnnnnnnnnnnnnnnnnnnnnnnnnnnnnnnnnnnnnnnnnnnnnnnnnnnnnnnnnnnnnnnnnnnnnnnnnnnnnnnnnnnnnnnnnnnnnnnnnnnnnnnnnnnnnnnnnnnnnnnnnnnnnnnnnnnnnnnnnnnnnnnnnnnnnnnnnnnnnnnnnnnnnnnnnnnnnnnnnnnnnnnnnnnnnnnnnnnnnnnnnnnnnnnnnnnnnnnnnnnnnnnnnnnnnnnnnnnnnnnnnnnnnnnnnnnnnnnnnnnnnnnnnnnnnnnnnnnnnnnnnnnnnnnnnnnnnnnnnnnnnnnnnnnnnnnnnnnnnnnnnnnnnnnnnnnnnnnnnnnnnnnnnnnnnnnnnnnnnnnnnnnnnnnnnnnnnnnnnnnnnnnnnnnnnnnnnnnnnnnnnnnnnnnnnnnnnnnnnnnnnnnnnnnnnnnnnnnnnnnnnnnnnnnnnnnnnnnnnnnnnnnnnnnnnnnnnnnnnnnnnnnnnnnnnnnnnnnnnnnnnnnnnnnnnnnnnnnnnnnnnnnnnnnnnnnnnnnnnnnnnnnnnnnnnnnnnnnnnnnnnnnnnnnnnnnnnnnnnnnnnnnnnnnnnnnnnnnnnnnnnnnnnnnnnnnnnnnnnnnnnnnnnnnnnnnnnnnnnnnnnnnnnnnnnnnnnnnnnnnnnnnnnnnnnnnnnnnnnnnnnnnnnnnnnnnnnnnnnnnnnnnnnnnnnnnnnnnnnnnnnnnnnnnnnnnnnnnnnnnnnnnnnnnnnnnnnnnnnnnnnnnnnnnnnnnnnnnnnnnnnnnnnnnnnnnnnnnnnnnnnnnnnnnnnnnnnnnnnnnnnnnnnnnnnnnnnnnnnnnnnnnnnnnnnnnnnnnnnnnnnnnnnnnnnnnnnnnnnnnnnnnnnnnnnnnnnnnnnnnnnnnnnnnnnnnnnnnnnnnnnnnnnnnnnnnnnnnnnnnnnnnnnnnnnnnnnnnnnnnnnnnnnnnnnnnnnnnnnnnnnnnnnnnnnnnnnnnnnnnnnnnnnnnnnnnnnnnnnnnnnnnnnnnnnnnnnnnnnnnnnnnnnnnnnnnnnnnnnnnnnnnnnnnnnnnnnnnnnnnnnnnnnnnnnnnnnnnnnnnnnnnnnnnnnnnnnnnnnnnnnnnnnnnnnnnnnnnnnnnnnnnnnnnnnnnnnnnnnnnnnnnnnnnnnnnnnnnnnnnnnnnnnnnnnnnnnnnnnnnnnnnnnnnnnnnnnnnnnnnnnnnnnnnnnnnnnnnnnnnnnnnnnnnnnnnnnnnnnnnnnnnnnnnnnnnnnnnnnnnnnnnnnnnnnnnnnnnnnnnnnnnnnnnnnnnnnnnnnnnnnnnnnnnnnnnnnnnnnnnnnnnnnnnnnnnnnnnnnnnnnnnnnnnnnnnnnnnnnnnnnnnnnnnnnnnnnnnnnnnnnnnnnnnnnnnnnnnnnnnnnnnnnnnnnnnnnnnnnnnnnnnnnnnnnnnnnnnnnnnnnnnnnnnnnnnnnnnnnnnnnnnnnnnnnnnnnnnnnnnnnnnnnnnnnnnnnnnnnnnnnnnnnnnnnnnnnnnnnnnnnnnnnnnnnnnnnnnnnnnnnnnnnnnnnnnnnnnnnnnnnnnnnnnnnnnnnnnnnnnnnnnnnnnnnnnnnnnnnnnnnnnnnnnnnnnnnnnnnnnnnnnnnnnnnnnnnnnnnnnnnnnnnnnnnnnnnnnnnnnnnnnnnnnnnnnnnnnnnnnnnnnnnnnnnnnnnnnnnnnnnnnnnnnnnnnnnnnnnnnnnnnnnnnnnnnnnnnnnnnnnnnnnnnnnnnnnnnnnnnnnnnnnnnnnnnnnnnnnnnnnnnnnnnnnnnnnnnnnnnnnnnnnnnnnnnnnnnnnnnnnnnnnnnnnnnnnnnnnnnnnnnnnnnnnnnnnnnnnnnnnnnnnnnnnnnnnnnnnnnnnnnnnnnnnnnnnnnnnnnnnnnnnnnnnnnnnnnnnnnnnnnnnnnnnnnnnnnnnnnnnnnnnnnnnnnnnnnnnnnnnnnnnnnnnnnnnnnnnnnnnnnnnnnnnnnnnnnnnnnnnnnnnnnnnnnnnnnnnnnnnnnnnnnnnnnnnnnnnnnnnnnnnnnnnnnnnnnnnnnnnnnnnnnnnnnnnnnnnnnnnnnnnnnnnnnnnnnnnnnnnnnnnnnnnnnnnnnnnnnnnnnnnnnnnnnnnnnnnnnnnnnnnnnnnnnnnnnnnnnnnnnnnnnnnnnnnnnnnnnnnnnnnnnnnnnnnnnnnnnnnnnnnnnnnnnnnnnnnnnnnnnnnnnnnnnnnnnnnnnnnnnnnnnnnnnnnnnnnnnnnnnnnnnnnnnnnnnnnnnnnnnnnnnnnnnnnnnnnnnnnnnnnnnnnnnnnnnnnnnnnnnnnnnnnnnnnnnnnnnnnnnnnnnnnnnnnnnnnnnnnnnnnnnnnnnnnnnnnnnnnnnnnnnnnnnnnnnnnnnnnnnnnnnnnnnnnnnnnnnnnnnnnnnnnnnnnnnnnnnnnnnnnnnnnnnnnnnnnnnnnnnnnnnnnnnnnnnnnnnnnnnnnnnnnnnnnnnnnnnnnnnnnnnnnnnnnnnnnnnnnnnnnnnnnnnnnnnnnnnnnnnnnnnnnnnnnnnnnnnnnnnnnnnnnnnnnnnnnnnnnnnnnnnnnnnnnnnnnnnnnnnnnnnnnnnnnnnnnnnnnnnnnnnnnnnnnnnnnnnnnnnnnnnnnnnnnnnnnnnnnnnnnnnnnnnnnnnnnnnnnnnnnnnnnnnnnnnnnnnnnnnnnnnnnnnnnnnnnnnnnnnnnnnnnnnnnnnnnnnnnnnnnnnnnnnnnnnnnnnnnnnnnnnnnnnnnnnnnnnnnnnnnnnnnnnnnnnnnnnnnnnnnnnnnnnnnnnnnnnnnnnnnnnnnnnnnnnnnnnnnnnnnnnnnnnnnnnnnnnnnnnnnnnnnnnnnnnnnnnnnnnnnnnnnnnnnnnnnnnnnnnnnnnnnnnnnnnnnnnnnnnnnnnnnnnnnnnnnnnnnnnnnnnnnnnnnnnnnnnnnnnnnnnnnnnnnnnnnnnnnnnnnnnnnnnnnnnnnnnnnnnnnnnnnnnnnnnnnnnnnnnnnnnnnnnnnnnnnnnnnnnnnnnnnnnnnnnnnnnnnnnnnnnnnnnnnnnnnnnnnnnnnnnnnnnnnnnnnnnnnnnnnnnnnnnnnnnnnnnnnnnnnnnnnnnnnnnnnnnnnnnnnnnnnnnnnnnnnnnnnnnnnnnnnnnnnnnnnnnnnnnnnnnnnnnnnnnnnnnnnnnnnnnnnnnnnnnnnnnnnnnnnnnnnnnnnnnnnnnnnnnnnnnnnnnnnnnnnnnnnnnagtcttttggaaacaagcactcagccacaaaacaaaccatgccagacaatatactgcgtcatcacgggcttgacccgtgatccagtctttttgaaaaggcagtggaaaggtgaaatggtggaaaggaagcaaaaaatccaacagactaccctccgcgtcatcccgggcaaacgggggcccctctggggtgtctgacccgggatccagtcttttggaaacaagcactcagccacaaaacaaaccataccagacaatatactgcgtcatcacgggcttgacccgtgatccagtcttttaaagcccaatcaagcacccaatacaaaaaatacagatatcaattccttgctaaccgcataaagtatcaatacattccgcaataccattcataccgccctcctttgctgcgactggattttgtgccatcatccttaggtcatccttataaattataaggttgacctaaggaatacccactccagagtgccggatgcaaatgaggcccccatattatataggtgctacgagctcgtaaagacttattttggtttgcattatcacaatcgcctgtcttcttccgcatgaagtccaagagagccaaagcgtctggtggagatttgaagcctgtcaaggctccttgaactccatgctggctgagtttggagtttaagccggcaaggaaggttgtatggatttcgccaaaccagaggctggcttagacttcaaacggtcttcaaaagactggatcacgggtcaagcccgtgatgacgcagctttagggctttgtggtagtttgtttcggggtcgggtgattgtttccaaaagactggatcccggatcaagtcaccccaccaaaccgctacgcgctttggcggggaccccgacaggccgggatgacgcggcatgtagcttggatggcgttgtttcaggactgtgtgttatgatatggctttaaaagactggatcacgggtcgcaggccgggatggcgcggcatgtagcttggatggcgttgtttcaggactgtgtgcttgtttgagccttgaaaagactggatcacgtgtcaagaggttcacgcagattgacacgggattgggctgccgaagtctgttcggcagaggcaacggagttgcctgtttggaagagacctccggtctctgtggcaaacggactttgccaccccccccatggaaggcaatcccagacggcgctatggcaagcgccgctactttgtactggcggtcgctgaaccgccatttccacctttccacgggtgtttctaaaagactggatcccgggtcaagcgtgcgcttgcccgggatgacacagaatataacttggtggacttgttttttggggaacctttccaccattccaccattccacctttccacctttccacctttccacctttccacctttccacgaccatttatagaccactccgtgtaaatccaacccaaaggagccacccttgtttcctgcctgttcagcgggcagacagcagtcgtgtcatgaaagcttgtccagttcctcgcggacgttttggcagcggggatagtctttgccgaaggtgttttcccagatgctcagcacccgggtcagcagttcccgggcggtttttgcgtcgccctgcctggcgcgcagcctgcccagcgaaaagaggtaattggctgtctgggaatggttatcgccaaagtggaaggtatggccgtctattgcctgtttgagcaggggttccgcttcttccaggcgtccctggcgcagcagcacgctgcccagatttccggcgcagaccgccgtgaaccagtgtccctccgggaagaggctttccatcatttccagcgcggcacggagcatctcctcagccttgtccggcctgtccatcagactgtaaagcgaagccaggttgttcatgcggtctgccacattggaattgggtccggggcgtttttcgatattcagcgagcggcgcagcagtttttcagcctgcgggtagcggccggtgtctttgtaaaaacgtcccaggttattcagatagggggagaggcgggggctgcgtggcccgagctgccgggttctggcgtccaccaccttcagatagagcggctcggcatcgtccatgcggtgcatatagtgatagagcagggccagatggaagagtcgttcgatgtgttccgggctgtccccgccccatgcctggcaggacaactccgccgccagcagcatacattcctcaatctttaccatcagcatacggtcccagaagtaatcggacgccatttcatagtaattggcggcttttttgagttcccctgcagccttgtagtggcgggcgatctccgcggaatgctctttgagagcctgttcaaagacggtttccattgcttcggcggccgccaggtgcagctttttaagctccttttcgcggatgctggcatagaccgccttctgtaacaggctgtgggaaaagatgtaaaagagttcgtcggcatcctgccagattttccgtccccccgccttgcccagttgctggatggggttgccttcgagcatgtgggagaggaggacaacattgaagcggaagcccagcacactggcgccgcggacgctttcctgaacctttttggagagccgtgcaatgcgccgggaaatcacctcgtcgatgcctcccgccgccgcttccaagccttcttgcgctatttcgccgtgggggctgagcagcttgttttccagcagataggcggcgagttgttcggcattgaaaggattgccgcccgcgcaggcgtggaaggcggaaaaagcctcgcggggcaggcggggaaggcacagcagattgaggtagagcttgcggctggcgctggagttgagggaacccagggggaggctttccagtccctcttttccgaggctaagctccgcgggcagaatgttgttttcagtccgcgcggtagccagcagaaagaacgggcgcacgccgtgctgccaaagcagttccaggaattggtggctcagggtatcgagccattggatatcgtcgataaagataagcagcggggatttggagcacagccagcgcagatagtccagccacgcctgctgctgacggggcagcctggcttcgggggcgatcccgcgccagggcgagccatcccaggaaaggttcagcagcgaggcaagggcggcttcgcattcctgccccagcctggagcctctggtgcgcttgttccacgcttcgcggaaacgctgcaccgcctgagcgggagcctcgtcctccaaaagccccagactggcacgcagcaactgggttacgatgtccagagggaggggggaatcctgcctgcaagccagcagatacacctgctgccgcggggtttcaaaggcgcgcaaagcttcgcgtgccaatctgctcttgcccactcccgccgctccatgcaccaccattgcctgaggcgaggaggctgccaaaccttcgcgtatcttcctatgcagcagagcggtctccttctccctgccgatcatgcaaagcggttggcaggtaatcaattgtcccggcagcatgccaaggcggtaggctcggggagtagctcttgaggcggcttgctcccttttgagaggggtgaagatgaaggagttgtgctgttggttgcgcaggttgtggtcggcgagggcttcgccgggacgggcgagctccaggagcttctgggcgcgggtgatggcttcgcccgggaagaaggttgccttccacaggtctttgccagctaccatggagaagatatagccggtgcagcaggcggcgcgggctttgtggcgcgtgacggcttccaaagccaggcggcaggcgcgctgcattttattgaccttgttgtggggaaaatcgaagagcaggatggcatacaggcgtttattccgcacatagatggctgctaaaaaggcgtcgtagatcaccgccagcagttccaatgcctggatggttggctccagggggccgtccggaggctcgtccaggctgaggcagcagcaaacgctgtgccggacatcaggtgcgggattgagtctgtgaaagcgggaatgaatgaagtggtggccgtgttgcttgcccaggcgcttcctttccggcgtatccggcaactggggaaagggcggatgcactgcgtgctttccaggccggacatcagacccccagcccagtctgctcagggcttggggagagtaatagggttggttgggccggccggggttttcacgcaggacatccagttggggagaccagaacacatattcaaattgcagtgggttctcaaagattcgccaggacagtgtgccgaaacccacagccaggcggattacatccggcattccatgatgggggctggcgtagctgttgatcgcgctgatggtgtgattgatgcgtgccagcagcgccgcgatctgcaccggagtgctttccggcaacagggcgtggatgcagtttccctcatactggaagagcagtccgcctgagtgcctgatcatgctcagcatcctttcataggcttcggtggcggtggcttccatactgtcaatcacctgccgccgctgcttgagccttattcctttgatattgtaagtggcaatggtgcaaaagcgcagaatatagccggtgatctgcccttgcaggatgttttgctcatactgctgcaggatgtagctgggcaccatgcggttcatatctggctacctgcttttcctggcttgactaagctcctttctgcttacttatcccccaggctcagattggcgaaggcggtgagggtgatctccgcgtccgcgctttccagatagctgacgcgcgcctggtcgcccgcgcgggtgatgggcagacggctgctcaggttgctggaggcaataaagattttatccggcgcttccgccagggtgagatagtagtaggtgcgcccgtccgtggtatcagagccaaagcgggcgatggagcctgtgagggtggcctgcttgtccgctgcctccggcgatatccccgtccggctgccggccagggccatctgatagctgtcgcgcgcgctgcgcacgctttcacccactcccaccagggagaagtcacgcactgaaacgaagctgaacatcttgatcagtccggcgctgtccttgagggtcataaaataggtcggcttgccgttcatgttcaccaggatggggaaggtggcatagtatttaaagttttgcaccttgccttcggcggaacgcatggcggcagtctcggtggcgccggagaccagatagaggtggctgcttttgttgcgggtgtccgtgagcgcaaagcccaccgtcccctcgtccgagcccacgctggtgaggccggagtagaaatagctgcgctgatcgcggccatagatcacgttgtagccgggcgtcacccgcagcaggtcgcgcttgccgaacacgctgttccagaagccgtggacatatttgccccaccaggaaagctggggaagcacaaagtaggaaggctggatgcggtcaacccaggcgggaatcttgctgtcgtcatagatgccgccgctttttttgaggggaaagtatttgatctcacccgtgccggcatgcacgatggcgagtccggtggcttccggggcgttcacgccgatcttgtgggtgtaggtggttatcgtccagtagggttcgccattgtcgtccagttcaaaggtatcgcctgccaggccgatgcccgcgaagccgttccaccagagatggcggtagaggtcttgcccgaagaaggcattgctctgatagcggatttggatgggtttgcctttcagctcgcgcacaaaggtgatatcctgcggattggtggccgagaccttgatgtagcccggggtgcctttgcttgtgttggtgatccacttccagaagccgctgtgcagcagggggcagacccagaagagcttgccatccaccatctggatggtggggttgccgagcaccacccggctgccgagggcaaagtcctcgcccagcttcttggcggccaaatccttggcgaaagcggaatccaggatcggcacctgatccagattgaccggcgccacaaggtcggaaaactcggtcttttccacctcgccgatcatgcggcggtagctgccggaattgaagatgccggaagagaagaagggcgccaggatcagccacagcgccagaaggggatagaccacatagagtatcttgcgcaggcgccggattgccagcagcggagccaggcagatcatcagggggacgatccagtccaaaaaacggatatgcaacaccggaagcacaaagtaaagcataaaacccagcagcagaatggccagcactatggcaggcagggctttgatcctgagcttgggaaactgaatcacgacaggtttgggcgtttgttgttgaaacatggtaacctccctgaactaagctttgttttgatactatgccagatggcggcggatttgtcaagccggaatcgtggccgcctccactggcagaatggaaaaaagtggactcggctcgaacggcaccctatccttgcggatacagaggcgcgaccgcccgctcaaacactccctgaaccttggaaatagccagcccgtaattggtgatcggcactccgcgccgctgggcttccacgatgcggcggctcatctccatctggttgagcatgcaagccccgcagtggatcaccagcgcgaagtcctccagattgggcgggaagtcgtgtcccgcgtacacttcatactccagttccttgcccgtgaactggctcagccagcgcggaatcttcacccgcccgatgtcgtccgcctgcacgtggtgggaacaggcttcggcgatcaggatcttgtcgccgtcgcgcagcttgtcgatctgcctcaccccttccgccaggacgtccagatcgcccttgtagcgggcaaagaggatggaaaaggtggtcatcttcacctcggggggcaggtcattcaccaccttcagcaccacctgcgaatccgtgatcaccagatcaggcggttccttcagggtttgcagggcataggccagttcccgctctttcaccaccgtcaccaccgcgtcgtgatccagcagttcgcgaatcacctgcacctgcggcaggatcaggcgtcccttgggcgcggcgaggtcgatgggagtcaccagcagcaccctgtccccggccttcaccaggtcacccgccagggggcgttcctccagcagatgggcgggcgccagcttgatcagcagttccttggcggcgtcgatgttttcccccttgagggcggagacggagacccagggcaggccccgttcctcgcaccaggcgatattggcgggggcaggctcgcgcagatccctgtggttaaagaccattaaaagcggtatcttcatctcgcggatgcgcttcagggaggacagctcgctctccgcgaaggggcggccatcgttcacaaacacggctatgtccgtgcggtaaagtatcttataggtggcgagcacccgtttttcgcccagttcgccgctgtcgtccagtccggcggtgtcaaagaaggtcaccgggcccaggggcagcagttcatagcgtttgtccaccgggtctgtggtggtgcccggggtgctggaaacgatggcgatctcctgtcctgccagggcgttgatcaaggacgattttccggcgttgcggttacccaacagggtgatgttgacgcgttcaccgcggggtgtgctcatctatcttctcccaaaaagtcttgcggctcgcggccgctaatagcttttattatcagttctttcatgtttctttccttgtcgggctggataccagcccatgtaaaataatatatgtgaaaagcgtaaatctgtcaagcaaagagaattctggcagacggtagccagtgcccaggggtggcaaagtccgtttgccacagagaccggaggtctcttccaaacaggcaactccgttgcctctgccgaacagacttcggcagcccagaaacaaagcacaactgaccaaaaaacgtgtcatcacggcctgcgagccgtgatccagtcttttaaaatatccacaaattacacaaattaacacgaattatcagaagtggaaaggtggaatggtgaaaaggttcccccgtaacaagtcccaccaagctatacaccgtgtcatcacgggaagtcggggccccctctggggtggcttacccgtgatccagtcttttagaaacaaccacccaaccccgaaacagaccatcgcagacaaaaaaaccgtgtcatcccgggcagcgacccgggatccagtcttttcggaacaaccacccaaccccgaaacaaaacataccagaccaacaagcgtgtcatcacgggcttgacccgtgatccagtcttttcggaacaaccaccaaaccccaaaacagaccacgacagacccaaaaaccgtgtcatcacgggcttgacccgtgatccagtcttttaaggaacatccgcgtaaggttataaaaaaacagccaccatttcacctttccacctttccacctcaaaacacctttccaccaacaatccccccatatatataggtgctacgaccccttaatgccaggcgggaagcggaacccagggcaagtatataaatatacttgcccataattgcgcggccatgagctggctgtcctccatttcccctcgcgcgcgggtggctctcatttgcatccgtcgttttggcgtgagtcttccttaggtcatccttataatttataaggatgacctaaggaagatggcttaacctcctgtggcagtgaaggatggcgctatgaaggatattgcggaaggtacaggtttatttatgcggttgtcaaggaattgatgccggttgtttccagactggctggttattttaaaagactggatcacgggtcaagcatgcgcttgcccgtgatgacacggttttggggtttggtggggcttgttttgggctgcgtccacaatcaacacggcaccacgagagtctatctggggctcctttccaccatttcacctttacacggatttcacaagagaatgtcagatcacaaatagcataaaacagcttgatgaaagcgaattggtatgagccgtgatccagccttttagaagcaaccacccagccccgcaacaaaccactatcagaccaaaaagcgtgtcatcacgggctgtcggggtccccgccaaagcgcgcagcggtttggtggggtgacttgacccgtgatccagtctttcagaaacaacggattacaatgatatagataaatgaacgggcagccgcccttccaagtccgataactaaagaaccgccgcgcattacacacggcggttctttcccgcaaatgggttcaaaaggcgtttccgcctcagttcagagcgcttacccgatagaacctgaacgagttgcccgcctggatttcacaactgaccaggccgtcgccggcggtggggtcgtggacggcggatgtcagcacggtaaagggcccggtgggagccggagccgaataaacgcggtaaaatacggcgttgggcacttctgtccacgtcaggttcagggctgaaactccctttgtgaaggaaactattaccggcgaggtcaaagccgaaccctcgccaaagatgatctgcctgccccagacaccgtccagatatggccgccagatgccgatttggtatgggttgacagtttggttggtcaccagattggcgttggcgaggctgccattgaaataccattgcgccgggcccagttcggagaccagttggcagccctgttcggtgttgatggttcccgcgttgcgcacatattgatcggttgtgccgttcaccagtagccggcgaacgccgatcgtcccgtaattatagaggtcgccgcggatctgggtttcaagatatcctccgtgggtatggctccggatcgtgccatagttttccaacttctgggtaacgctgaaggtcgggtaatagttcatataattgaacagggtggcgttattgatgagtgttcccaccgtgacggtccctatcagtgcgaactcgccgtaagtgattatatggtcggcactgacgttttccaggtagacactgttcagattcagggcgccgcttgctccgcccgagatggccgcgttccggatgcttccgccggactggttgagcgtgaaacattcatccgcggcattgtagagattgatctggttgccgctgaaatcgatggtggtgccgctgaacctgaggttggaaatcaatcgggcgggccctgtggaactggaagtaaagttggtgcaggtgatcgccggagcgtccgtgctctgccagaggtggtggatttgcgatcctgccaggtgggtcaggtggttgttgagcgtcccgtaattgtagatgccgccgtaaagggtaagttctaaacgtgctccatgggtatggttccggatcgtgccatggttgtccagccgctccatgacgctcaggtatcctatttggtctattttattatagacctcgccgttgttgatcaggtgtccgacattcaggttgcctgcgatttccaccataccctgcaatacgatctcgtccgccgctgaattcttcaggaagaaaccgtcgtggcaagtgatgctggctccgttgccgcccacgatctgggcgtcctgcagaaacgtcatgccaccatatccatagcagattatatggtggacggaactgccgttcagcacaagggaggcgttgttcatcctgatgctggcgcctgacgagaccaccagatccgtatccaataccaaggggctgccggaataaagatcctctaagaaggtcgggcagaaagtccctgaattgctcagatgctgtgcgttcatcccgctcaggttcagatgccagggtgtcagggagccagaattggtaatggcgttcgccaccgtgaccgtaagggttcccggatagtagccccaacgatagctggtggttgtgccgtgatttgtcaggctgccattgactatgacctcggtttgggagttaccccccgggttcaacaaccatccggtaccactgaccgtcaggttggcgcactgatggggagaacccgtggtgtccgcgtaaacggtgctgttgataactacatcatccccggagttgggcacccttccgccagcccaggccgcggggtcgctccaatagccgccggcatctgaagaatagacggtcagggccatgatctggcccagtaaagaaagtaaaaacaatactgctaaagcgtttttcataataaactcctttggttggctttcatagacaggctgtttaattacgtcaagagaattgttgagcccgtcacgattgactcagggtcttgtcgagacaacaatgcttccaggtcattttgtcaggcataatgccgtccatgctgaatgattcattgttaatgtccgggcaaatcgacagagtgacggggtttgaggttttcggtggcgggtttatatagggagacctccctaatttgattattcccgccctaataatcactcaaagcaaatatcttgacaatgatctttattcataatagaaggtttccattgagcaaatggagcatattatgtacaatcttctttgtgataattgggtaaatgtgatctatctttcgggcaaaccagatagaatatctttagtgcagactcttaaagatgcacacaatctgcaactggcatacagcaaccccatggacaggtttgctgtcttcagattcctgcttgctcttggctactggtgtttcgctaacaccaacgaggcccctgaacctgataagccgcttccggtctcctggataccctggctggaggaaaacaaggagtatttcgagctctttggggatggcccccggttttaccaagacaatccaagttccaggatcagagccattaccgaccttattcatgagataccaacagctcataatctatgccatttcaatcatgtcaccgactatatcgatgggctctgcgaagcttgctgcatcaagggactgctgagattacctgtctttaccactgtcggtggcagagggataggtgcgggaatcaacaacactcctccattttacctgctctggcatgcaaatgacctcgctggcatgctggctcataattggcaaccctgggataatatggggattccggcatggttgggttcttttcaaaaagaaagcaaggaagtgggcttacttgccggaatgacctggctgccgcgcaaggtgcatctgcatgatcccgtcccaggtcaggcagcatgtagttcctgcggcttaccctccgaagctctcgtctattcctgcagcatagaagtggagccagtaccggaaggccttgagtggaaagaccctcatggtgtttacaccgatctgaaaaaaagcctccagtccaaaatcaaactgatgtccaatgatagatacactttcgcggaccgggattggtatagtccgctgttcagctatttgcgcgcggaaggaaactccagaaaaggaaaactctggttggttggatttgccagtgataaagcaaaaagcatagacatctgggacaagatcatcgagtttgagggaactgatacaaatgatgagttgctggctcaattggcaaacagggctactgcccttaatatcatgcgcaagatatctctcagaggtgatttcaaaaagtcagtgggcacaccccagattgctgacattatcccccacgccgaaagcagaattgccatcaatgcgggtaaaatgactgagaacaggggctattcctggcaggatgccgatgctgaatacagagaactgctcacaaaggttgcgtgctctttggagccggctcaaacagtggacgccaggctcaagagaggtaaattcatttcccgcaagccctggccaattataccagaatccaaaacaaaacccgcagagggggaccaaaatgaatagaggaacagttgacttcattacaagcctggagaacctcaaagaaggcgatttgggcattcttagaaaactcaggggagcccggcttgatgaagagcttcccggatttgacctttttacagccctctggtggcctttgcggcaaaagaatcaacgcgcccccaagcgtgaagtggcttggttgatcgccaaactttttgctgaattccgctttgaacagcgcgaggaagccactttgcccatacttatgggaagcatttgccggaaacttggaccaaaaaaggaattaccccgtgtactggcacgttttgatcaacttgcatcgcttgacattatgcatatggaagaaccgctgttggtcatcatgggtattttgcgaaagcaccagcaggtctactttgactgggtagatctgacagatgttctgtcattttgggagcaggagactgtcaaaagagaatggtcggattcatttactaaagcatacaagatcaacaaggaggattcagatgttgattgaaattcatatgattcagaatcacagcccggcaaatcttaaccgggacgacttgggcgcccccaagacctgttatttcggtggagtattacgttcgcgcatctccagccagtgcatcaagcgcagcatccgttttgccccggagttcgcagaccttagaggaggtatccgaacaaggcgtctggcagagaaacttgaggaaatgctggaaaacaaagataagaagctggttgcaaagttcctggaagcctgtggagttaaaaccaaatcttccaagaaagctggaaaaaagtccgaacagatacccgcggaaaccgatgaagctcaggaagagcagcaggcggctgatacgtcggatatgctgatttttaccacctatgatgccctacgccaaatggccgtcctgctttccaactccaatctcggtgaaagtgaaaaactgcttgggtttaaggaactacttacaaactgcgtccattctcctgatatagcactttgcggcaggatgttggagaccaaagagcttaaaaacactggcgtggaatgcgctttgcaggttgcacatgcgctttccacccacattgccaggccggagatcgactactttgtagcggccgatgatgttcctggtgaagacgccggagcgggtcatattggcgaatccatgtttgcctcagcctgtttctacaaatacttctccattgattgggagcaattggtcaagaacctgaaaggagacactcatctggcagcccacaccgtgggtgcctttctcctcgccgctgccaaaaccaaccccagtggcaaacagaacagcttcgccgctcataacttgccagatggcatacttgtcgagttcaaaaattcccctattagctacgccaacgcattcgtcaggccagtttccctggtcaaggattcggacctggtggagcaaagcatcggccagctttccaactacgtgaacgacatcaggcttggctattatgatgagcaatccccagttatcagcttctggttttctccaaacaatcgctattcccttggcaaagagcatcccaaactggcctccaggagcattggcaacctcaatgagcttgtaagcgccgtgttggattatattggcagcttcgagtgggaagaagttcggaaaagcaaggcttatgttggcgggtgacatgagtgctccacccaataccttattcttgcgcttggagggggctttgcagtcctggggcagcaacgaggctaagtttgctttgcgcaggactgccgacgctccgacaaaatctggtgtcctgggactgctctgcgcggcaatgggaattgggcgcgcggaggctgctgattcatggctcccaaaacttgccaacctgcgcatgggcgtgcggatagaccgccccggcatacgctggtgggatttccacactgtgggcgcgggacaaagaatgcgcatggcagagctgaaggcacccaagaaaccttccatggttggagcggccctggctgagaccttgacaccaaacaaaatacaaaccagggcagagactttgctctcacgccgcgaatatcttgccgacgccagttttctggtcgccttgcaaggtgagccggaacttgtggaaaagctctccaccgctctggccaagccggtctgggctatttatctggggcgcaaatcctgtcccccttcacgtcccgtaggcgagcatcctccgggcttttacaacactttggaggaggcgctgtccgcggttcccctgcaaaagcgctggcacaatgaacccctgccgcaaacactgccttgcgtcatggactggattcccagccgtgacggagaacatgcacctgatgacgcagagattcattacgatctgccggtttcttttcagccgcccagacatttgccgcgcttcgtgatcaggcgtgagctgtttgtgggagaggatgtgcaagtgagcagggaaaccggaaccaacgtttggaggcccaaaggaacccgggcggattatagcaattccgagtataagaaggtcagggcggagcggcttgtgatggatcatgccgcgtgcatggtgtgcaaagctcctgccacgacagttcaacacgtggattaccgcagggcgggaggcaaggaagtaccggaagatctgcgggcgctgtgccgcctctgccacgacgcctgcaccatgctggaatacggttccggcatgaccaccgatcgcatcgacccctgcgaccccatctggcgggagcgtattttgtcaaagcgcaaagaaatagtcgagttccgttcgcgcgggcagcgtttccgcaaaatgaaaccagaggaggaagacggatgatctacttgtccaggctattgatcgatactggaggcaatccagaccgcccccgccccggcagaaagtggctggacaatgtctataacgtccaccgccgcctctccatggcgtttccttcaggtttacgccgggagcaggatccgcatttcctgaagcccttttcgccaaacgacttccaaaaaactcccttccttttccgggtcgataacaacatcgacggaaacgataaaagggcgattattatcgtccagtccgttcttgagccggattgggattattgcttccaaaacgcgcttgatttcctggccgcgccgccggaaacaaaggagtataatccagagtttaaagcgggacaactgctgcggttcaggctgcgggtaaacgccagcgtacgccgtcatattcctgaaatggtgcaacaggacggtcaaaccatagaaactggcaaaatcctgcacaaaagggtttctcttacctgggatgcttcttccaccccggatcaggcccttgccgactggctggctgccaaaagcccaaagctgggcttcacccttcagcgctgtgagcttcttcaactgggttgggtttatggctccaagccagaaccaaaaaatgtcaaagtaaaggaacaggggcagggctactggcgtgaacacacatacaatcctctgcgcttccgtgcggctctcctggagggagttctcgaggtggatgacccgaaactgttcctggaaacgcttagcagcggcattggaaaagcgaaaagtttcggctttggcctgctgtcagttctgccaatcaggaatgatggataaagacctgcactctattccccggatcagagaccggcttagctatctctatgtggagcatgccaaaattgaccagaacgggcaagccatcgccattcacgacgctctgggtgaaaccccggttccttgtgccggcttggctatgctgatgctgggaccgggcataaccatcacacatgcggcaatactttcactggctgcctgtggctgtctcgtagcctgggtgggagaacatggcgtcaggttctatgccgcaggcacaggtacaacccgcagcgctgtcaatcttatgaaacaggcaaagtactgggcagacccggttttgcatctacgggttgtacgcgccatgtaccagttaaggtttcaggatgagctttctccagatttaactttgaaccagatcaggggcaaggaaggtgcccgggtgcgcgatacatatttccaactctcccaaaagtatggtgtgcccatgcagggcagaaactatcaaagagacaactggaataaagcagaccccataaaccgggctttatctgtggcaaactcatgcctctacggcatatcgcacgctgccatcgttgctgcaggattctctcccggattgggctttgtccacactggcaagcaactgtcatttgtctatgatatcgcggatctatacaaaatggagatggctgctcccgccgcattccgggcgaccgctgaagggatcggcgaactcgaccgcagagtcaggcttgcctgccgtgatgaattccacaggcagaatctactcaaacgcattgtcgctgacattagttctctcttcggtgatattatgccagaggatagcccggatgactgttttgccgaagaaccagccttgcctggaggactctggtctccagatggagaagtttccccaggcggcatatcttacgggcaggatgatctgccaaaggaagattgatggtggttttggttttggaaaacgtgccaaactccttgcggggtcagatcacacgttggctgctggaagtaaaggcgggggtgtttgtgggtaaagtctcagcaatggttagggacaaactgtgggataaggttagaagcaattgcagcggtgggacttgcctgatgatctggagtagccaggccgaacagggttttgatatcgaattctggggtgccgcatcaagagtcgttacggaatgggagggtatcaaactaatgaccaaacatccttgaactaaggcttgaaggagctcaatgacctgttagctctctattgatcaagtgtattccccacgcatgtgggggtgaaccgaagctccgcgcctccatcatgagccacgttacgtattccccacgcatgtgggggtgaaccgagatctcgctcatccacggctgggtggaagatgtattccccacgcatgtgggggtgaaccgccgctgcagaacatctttggcgggcaactggagtattccccacgcatgtgggggtgaaccgaaccgggtgacgtggctgatgccgatcaaccagtattccccacgcatgtgggggtgaaccggaacagctcaagacgcgcaactacaaggtcgggtattccccacgcatgtgggggtgaaccgaaccgggtgacgtggctgatgccgatcaaccagtattccccacgcatgtgggggtgaaccgcaataaaaagaagcactctacgaatgagatgagtattccccacgcatgtgggggtgaaccgacgcctataccggcccccgcgcccgcgccctcgtattccccacgcatgtgggggtgaaccggtggattaaaaacaattgattctttatcagatgtattccccacgcatgtgggggtgaaccgaaaacgatggttactactgtgttgatagctatgtattccccacgcatgtgggggtgaaccgaatctggctcttgtcggaacctccgcctttccacctaaaaaacacctttccacgaactattaattcgtggataactctaaaagtccaacctgcttcagccccaatatttgcggtcgaggctgcggtattggatggcttcggagatgtggtcggatttgatggcggccaggccttccaggtcggcgatggtgcgcgccaccttgaggatgcggtcgaagacccgggcggaatagcccagtttgtcgatcgcgtgctgcatctggctttggctgggggcatccagcgcgcagtgtttgcgcagcagtttggagttcatctgggcgttgcagaagatgccatctttggcatagcgttcccgctggatggcgcgggcgcggttgaccctggcgcggatgtcggcggagctgtcgccggaaggcaaagacgccagatcggaataggtgaccgagggcacttccacgtggatgtcgatgcggtcaagcagcgggccggagatacggctgcggtagcgttggatggcgccatattcgcaggtgcaggggtgattggggatgctggagccgaaatagccgcagggacaggggttcatggaggcgatgagcatgaattccgcgggaaaggtgaggctttgggaggcgcgggagatagtgacgatgccatcctccaggggctggcgcagcacttccagcacgccacgcttgaactctggcagttcatccagaaacagcactccgcgatgcgccagggatacctcgccggggcgggggaaggctcctcccccgatcagggcgatatcgctgacggtatgatgcgggctgcgataggggcgggtggtgaggatgccgttgtgaaaatctttggagtggcctgccacggagtggatcttggtagcttccagggcttcatccagcgagagttccggcaggatggtgggcacgcgccgggcgagcatggtcttgcccgaaccgggagggccaagcatcagcaggttgtggcctccggcggcggagacctccagggcacgcttgacctgaaactgacccttcacgtcgtgcatatccacgggaaaggcattcagggtggcaaagatctgctcgcggtcgacttctgcgggcggaatcttcgcctcgccgcgcagaaagagggccgcttccttcagcgaggtgaccgggatcacctgcaagccgtcgatgatggcggcttccccggcgttttcccagggcaggacgagggtgtcgatgccatcccgtttggcggccaaagcgatgggcagcactcccttgacggggcgcaggttgccatccagcgaaagctcgccgatgagggcggtcttggtcaggtattccaccggaatctgtttgatggactgcagcacggcgatggcgatggggaggtcgagggcggcgctgtccttgcggatgtccgccggggcgaggttgatggtgaagcggcgcacggcggcgtcccaaccggaattgcgcagggcggcgaagatgcggtcctggctttccttgaccgcgctggatgccatgcccacgatggtgaccccgaaaacctgagaggtggcgtcacactccactgtgagctgttgcccgtctattcctatcgtggtgtaagtgcgcactattccaaccatttgatcctacccttgtttggtattttgcattgtttgtcagtaaaatagcggtcggcgcaacggtcaagggaaaagtgcgggagggggtgttgattgtccacgaattacacgaattattagacgtggaaaggtggaaaagtgttttgaggtggaaaggtggaaaggtgaaatggtgaaatgaggtgtcctgaaacaagtcctcaaccaagctatatactgtgtcatcacaggcaagctcgcttaccacaggatccagtctttttgaataatcatccacaaattacacaaattaacacgaattaaaggaacagaataaggacaagcgtccagcctaaaaacaagcacagaccccaaaacaaacaccccctgactaaaagccgtgtcatcccgggcagccggtgcccctctagggtggctgacccgggatccagtcttttagaaacgtccacaaattacacaaattaacacgaattaaaagacagaataaggacaagcgtccagcctaaaaacaagcacagaccccgaaacaaaccacaccagactacatactgtttcatcccgggcttgacccgggatccagtcttttagaaacgtccacaaattacacaaattaacacgaattaaaagacagaataaggacaagcgtccagcctaaaaacaagcacagaccccgaaacaaaccatacaagactacatactgtgtcatcccgggcttgacccgggatccagtcttttagaaacaaccagccagcccgtaaacaaacaaccccagactaaaagagtgtcatcacggcctgcgagccgtgatccagtcttttagaaacaaccagccagcccggaaacaaagcacccccagactacacaccgcgtcatcacggcctgcgagccgtgatccagtgtccaggggtggcaaagtccgtttgccacagagaccggaggtctcttccaaacaggcaactccgttgcctctgccgaacagacttcggcagccctttaatcacacaacttccacctttccaccaattatccccccacatatataggtgctacgacccctttatcccaggcaggaagcggttttcagggcaagtatataaatatacttgcccgtaattgcgcggcaatgtatcggcctcttccctttccctgcgggtgggtggccctcatttgcatcaccctctccggcgtgggtcttccttaggtcaaccttataatttataaggatgacctaaggatgattagctaagctgttgatggtgcgaatgatagcaacatgggagggacagaaaagtgtatcttggagtttgcccgttgctttccgggctggctggtcgtttggagttcaagccggcaaggaaagctgtatagattcccccaatccaaaagccggctcggacttcaaacgaccttgaaaagactggatcacggctcaagtcaccccaccaaaccgctacgcgtttcggcggggaccccgacaggccgtgatgacacggtgtggagtctggggtggtctgtttttgggctggctgaaaagccttc

SEQ ID NO: 987 - DNA, 113603 bp, Artificial Sequence
  Synthetic Oligonucleotide
  misc_feature (1)..(92272): n is a, c, g, or t
nnnnnnnnnnnnnnnnnnnnnnnnnnnnnnnnnnnnnnnnnnnnnnnnnnnnnnnnnnnnnnnnnnnnnnnnnnnnnnnnnnnnnnnnnnnnnnnnnnnnnnnnnnnnnnnnnnnnnnnnnnnnnnnnnnnnnnnnnnnnnnnnnnnnnnnnnnnnnnnnnnnnnnnnnnnnnnnnnnnnnnnnnnnnnnnnnnnnnnnnnnnnnnnnnnnnnnnnnnnnnnnnnnnnnnnnnnnnnnnnnnnnnnnnnnnnnnnnnnnnnnnnnnnnnnnnnnnnnnnnnnnnnnnnnnnnnnnnnnnnnnnnnnnnnnnnnnnnnnnnnnnnnnnnnnnnnnnnnnnnnnnnnnnnnnnnnnnnnnnnnnnnnnnnnnnnnnnnnnnnnnnnnnnnnnnnnnnnnnnnnnnnnnnnnnnnnnnnnnnnnnnnnnnnnnnnnnnnnnnnnnnnnnnnnnnnnnnnnnnnnnnnnnnnnnnnnnnnnnnnnnnnnnnnnnnnnnnnnnnnnnnnnnnnnnnnnnnnnnnnnnnnnnnnnnnnnnnnnnnnnnnnnnnnnnnnnnnnnnnnnnnnnnnnnnnnnnnnnnnnnnnnnnnnnnnnnnnnnnnnnnnnnnnnnnnnnnnnnnnnnnnnnnnnnnnnnnnnnnnnnnnnnnnnnnnnnnnnnnnnnnnnnnnnnnnnnnnnnnnnnnnnnnnnnnnnnnnnnnnnnnnnnnnnnnnnnnnnnnnnnnnnnnnnnnnnnnnnnnnnnnnnnnnnnnnnnnnnnnnnnnnnnnnnnnnnnnnnnnnnnnnnnnnnnnnnnnnnnnnnnnnnnnnnnnnnnnnnnnnnnnnnnnnnnnnnnnnnnnnnnnnnnnnnnnnnnnnnnnnnnnnnnnnnnnnnnnnnnnnnnnnnnnnnnnnnnnnnnnnnnnnnnnnnnnnnnnnnnnnnnnnnnnnnnnnnnnnnnnnnnnnnnnnnnnnnnnnnnnnnnnnnnnnnnnnnnnnnnnnnnnnnnnnnnnnnnnnnnnnnnnnnnnnnnnnnnnnnnnnnnnnnnnnnnnnnnnnnnnnnnnnnnnnnnnnnnnnnnnnnnnnnnnnnnnnnnnnnnnnnnnnnnnnnnnnnnnnnnnnnnnnnnnnnnnnnnnnnnnnnnnnnnnnnnnnnnnnnnnnnnnnnnnnnnnnnnnnnnnnnnnnnnnnnnnnnnnnnnnnnnnnnnnnnnnnnnnnnnnnnnnnnnnnnnnnnnnnnnnnnnnnnnnnnnnnnnnnnnnnnnnnnnnnnnnnnnnnnnnnnnnnnnnnnnnnnnnnnnnnnnnnnnnnnnnnnnnnnnnnnnnnnnnnnnnnnnnnnnnnnnnnnnnnnnnnnnnnnnnnnnnnnnnnnnnnnnnnnnnnnnnnnnnnnnnnnnnnnnnnnnnnnnnnnnnnnnnnnnnnnnnnnnnnnnnnnnnnnnnnnnnnnnnnnnnnnnnnnnnnnnnnnnnnnnnnnnnnnnnnnnnnnnnnnnnnnnnnnnnnnnnnnnnnnnnnnnnnnnnnnnnnnnnnnnnnnnnnnnnnnnnnnnnnnnnnnnnnnnnnnnnnnnnnnnnnnnnnnnnnnnnnnnnnnnnnnnnnnnnnnnnnnnnnnnnnnnnnnnnnnnnnnnnnnnnnnnnnnnnnnnnnnnnnnnnnnnnnnnnnnnnnnnnnnnnnnnnnnnnnnnnnnnnnnnnnnnnnnnnnnnnnnnnnnnnnnnnnnnnnnnnnnnnnnnnnnnnnnnnnnnnnnnnnnnnnnnnnnnnnnnnnnnnnnnnnnnnnnnnnnnnnnnnnnnnnnnnnnnnnnnnnnnnnnnnnnnnnnnnnnnnnnnnnnnnnnnnnnnnnnnnnnnnnnnnnnnnnnnnnnnnnnnnnnnnnnnnnnnnnnnnnnnnnnnnnnnnnnnnnnnnnnnnnnnnnnnnnnnnnnnnnnnnnnnnnnnnnnnnnnnnnnnnnnnnnnnnnnnnnnnnnnnnnnnnnnnnnnnnnnnnnnnnnnnnnnnnnnnnnnnnnnnnnnnnnnnnnnnnnnnnnnnnnnnnnnnnnnnnnnnnnnnnnnnnnnnnnnnnnnnnnnnnnnnnnnnnnnnnnnnnnnnnnnnnnnnnnnnnnnnnnnnnnnnnnnnnnnnnnnnnnnnnnnnnnnnnnnnnnnnnnnnnnnnnnnnnnnnnnnnnnnnnnnnnnnnnnnnnnnnnnnnnnnnnnnnnnnnnnnnnnnnnnnnnnnnnnnnnnnnnnnnnnnnnnnnnnnnnnnnnnnnnnnnnnnnnnnnnnnnnnnnnnnnnnnnnnnnnnnnnnnnnnnnnnnnnnnnnnnnnnnnnnnnnnnnnnnnnnnnnnnnnnnnnnnnnnnnnnnnnnnnnnnnnnnnnnnnnnnnnnnnnnnnnnnnnnnnnnnnnnnnnnnnnnnnnnnnnnnnnnnnnnnnnnnnnnnnnnnnnnnnnnnnnnnnnnnnnnnnnnnnnnnnnnnnnnnnnnnnnnnnnnnnnnnnnnnnnnnnnnnnnnnnnnnnnnnnnnnnnnnnnnnnnnnnnnnnnnnnnnnnnnnnnnnnnnnnnnnnnnnnnnnnnnnnnnnnnnnnnnnnnnnnnnnnnnnnnnnnnnnnnnnnnnnnnnnnnnnnnnnnnnnnnnnnnnnnnnnnnnnnnnnnnnnnnnnnnnnnnnnnnnnnnnnnnnnnnnnnnnnnnnnnnnnnnnnnnnnnnnnnnnnnnnnnnnnnnnnnnnnnnnnnnnnnnnnnnnnnnnnnnnnnnnnnnnnnnnnnnnnnnnnnnnnnnnnnnnnnnnnnnnnnnnnnnnnnnnnnnnnnnnnnnnnnnnnnnnnnnnnnnnnnnnnnnnnnnnnnnnnnnnnnnnnnnnnnnnnnnnnnnnnnnnnnnnnnnnnnnnnnnnnnnnnnnnnnnnnnnnnnnnnnnnnnnnnnnnnnnnnnnnnnnnnnnnnnnnnnnnnnnnnnnnnnnnnnnnnnnnnnnnnnnnnnnnnnnnnnnnnnnnnnnnnnnnnnnnnnnnnnnnnnnnnnnnnnnnnnnnnnnnnnnnnnnnnnnnnnnnnnnnnnnnnnnnnnnnnnnnnnnnnnnnnnnnnnnnnnnnnnnnnnnnnnnnnnnnnnnnnnnnnnnnnnnnnnnnnnnnnnnnnnnnnnnnnnnnnnnnnnnnnnnnnnnnnnnnnnnnnnnnnnnnnnnnnnnnnnnnnnnnnnnnnnnnnnnnnnnnnnnnnnnnnnnnnnnnnnnnnnnnnnnnnnnnnnnnnnnnnnnnnnnnnnnnnnnnnnnnnnnnnnnnnnnnnnnnnnnnnnnnnnnnnnnnnnnnnnnnnnnnnnnnnnnnnnnnnnnnnnnnnnnnnnnnnnnnnnnnnnnnnnnnnnnnnnnnnnnnnnnnnnnnnnnnnnnnnnnnnnnnnnnnnnnnnnnnnnnnnnnnnnnnnnnnnnnnnnnnnnnnnnnnnnnnnnnnnnnnnnnnnnnnnnnnnnnnnnnnnnnnnnnnnnnnnnnnnnnnnnnnnnnnnnnnnnnnnnnnnnnnnnnnnnnnnnnnnnnnnnnnnnnnnnnnnnnnnnnnnnnnnnnnnnnnnnnnnnnnnnnnnnnnnnnnnnnnnnnnnnnnnnnnnnnnnnnnnnnnnnnnnnnnnnnnnnnnnnnnnnnnnnnnnnnnnnnnnnnnnnnnnnnnnnnnnnnnnnnnnnnnnnnnnnnnnnnnnnnnnnnnnnnnnnnnnnnnnnnnnnnnnnnnnnnnnnnnnnnnnnnnnnnnnnnnnnnnnnnnnnnnnnnnnnnnnnnnnnnnnnnnnnnnnnnnnnnnnnnnnnnnnnnnnnnnnnnnnnnnnnnnnnnnnnnnnnnnnnnnnnnnnnnnnnnnnnnnnnnnnnnnnnnnnnnnnnnnnnnnnnnnnnnnnnnnnnnnnnnnnnnnnnnnnnnnnnnnnnnnnnnnnnnnnnnnnnnnnnnnnnnnnnnnnnnnnnnnnnnnnnnnnnnnnnnnnnnnnnnnnnnnnnnnnnnnnnnnnnnnnnnnnnnnnnnnnnnnnnnnnnnnnnnnnnnnnnnnnnnnnnnnnnnnnnnnnnnnnnnnnnnnnnnnnnnnnnnnnnnnnnnnnnnnnnnnnnnnnnnnnnnnnnnnnnnnnnnnnnnnnnnnnnnnnnnnnnnnnnnnnnnnnnnnnnnnnnnnnnnnnnnnnnnnnnnnnnnnnnnnnnnnnnnnnnnnnnnnnnnnnnnnnnnnnnnnnnnnnnnnnnnnnnnnnnnnnnnnnnnnnnnnnnnnnnnnnnnnnnnnnnnnnnnnnnnnnnnnnnnnnnnnnnnnnnnnnnnnnnnnnnnnnnnnnnnnnnnnnnnnnnnnnnnnnnnnnnnnnnnnnnnnnnnnnnnnnnnnnnnnnnnnnnnnnnnnnnnnnnnnnnnnnnnnnnnnnnnnnnnnnnnnnnnnnnnnnnnnnnnnnnnnnnnnnnnnnnnnnnnnnnnnnnnnnnnnnnnnnnnnnnnnnnnnnnnnnnnnnnnnnnnnnnnnnnnnnnnnnnnnnnnnnnnnnnnnnnnnnnnnnnnnnnnnnnnnnnnnnnnnnnnnnnnnnnnnnnnnnnnnnnnnnnnnnnnnnnnnnnnnnnnnnnnnnnnnnnnnnnnnnnnnnnnnnnnnnnnnnnnnnnnnnnnnnnnnnnnnnnnnnnnnnnnnnnnnnnnnnnnnnnnnnnnnnnnnnnnnnnnnnnnnnnnnnnnnnnnnnnnnnnnnnnnnnnnnnnnnnnnnnnnnnnnnnnnnnnnnnnnnnnnnnnnnnnnnnnnnnnnnnnnnnnnnnnnnnnnnnnnnnnnnnnnnnnnnnnnnnnnnnnnnnnnnnnnnnnnnnnnnnnnnnnnnnnnnnnnnnnnnnnnnnnnnnnnnnnnnnnnnnnnnnnnnnnnnnnnnnnnnnnnnnnnnnnnnnnnnnnnnnnnnnnnnnnnnnnnnnnnnnnnnnnnnnnnnnnnnnnnnnnnnnnnnnnnnnnnnnnnnnnnnnnnnnnnnnnnnnnnnnnnnnnnnnnnnnnnnnnnnnnnnnnnnnnnnnnnnnnnnnnnnnnnnnnnnnnnnnnnnnnnnnnnnnnnnnnnnnnnnnnnnnnnnnnnnnnnnnnnnnnnnnnnnnnnnnnnnnnnnnnnnnnnnnnnnnnnnnnnnnnnnnnnnnnnnnnnnnnnnnnnnnnnnnnnnnnnnnnnnnnnnnnnnnnnnnnnnnnnnnnnnnnnnnnnnnnnnnnnnnnnnnnnnnnnnnnnnnnnnnnnnnnnnnnnnnnnnnnnnnnnnnnnnnnnnnnnnnnnnnnnnnnnnnnnnnnnnnnnnnnnnnnnnnnnnnnnnnnnnnnnnnnnnnnnnnnnnnnnnnnnnnnnnnnnnnnnnnnnnnnnnnnnnnnnnnnnnnnnnnnnnnnnnnnnnnnnnnnnnnnnnnnnnnnnnnnnnnnnnnnnnnnnnnnnnnnnnnnnnnnnnnnnnnnnnnnnnnnnnnnnnnnnnnnnnnnnnnnnnnnnnnnnnnnnnnnnnnnnnnnnnnnnnnnnnnnnnnnnnnnnnnnnnnnnnnnnnnnnnnnnnnnnnnnnnnnnnnnnnnnnnnnnnnnnnnnnnnnnnnnnnnnnnnnnnnnnnnnnnnnnnnnnnnnnnnnnnnnnnnnnnnnnnnnnnnnnnnnnnnnnnnnnnnnnnnnnnnnnnnnnnnnnnnnnnnnnnnnnnnnnnnnnnnnnnnnnnnnnnnnnnnnnnnnnnnnnnnnnnnnnnnnnnnnnnnnnnnnnnnnnnnnnnnnnnnnnnnnnnnnnnnnnnnnnnnnnnnnnnnnnnnnnnnnnnnnnnnnnnnnnnnnnnnnnnnnnnnnnnnnnnnnnnnnnnnnnnnnnnnnnnnnnnnnnnnnnnnnnnnnnnnnnnnnnnnnnnnnnnnnnnnnnnnnnnnnnnnnnnnnnnnnnnnnnnnnnnnnnnnnnnnnnnnnnnnnnnnnnnnnnnnnnnnnnnnnnnnnnnnnnnnnnnnnnnnnnnnnnnnnnnnnnnnnnnnnnnnnnnnnnnnnnnnnnnnnnnnnnnnnnnnnnnnnnnnnnnnnnnnnnnnnnnnnnnnnnnnnnnnnnnnnnnnnnnnnnnnnnnnnnnnnnnnnnnnnnnnnnnnnnnnnnnnnnnnnnnnnnnnnnnnnnnnnnnnnnnnnnnnnnnnnnnnnnnnnnnnnnnnnnnnnnnnnnnnnnnnnnnnnnnnnnnnnnnnnnnnnnnnnnnnnnnnnnnnnnnnnnnnnnnnnnnnnnnnnnnnnnnnnnnnnnnnnnnnnnnnnnnnnnnnnnnnnnnnnnnnnnnnnnnnnnnnnnnnnnnnnnnnnnnnnnnnnnnnnnnnnnnnnnnnnnnnnnnnnnnnnnnnnnnnnnnnnnnnnnnnnnnnnnnnnnnnnnnnnnnnnnnnnnnnnnnnnnnnnnnnnnnnnnnnnnnnnnnnnnnnnnnnnnnnnnnnnnnnnnnnnnnnnnnnnnnnnnnnnnnnnnnnnnnnnnnnnnnnnnnnnnnnnnnnnnnnnnnnnnnnnnnnnnnnnnnnnnnnnnnnnnnnnnnnnnnnnnnnnnnnnnnnnnnnnnnnnnnnnnnnnnnnnnnnnnnnnnnnnnnnnnnnnnnnnnnnnnnnnnnnnnnnnnnnnnnnnnnnnnnnnnnnnnnnnnnnnnnnnnnnnnnnnnnnnnnnnnnnnnnnnnnnnnnnnnnnnnnnnnnnnnnnnnnnnnnnnnnnnnnnnnnnnnnnnnnnnnnnnnnnnnnnnnnnnnnnnnnnnnnnnnnnnnnnnnnnnnnnnnnnnnnnnnnnnnnnnnnnnnnnnnnnnnnnnnnnnnnnnnnnnnnnnnnnnnnnnnnnnnnnnnnnnnnnnnnnnnnnnnnnnnnnnnnnnnnnnnnnnnnnnnnnnnnnnnnnnnnnnnnnnnnnnnnnnnnnnnnnnnnnnnnnnnnnnnnnnnnnnnnnnnnnnnnnnnnnnnnnnnnnnnnnnnnnnnnnnnnnnnnnnnnnnnnnnnnnnnnnnnnnnnnnnnnnnnnnnnnnnnnnnnnnnnnnnnnnnnnnnnnnnnnnnnnnnnnnnnnnnnnnnnnnnnnnnnnnnnnnnnnnnnnnnnnnnnnnnnnnnnnnnnnnnnnnnnnnnnnnnnnnnnnnnnnnnnnnnnnnnnnnnnnnnnnnnnnnnnnnnnnnnnnnnnnnnnnnnnnnnnnnnnnnnnnnnnnnnnnnnnnnnnnnnnnnnnnnnnnnnnnnnnnnnnnnnnnnnnnnnnnnnnnnnnnnnnnnnnnnnnnnnnnnnnnnnnnnnnnnnnnnnnnnnnnnnnnnnnnnnnnnnnnnnnnnnnnnnnnnnnnnnnnnnnnnnnnnnnnnnnnnnnnnnnnnnnnnnnnnnnnnnnnnnnnnnnnnnnnnnnnnnnnnnnnnnnnnnnnnnnnnnnnnnnnnnnnnnnnnnnnnnnnnnnnnnnnnnnnnnnnnnnnnnnnnnnnnnnnnnnnnnnnnnnnnnnnnnnnnnnnnnnnnnnnnnnnnnnnnnnnnnnnnnnnnnnnnnnnnnnnnnnnnnnnnnnnnnnnnnnnnnnnnnnnnnnnnnnnnnnnnnnnnnnnnnnnnnnnnnnnnnnnnnnnnnnnnnnnnnnnnnnnnnnnnnnnnnnnnnnnnnnnnnnnnnnnnnnnnnnnnnnnnnnnnnnnnnnnnnnnnnnnnnnnnnnnnnnnnnnnnnnnnnnnnnnnnnnnnnnnnnnnnnnnnnnnnnnnnnnnnnnnnnnnnnnnnnnnnnnnnnnnnnnnnnnnnnnnnnnnnnnnnnnnnnnnnnnnnnnnnnnnnnnnnnnnnnnnnnnnnnnnnnnnnnnnnnnnnnnnnnnnnnnnnnnnnnnnnnnnnnnnnnnnnnnnnnnnnnnnnnnnnnnnnnnnnnnnnnnnnnnnnnnnnnnnnnnnnnnnnnnnnnnnnnnnnnnnnnnnnnnnnnnnnnnnnnnnnnnnnnnnnnnnnnnnnnnnnnnnnnnnnnnnnnnnnnnnnnnnnnnnnnnnnnnnnnnnnnnnnnnnnnnnnnnnnnnnnnnnnnnnnnnnnnnnnnnnnnnnnnnnnnnnnnnnnnnnnnnnnnnnnnnnnnnnnnnnnnnnnnnnnnnnnnnnnnnnnnnnnnnnnnnnnnnnnnnnnnnnnnnnnnnnnnnnnnnnnnnnnnnnnnnnnnnnnnnnnnnnnnnnnnnnnnnnnnnnnnnnnnnnnnnnnnnnnnnnnnnnnnnnnnnnnnnnnnnnnnnnnnnnnnnnnnnnnnnnnnnnnnnnnnnnnnnnnnnnnnnnnnnnnnnnnnnnnnnnnnnnnnnnnnnnnnnnnnnnnnnnnnnnnnnnnnnnnnnnnnnnnnnnnnnnnnnnnnnnnnnnnnnnnnnnnnnnnnnnnnnnnnnnnnnnnnnnnnnnnnnnnnnnnnnnnnnnnnnnnnnnnnnnnnnnnnnnnnnnnnnnnnnnnnnnnnnnnnnnnnnnnnnnnnnnnnnnnnnnnnnnnnnnnnnnnnnnnnnnnnnnnnnnnnnnnnnnnnnnnnnnnnnnnnnnnnnnnnnnnnnnnnnnnnnnnnnnnnnnnnnnnnnnnnnnnnnnnnnnnnnnnnnnnnnnnnnnnnnnnnnnnnnnnnnnnnnnnnnnnnnnnnnnnnnnnnnnnnnnnnnnnnnnnnnnnnnnnnnnnnnnnnnnnnnnnnnnnnnnnnnnnnnnnnnnnnnnnnnnnnnnnnnnnnnnnnnnnnnnnnnnnnnnnnnnnnnnnnnnnnnnnnnnnnnnnnnnnnnnnnnnnnnnnnnnnnnnnnnnnnnnnnnnnnnnnnnnnnnnnnnnnnnnnnnnnnnnnnnnnnnnnnnnnnnnnnnnnnnnnnnnnnnnnnnnnnnnnnnnnnnnnnnnnnnnnnnnnnnnnnnnnnnnnnnnnnnnnnnnnnnnnnnnnnnnnnnnnnnnnnnnnnnnnnnnnnnnnnnnnnnnnnnnnnnnnnnnnnnnnnnnnnnnnnnnnnnnnnnnnnnnnnnnnnnnnnnnnnnnnnnnnnnnnnnnnnnnnnnnnnnnnnnnnnnnnnnnnnnnnnnnnnnnnnnnnnnnnnnnnnnnnnnnnnnnnnnnnnnnnnnnnnnnnnnnnnnnnnnnnnnnnnnnnnnnnnnnnnnnnnnnnnnnnnnnnnnnnnnnnnnnnnnnnnnnnnnnnnnnnnnnnnnnnnnnnnnnnnnnnnnnnnnnnnnnnnnnnnnnnnnnnnnnnnnnnnnnnnnnnnnnnnnnnnnnnnnnnnnnnnnnnnnnnnnnnnnnnnnnnnnnnnnnnnnnnnnnnnnnnnnnnnnnnnnnnnnnnnnnnnnnnnnnnnnnnnnnnnnnnnnnnnnnnnnnnnnnnnnnnnnnnnnnnnnnnnnnnnnnnnnnnnnnnnnnnnnnnnnnnnnnnnnnnnnnnnnnnnnnnnnnnnnnnnnnnnnnnnnnnnnnnnnnnnnnnnnnnnnnnnnnnnnnnnnnnnnnnnnnnnnnnnnnnnnnnnnnnnnnnnnnnnnnnnnnnnnnnnnnnnnnnnnnnnnnnnnnnnnnnnnnnnnnnnnnnnnnnnnnnnnnnnnnnnnnnnnnnnnnnnnnnnnnnnnnnnnnnnnnnnnnnnnnnnnnnnnnnnnnnnnnnnnnnnnnnnnnnnnnnnnnnnnnnnnnnnnnnnnnnnnnnnnnnnnnnnnnnnnnnnnnnnnnnnnnnnnnnnnnnnnnnnnnnnnnnnnnnnnnnnnnnnnnnnnnnnnnnnnnnnnnnnnnnnnnnnnnnnnnnnnnnnnnnnnnnnnnnnnnnnnnnnnnnnnnnnnnnnnnnnnnnnnnnnnnnnnnnnnnnnnnnnnnnnnnnnnnnnnnnnnnnnnnnnnnnnnnnnnnnnnnnnnnnnnnnnnnnnnnnnnnnnnnnnnnnnnnnnnnnnnnnnnnnnnnnnnnnnnnnnnnnnnnnnnnnnnnnnnnnnnnnnnnnnnnnnnnnnnnnnnnnnnnnnnnnnnnnnnnnnnnnnnnnnnnnnnnnnnnnnnnnnnnnnnnnnnnnnnnnnnnnnnnnnnnnnnnnnnnnnnnnnnnnnnnnnnnnnnnnnnnnnnnnnnnnnnnnnnnnnnnnnnnnnnnnnnnnnnnnnnnnnnnnnnnnnnnnnnnnnnnnnnnnnnnnnnnnnnnnnnnnnnnnnnnnnnnnnnnnnnnnnnnnnnnnnnnnnnnnnnnnnnnnnnnnnnnnnnnnnnnnnnnnnnnnnnnnnnnnnnnnnnnnnnnnnnnnnnnnnnnnnnnnnnnnnnnnnnnnnnnnnnnnnnnnnnnnnnnnnnnnnnnnnnnnnnnnnnnnnnnnnnnnnnnnnnnnnnnnnnnnnnnnnnnnnnnnnnnnnnnnnnnnnnnnnnnnnnnnnnnnnnnnnnnnnnnnnnnnnnnnnnnnnnnnnnnnnnnnnnnnnnnnnnnnnnnnnnnnnnnnnnnnnnnnnnnnnnnnnnnnnnnnnnnnnnnnnnnnnnnnnnnnnnnnnnnnnnnnnnnnnnnnnnnnnnnnnnnnnnnnnnnnnnnnnnnnnnnnnnnnnnnnnnnnnnnnnnnnnnnnnnnnnnnnnnnnnnnnnnnnnnnnnnnnnnnnnnnnnnnnnnnnnnnnnnnnnnnnnnnnnnnnnnnnnnnnnnnnnnnnnnnnnnnnnnnnnnnnnnnnnnnnnnnnnnnnnnnnnnnnnnnnnnnnnnnnnnnnnnnnnnnnnnnnnnnnnnnnnnnnnnnnnnnnnnnnnnnnnnnnnnnnnnnnnnnnnnnnnnnnnnnnnnnnnnnnnnnnnnnnnnnnnnnnnnnnnnnnnnnnnnnnnnnnnnnnnnnnnnnnnnnnnnnnnnnnnnnnnnnnnnnnnnnnnnnnnnnnnnnnnnnnnnnnnnnnnnnnnnnnnnnnnnnnnnnnnnnnnnnnnnnnnnnnnnnnnnnnnnnnnnnnnnnnnnnnnnnnnnnnnnnnnnnnnnnnnnnnnnnnnnnnnnnnnnnnnnnnnnnnnnnnnnnnnnnnnnnnnnnnnnnnnnnnnnnnnnnnnnnnnnnnnnnnnnnnnnnnnnnnnnnnnnnnnnnnnnnnnnnnnnnnnnnnnnnnnnnnnnnnnnnnnnnnnnnnnnnnnnnnnnnnnnnnnnnnnnnnnnnnnnnnnnnnnnnnnnnnnnnnnnnnnnnnnnnnnnnnnnnnnnnnnnnnnnnnnnnnnnnnnnnnnnnnnnnnnnnnnnnnnnnnnnnnnnnnnnnnnnnnnnnnnnnnnnnnnnnnnnnnnnnnnnnnnnnnnnnnnnnnnnnnnnnnnnnnnnnnnnnnnnnnnnnnnnnnnnnnnnnnnnnnnnnnnnnnnnnnnnnnnnnnnnnnnnnnnnnnnnnnnnnnnnnnnnnnnnnnnnnnnnnnnnnnnnnnnnnnnnnnnnnnnnnnnnnnnnnnnnnnnnnnnnnnnnnnnnnnnnnnnnnnnnnnnnnnnnnnnnnnnnnnnnnnnnnnnnnnnnnnnnnnnnnnnnnnnnnnnnnnnnnnnnnnnnnnnnnnnnnnnnnnnnnnnnnnnnnnnnnnnnnnnnnnnnnnnnnnnnnnnnnnnnnnnnnnnnnnnnnnnnnnnnnnnnnnnnnnnnnnnnnnnnnnnnnnnnnnnnnnnnnnnnnnnnnnnnnnnnnnnnnnnnnnnnnnnnnnnnnnnnnnnnnnnnnnnnnnnnnnnnnnnnnnnnnnnnnnnnnnnnnnnnnnnnnnnnnnnnnnnnnnnnnnnnnnnnnnnnnnnnnnnnnnnnnnnnnnnnnnnnnnnnnnnnnnnnnnnnnnnnnnnnnnnnnnnnnnnnnnnnnnnnnnnnnnnnnnnnnnnnnnnnnnnnnnnnnnnnnnnnnnnnnnnnnnnnnnnnnnnnnnnnnnnnnnnnnnnnnnnnnnnnnnnnnnnnnnnnnnnnnnnnnnnnnnnnnnnnnnnnnnnnnnnnnnnnnnnnnnnnnnnnnnnnnnnnnnnnnnnnnnnnnnnnnnnnnnnnnnnnnnnnnnnnnnnnnnnnnnnnnnnnnnnnnnnnnnnnnnnnnnnnnnnnnnnnnnnnnnnnnnnnnnnnnnnnnnnnnnnnnnnnnnnnnnnnnnnnnnnnnnnnnnnnnnnnnnnnnnnnnnnnnnnnnnnnnnnnnnnnnnnnnnnnnnnnnnnnnnnnnnnnnnnnnnnnnnnnnnnnnnnnnnnnnnnnnnnnnnnnnnnnnnnnnnnnnnnnnnnnnnnnnnnnnnnnnnnnnnnnnnnnnnnnnnnnnnnnnnnnnnnnnnnnnnnnnnnnnnnnnnnnnnnnnnnnnnnnnnnnnnnnnnnnnnnnnnnnnnnnnnnnnnnnnnnnnnnnnnnnnnnnnnnnnnnnnnnnnnnnnnnnnnnnnnnnnnnnnnnnnnnnnnnnnnnnnnnnnnnnnnnnnnnnnnnnnnnnnnnnnnnnnnnnnnnnnnnnnnnnnnnnnnnnnnnnnnnnnnnnnnnnnnnnnnnnnnnnnnnnnnnnnnnnnnnnnnnnnnnnnnnnnnnnnnnnnnnnnnnnnnnnnnnnnnnnnnnnnnnnnnnnnnnnnnnnnnnnnnnnnnnnnnnnnnnnnnnnnnnnnnnnnnnnnnnnnnnnnnnnnnnnnnnnnnnnnnnnnnnnnnnnnnnnnnnnnnnnnnnnnnnnnnnnnnnnnnnnnnnnnnnnnnnnnnnnnnnnnnnnnnnnnnnnnnnnnnnnnnnnnnnnnnnnnnnnnnnnnnnnnnnnnnnnnnnnnnnnnnnnnnnnnnnnnnnnnnnnnnnnnnnnnnnnnnnnnnnnnnnnnnnnnnnnnnnnnnnnnnnnnnnnnnnnnnnnnnnnnnnnnnnnnnnnnnnnnnnnnnnnnnnnnnnnnnnnnnnnnnnnnnnnnnnnnnnnnnnnnnnnnnnnnnnnnnnnnnnnnnnnnnnnnnnnnnnnnnnnnnnnnnnnnnnnnnnnnnnnnnnnnnnnnnnnnnnnnnnnnnnnnnnnnnnnnnnnnnnnnnnnnnnnnnnnnnnnnnnnnnnnnnnnnnnnnnnnnnnnnnnnnnnnnnnnnnnnnnnnnnnnnnnnnnnnnnnnnnnnnnnnnnnnnnnnnnnnnnnnnnnnnnnnnnnnnnnnnnnnnnnnnnnnnnnnnnnnnnnnnnnnnnnnnnnnnnnnnnnnnnnnnnnnnnnnnnnnnnnnnnnnnnnnnnnnnnnnnnnnnnnnnnnnnnnnnnnnnnnnnnnnnnnnnnnnnnnnnnnnnnnnnnnnnnnnnnnnnnnnnnnnnnnnnnnnnnnnnnnnnnnnnnnnnnnnnnnnnnnnnnnnnnnnnnnnnnnnnnnnnnnnnnnnnnnnnnnnnnnnnnnnnnnnnnnnnnnnnnnnnnnnnnnnnnnnnnnnnnnnnnnnnnnnnnnnnnnnnnnnnnnnnnnnnnnnnnnnnnnnnnnnnnnnnnnnnnnnnnnnnnnnnnnnnnnnnnnnnnnnnnnnnnnnnnnnnnnnnnnnnnnnnnnnnnnnnnnnnnnnnnnnnnnnnnnnnnnnnnnnnnnnnnnnnnnnnnnnnnnnnnnnnnnnnnnnnnnnnnnnnnnnnnnnnnnnnnnnnnnnnnnnnnnnnnnnnnnnnnnnnnnnnnnnnnnnnnnnnnnnnnnnnnnnnnnnnnnnnnnnnnnnnnnnnnnnnnnnnnnnnnnnnnnnnnnnnnnnnnnnnnnnnnnnnnnnnnnnnnnnnnnnnnnnnnnnnnnnnnnnnnnnnnnnnnnnnnnnnnnnnnnnnnnnnnnnnnnnnnnnnnnnnnnnnnnnnnnnnnnnnnnnnnnnnnnnnnnnnnnnnnnnnnnnnnnnnnnnnnnnnnnnnnnnnnnnnnnnnnnnnnnnnnnnnnnnnnnnnnnnnnnnnnnnnnnnnnnnnnnnnnnnnnnnnnnnnnnnnnnnnnnnnnnnnnnnnnnnnnnnnnnnnnnnnnnnnnnnnnnnnnnnnnnnnnnnnnnnnnnnnnnnnnnnnnnnnnnnnnnnnnnnnnnnnnnnnnnnnnnnnnnnnnnnnnnnnnnnnnnnnnnnnnnnnnnnnnnnnnnnnnnnnnnnnnnnnnnnnnnnnnnnnnnnnnnnnnnnnnnnnnnnnnnnnnnnnnnnnnnnnnnnnnnnnnnnnnnnnnnnnnnnnnnnnnnnnnnnnnnnnnnnnnnnnnnnnnnnnnnnnnnnnnnnnnnnnnnnnnnnnnnnnnnnnnnnnnnnnnnnnnnnnnnnnnnnnnnnnnnnnnnnnnnnnnnnnnnnnnnnnnnnnnnnnnnnnnnnnnnnnnnnnnnnnnnnnnnnnnnnnnnnnnnnnnnnnnnnnnnnnnnnnnnnnnnnnnnnnnnnnnnnnnnnnnnnnnnnnnnnnnnnnnnnnnnnnnnnnnnnnnnnnnnnnnnnnnnnnnnnnnnnnnnnnnnnnnnnnnnnnnnnnnnnnnnnnnnnnnnnnnnnnnnnnnnnnnnnnnnnnnnnnnnnnnnnnnnnnnnnnnnnnnnnnnnnnnnnnnnnnnnnnnnnnnnnnnnnnnnnnnnnnnnnnnnnnnnnnnnnnnnnnnnnnnnnnnnnnnnnnnnnnnnnnnnnnnnnnnnnnnnnnnnnnnnnnnnnnnnnnnnnnnnnnnnnnnnnnnnnnnnnnnnnnnnnnnnnnnnnnnnnnnnnnnnnnnnnnnnnnnnnnnnnnnnnnnnnnnnnnnnnnnnnnnnnnnnnnnnnnnnnnnnnnnnnnnnnnnnnnnnnnnnnnnnnnnnnnnnnnnnnnnnnnnnnnnnnnnnnnnnnnnnnnnnnnnnnnnnnnnnnnnnnnnnnnnnnnnnnnnnnnnnnnnnnnnnnnnnnnnnnnnnnnnnnnnnnnnnnnnnnnnnnnnnnnnnnnnnnnnnnnnnnnnnnnnnnnnnnnnnnnnnnnnnnnnnnnnnnnnnnnnnnnnnnnnnnnnnnnnnnnnnnnnnnnnnnnnnnnnnnnnnnnnnnnnnnnnnnnnnnnnnnnnnnnnnnnnnnnnnnnnnnnnnnnnnnnnnnnnnnnnnnnnnnnnnnnnnnnnnnnnnnnnnnnnnnnnnnnnnnnnnnnnnnnnnnnnnnnnnnnnnnnnnnnnnnnnnnnnnnnnnnnnnnnnnnnnnnnnnnnnnnnnnnnnnnnnnnnnnnnnnnnnnnnnnnnnnnnnnnnnnnnnnnnnnnnnnnnnnnnnnnnnnnnnnnnnnnnnnnnnnnnnnnnnnnnnnnnnnnnnnnnnnnnnnnnnnnnnnnnnnnnnnnnnnnnnnnnnnnnnnnnnnnnnnnnnnnnnnnnnnnnnnnnnnnnnnnnnnnnnnnnnnnnnnnnnnnnnnnnnnnnnnnnnnnnnnnnnnnnnnnnnnnnnnnnnnnnnnnnnnnnnnnnnnnnnnnnnnnnnnnnnnnnnnnnnnnnnnnnnnnnnnnnnnnnnnnnnnnnnnnnnnnnnnnnnnnnnnnnnnnnnnnnnnnnnnnnnnnnnnnnnnnnnnnnnnnnnnnnnnnnnnnnnnnnnnnnnnnnnnnnnnnnnnnnnnnnnnnnnnnnnnnnnnnnnnnnnnnnnnnnnnnnnnnnnnnnnnnnnnnnnnnnnnnnnnnnnnnnnnnnnnnnnnnnnnnnnnnnnnnnnnnnnnnnnnnnnnnnnnnnnnnnnnnnnnnnnnnnnnnnnnnnnnnnnnnnnnnnnnnnnnnnnnnnnnnnnnnnnnnnnnnnnnnnnnnnnnnnnnnnnnnnnnnnnnnnnnnnnnnnnnnnnnnnnnnnnnnnnnnnnnnnnnnnnnnnnnnnnnnnnnnnnnnnnnnnnnnnnnnnnnnnnnnnnnnnnnnnnnnnnnnnnnnnnnnnnnnnnnnnnnnnnnnnnnnnnnnnnnnnnnnnnnnnnnnnnnnnnnnnnnnnnnnnnnnnnnnnnnnnnnnnnnnnnnnnnnnnnnnnnnnnnnnnnnnnnnnnnnnnnnnnnnnnnnnnnnnnnnnnnnnnnnnnnnnnnnnnnnnnnnnnnnnnnnnnnnnnnnnnnnnnnnnnnnnnnnnnnnnnnnnnnnnnnnnnnnnnnnnnnnnnnnnnnnnnnnnnnnnnnnnnnnnnnnnnnnnnnnnnnnnnnnnnnnnnnnnnnnnnnnnnnnnnnnnnnnnnnnnnnnnnnnnnnnnnnnnnnnnnnnnnnnnnnnnnnnnnnnnnnnnnnnnnnnnnnnnnnnnnnnnnnnnnnnnnnnnnnnnnnnnnnnnnnnnnnnnnnnnnnnnnnnnnnnnnnnnnnnnnnnnnnnnnnnnnnnnnnnnnnnnnnnnnnnnnnnnnnnnnnnnnnnnnnnnnnnnnnnnnnnnnnnnnnnnnnnnnnnnnnnnnnnnnnnnnnnnnnnnnnnnnnnnnnnnnnnnnnnnnnnnnnnnnnnnnnnnnnnnnnnnnnnnnnnnnnnnnnnnnnnnnnnnnnnnnnnnnnnnnnnnnnnnnnnnnnnnnnnnnnnnnnnnnnnnnnnnnnnnnnnnnnnnnnnnnnnnnnnnnnnnnnnnnnnnnnnnnnnnnnnnnnnnnnnnnnnnnnnnnnnnnnnnnnnnnnnnnnnnnnnnnnnnnnnnnnnnnnnnnnnnnnnnnnnnnnnnnnnnnnnnnnnnnnnnnnnnnnnnnnnnnnnnnnnnnnnnnnnnnnnnnnnnnnnnnnnnnnnnnnnnnnnnnnnnnnnnnnnnnnnnnnnnnnnnnnnnnnnnnnnnnnnnnnnnnnnnnnnnnnnnnnnnnnnnnnnnnnnnnnnnnnnnnnnnnnnnnnnnnnnnnnnnnnnnnnnnnnnnnnnnnnnnnnnnnnnnnnnnnnnnnnnnnnnnnnnnnnnnnnnnnnnnnnnnnnnnnnnnnnnnnnnnnnnnnnnnnnnnnnnnnnnnnnnnnnnnnnnnnnnnnnnnnnnnnnnnnnnnnnnnnnnnnnnnnnnnnnnnnnnnnnnnnnnnnnnnnnnnnnnnnnnnnnnnnnnnnnnnnnnnnnnnnnnnnnnnnnnnnnnnnnnnnnnnnnnnnnnnnnnnnnnnnnnnnnnnnnnnnnnnnnnnnnnnnnnnnnnnnnnnnnnnnnnnnnnnnnnnnnnnnnnnnnnnnnnnnnnnnnnnnnnnnnnnnnnnnnnnnnnnnnnnnnnnnnnnnnnnnnnnnnnnnnnnnnnnnnnnnnnnnnnnnnnnnnnnnnnnnnnnnnnnnnnnnnnnnnnnnnnnnnnnnnnnnnnnnnnnnnnnnnnnnnnnnnnnnnnnnnnnnnnnnnnnnnnnnnnnnnnnnnnnnnnnnnnnnnnnnnnnnnnnnnnnnnnnnnnnnnnnnnnnnnnnnnnnnnnnnnnnnnnnnnnnnnnnnnnnnnnnnnnnnnnnnnnnnnnnnnnnnnnnnnnnnnnnnnnnnnnnnnnnnnnnnnnnnnnnnnnnnnnnnnnnnnnnnnnnnnnnnnnnnnnnnnnnnnnnnnnnnnnnnnnnnnnnnnnnnnnnnnnnnnnnnnnnnnnnnnnnnnnnnnnnnnnnnnnnnnnnnnnnnnnnnnnnnnnnnnnnnnnnnnnnnnnnnnnnnnnnnnnnnnnnnnnnnnnnnnnnnnnnnnnnnnnnnnnnnnnnnnnnnnnnnnnnnnnnnnnnnnnnnnnnnnnnnnnnnnnnnnnnnnnnnnnnnnnnnnnnnnnnnnnnnnnnnnnnnnnnnnnnnnnnnnnnnnnnnnnnnnnnnnnnnnnnnnnnnnnnnnnnnnnnnnnnnnnnnnnnnnnnnnnnnnnnnnnnnnnnnnnnnnnnnnnnnnnnnnnnnnnnnnnnnnnnnnnnnnnnnnnnnnnnnnnnnnnnnnnnnnnnnnnnnnnnnnnnnnnnnnnnnnnnnnnnnnnnnnnnnnnnnnnnnnnnnnnnnnnnnnnnnnnnnnnnnnnnnnnnnnnnnnnnnnnnnnnnnnnnnnnnnnnnnnnnnnnnnnnnnnnnnnnnnnnnnnnnnnnnnnnnnnnnnnnnnnnnnnnnnnnnnnnnnnnnnnnnnnnnnnnnnnnnnnnnnnnnnnnnnnnnnnnnnnnnnnnnnnnnnnnnnnnnnnnnnnnnnnnnnnnnnnnnnnnnnnnnnnnnnnnnnnnnnnnnnnnnnnnnnnnnnnnnnnnnnnnnnnnnnnnnnnnnnnnnnnnnnnnnnnnnnnnnnnnnnnnnnnnnnnnnnnnnnnnnnnnnnnnnnnnnnnnnnnnnnnnnnnnnnnnnnnnnnnnnnnnnnnnnnnnnnnnnnnnnnnnnnnnnnnnnnnnnnnnnnnnnnnnnnnnnnnnnnnnnnnnnnnnnnnnnnnnnnnnnnnnnnnnnnnnnnnnnnnnnnnnnnnnnnnnnnnnnnnnnnnnnnnnnnnnnnnnnnnnnnnnnnnnnnnnnnnnnnnnnnnnnnnnnnnnnnnnnnnnnnnnnnnnnnnnnnnnnnnnnnnnnnnnnnnnnnnnnnnnnnnnnnnnnnnnnnnnnnnnnnnnnnnnnnnnnnnnnnnnnnnnnnnnnnnnnnnnnnnnnnnnnnnnnnnnnnnnnnnnnnnnnnnnnnnnnnnnnnnnnnnnnnnnnnnnnnnnnnnnnnnnnnnnnnnnnnnnnnnnnnnnnnnnnnnnnnnnnnnnnnnnnnnnnnnnnnnnnnnnnnnnnnnnnnnnnnnnnnnnnnnnnnnnnnnnnnnnnnnnnnnnnnnnnnnnnnnnnnnnnnnnnnnnnnnnnnnnnnnnnnnnnnnnnnnnnnnnnnnnnnnnnnnnnnnnnnnnnnnnnnnnnnnnnnnnnnnnnnnnnnnnnnnnnnnnnnnnnnnnnnnnnnnnnnnnnnnnnnnnnnnnnnnnnnnnnnnnnnnnnnnnnnnnnnnnnnnnnnnnnnnnnnnnnnnnnnnnnnnnnnnnnnnnnnnnnnnnnnnnnnnnnnnnnnnnnnnnnnnnnnnnnnnnnnnnnnnnnnnnnnnnnnnnnnnnnnnnnnnnnnnnnnnnnnnnnnnnnnnnnnnnnnnnnnnnnnnnnnnnnnnnnnnnnnnnnnnnnnnnnnnnnnnnnnnnnnnnnnnnnnnnnnnnnnnnnnnnnnnnnnnnnnnnnnnnnnnnnnnnnnnnnnnnnnnnnnnnnnnnnnnnnnnnnnnnnnnnnnnnnnnnnnnnnnnnnnnnnnnnnnnnnnnnnnnnnnnnnnnnnnnnnnnnnnnnnnnnnnnnnnnnnnnnnnnnnnnnnnnnnnnnnnnnnnnnnnnnnnnnnnnnnnnnnnnnnnnnnnnnnnnnnnnnnnnnnnnnnnnnnnnnnnnnnnnnnnnnnnnnnnnnnnnnnnnnnnnnnnnnnnnnnnnnnnnnnnnnnnnnnnnnnnnnnnnnnnnnnnnnnnnnnnnnnnnnnnnnnnnnnnnnnnnnnnnnnnnnnnnnnnnnnnnnnnnnnnnnnnnnnnnnnnnnnnnnnnnnnnnnnnnnnnnnnnnnnnnnnnnnnnnnnnnnnnnnnnnnnnnnnnnnnnnnnnnnnnnnnnnnnnnnnnnnnnnnnnnnnnnnnnnnnnnnnnnnnnnnnnnnnnnnnnnnnnnnnnnnnnnnnnnnnnnnnnnnnnnnnnnnnnnnnnnnnnnnnnnnnnnnnnnnnnnnnnnnnnnnnnnnnnnnnnnnnnnnnnnnnnnnnnnnnnnnnnnnnnnnnnnnnnnnnnnnnnnnnnnnnnnnnnnnnnnnnnnnnnnnnnnnnnnnnnnnnnnnnnnnnnnnnnnnnnnnnnnnnnnnnnnnnnnnnnnnnnnnnnnnnnnnnnnnnnnnnnnnnnnnnnnnnnnnnnnnnnnnnnnnnnnnnnnnnnnnnnnnnnnnnnnnnnnnnnnnnnnnnnnnnnnnnnnnnnnnnnnnnnnnnnnnnnnnnnnnnnnnnnnnnnnnnnnnnnnnnnnnnnnnnnnnnnnnnnnnnnnnnnnnnnnnnnnnnnnnnnnnnnnnnnnnnnnnnnnnnnnnnnnnnnnnnnnnnnnnnnnnnnnnnnnnnnnnnnnnnnnnnnnnnnnnnnnnnnnnnnnnnnnnnnnnnnnnnnnnnnnnnnnnnnnnnnnnnnnnnnnnnnnnnnnnnnnnnnnnnnnnnnnnnnnnnnnnnnnnnnnnnnnnnnnnnnnnnnnnnnnnnnnnnnnnnnnnnnnnnnnnnnnnnnnnnnnnnnnnnnnnnnnnnnnnnnnnnnnnnnnnnnnnnnnnnnnnnnnnnnnnnnnnnnnnnnnnnnnnnnnnnnnnnnnnnnnnnnnnnnnnnnnnnnnnnnnnnnnnnnnnnnnnnnnnnnnnnnnnnnnnnnnnnnnnnnnnnnnnnnnnnnnnnnnnnnnnnnnnnnnnnnnnnnnnnnnnnnnnnnnnnnnnnnnnnnnnnnnnnnnnnnnnnnnnnnnnnnnnnnnnnnnnnnnnnnnnnnnnnnnnnnnnnnnnnnnnnnnnnnnnnnnnnnnnnnnnnnnnnnnnnnnnnnnnnnnnnnnnnnnnnnnnnnnnnnnnnnnnnnnnnnnnnnnnnnnnnnnnnnnnnnnnnnnnnnnnnnnnnnnnnnnnnnnnnnnnnnnnnnnnnnnnnnnnnnnnnnnnnnnnnnnnnnnnnnnnnnnnnnnnnnnnnnnnnnnnnnnnnnnnnnnnnnnnnnnnnnnnnnnnnnnnnnnnnnnnnnnnnnnnnnnnnnnnnnnnnnnnnnnnnnnnnnnnnnnnnnnnnnnnnnnnnnnnnnnnnnnnnnnnnnnnnnnnnnnnnnnnnnnnnnnnnnnnnnnnnnnnnnnnnnnnnnnnnnnnnnnnnnnnnnnnnnnnnnnnnnnnnnnnnnnnnnnnnnnnnnnnnnnnnnnnnnnnnnnnnnnnnnnnnnnnnnnnnnnnnnnnnnnnnnnnnnnnnnnnnnnnnnnnnnnnnnnnnnnnnnnnnnnnnnnnnnnnnnnnnnnnnnnnnnnnnnnnnnnnnnnnnnnnnnnnnnnnnnnnnnnnnnnnnnnnnnnnnnnnnnnnnnnnnnnnnnnnnnnnnnnnnnnnnnnnnnnnnnnnnnnnnnnnnnnnnnnnnnnnnnnnnnnnnnnnnnnnnnnnnnnnnnnnnnnnnnnnnnnnnnnnnnnnnnnnnnnnnnnnnnnnnnnnnnnnnnnnnnnnnnnnnnnnnnnnnnnnnnnnnnnnnnnnnnnnnnnnnnnnnnnnnnnnnnnnnnnnnnnnnnnnnnnnnnnnnnnnnnnnnnnnnnnnnnnnnnnnnnnnnnnnnnnnnnnnnnnnnnnnnnnnnnnnnnnnnnnnnnnnnnnnnnnnnnnnnnnnnnnnnnnnnnnnnnnnnnnnnnnnnnnnnnnnnnnnnnnnnnnnnnnnnnnnnnnnnnnnnnnnnnnnnnnnnnnnnnnnnnnnnnnnnnnnnnnnnnnnnnnnnnnnnnnnnnnnnnnnnnnnnnnnnnnnnnnnnnnnnnnnnnnnnnnnnnnnnnnnnnnnnnnnnnnnnnnnnnnnnnnnnnnnnnnnnnnnnnnnnnnnnnnnnnnnnnnnnnnnnnnnnnnnnnnnnnnnnnnnnnnnnnnnnnnnnnnnnnnnnnnnnnnnnnnnnnnnnnnnnnnnnnnnnnnnnnnnnnnnnnnnnnnnnnnnnnnnnnnnnnnnnnnnnnnnnnnnnnnnnnnnnnnnnnnnnnnnnnnnnnnnnnnnnnnnnnnnnnnnnnnnnnnnnnnnnnnnnnnnnnnnnnnnnnnnnnnnnnnnnnnnnnnnnnnnnnnnnnnnnnnnnnnnnnnnnnnnnnnnnnnnnnnnnnnnnnnnnnnnnnnnnnnnnnnnnnnnnnnnnnnnnnnnnnnnnnnnnnnnnnnnnnnnnnnnnnnnnnnnnnnnnnnnnnnnnnnnnnnnnnnnnnnnnnnnnnnnnnnnnnnnnnnnnnnnnnnnnnnnnnnnnnnnnnnnnnnnnnnnnnnnnnnnnnnnnnnnnnnnnnnnnnnnnnnnnnnnnnnnnnnnnnnnnnnnnnnnnnnnnnnnnnnnnnnnnnnnnnnnnnnnnnnnnnnnnnnnnnnnnnnnnnnnnnnnnnnnnnnnnnnnnnnnnnnnnnnnnnnnnnnnnnnnnnnnnnnnnnnnnnnnnnnnnnnnnnnnnnnnnnnnnnnnnnnnnnnnnnnnnnnnnnnnnnnnnnnnnnnnnnnnnnnnnnnnnnnnnnnnnnnnnnnnnnnnnnnnnnnnnnnnnnnnnnnnnnnnnnnnnnnnnnnnnnnnnnnnnnnnnnnnnnnnnnnnnnnnnnnnnnnnnnnnnnnnnnnnnnnnnnnnnnnnnnnnnnnnnnnnnnnnnnnnnnnnnnnnnnnnnnnnnnnnnnnnnnnnnnnnnnnnnnnnnnnnnnnnnnnnnnnnnnnnnnnnnnnnnnnnnnnnnnnnnnnnnnnnnnnnnnnnnnnnnnnnnnnnnnnnnnnnnnnnnnnnnnnnnnnnnnnnnnnnnnnnnnnnnnnnnnnnnnnnnnnnnnnnnnnnnnnnnnnnnnnnnnnnnnnnnnnnnnnnnnnnnnnnnnnnnnnnnnnnnnnnnnnnnnnnnnnnnnnnnnnnnnnnnnnnnnnnnnnnnnnnnnnnnnnnnnnnnnnnnnnnnnnnnnnnnnnnnnnnnnnnnnnnnnnnnnnnnnnnnnnnnnnnnnnnnnnnnnnnnnnnnnnnnnnnnnnnnnnnnnnnnnnnnnnnnnnnnnnnnnnnnnnnnnnnnnnnnnnnnnnnnnnnnnnnnnnnnnnnnnnnnnnnnnnnnnnnnnnnnnnnnnnnnnnnnnnnnnnnnnnnnnnnnnnnnnnnnnnnnnnnnnnnnnnnnnnnnnnnnnnnnnnnnnnnnnnnnnnnnnnnnnnnnnnnnnnnnnnnnnnnnnnnnnnnnnnnnnnnnnnnnnnnnnnnnnnnnnnnnnnnnnnnnnnnnnnnnnnnnnnnnnnnnnnnnnnnnnnnnnnnnnnnnnnnnnnnnnnnnnnnnnnnnnnnnnnnnnnnnnnnnnnnnnnnnnnnnnnnnnnnnnnnnnnnnnnnnnnnnnnnnnnnnnnnnnnnnnnnnnnnnnnnnnnnnnnnnnnnnnnnnnnnnnnnnnnnnnnnnnnnnnnnnnnnnnnnnnnnnnnnnnnnnnnnnnnnnnnnnnnnnnnnnnnnnnnnnnnnnnnnnnnnnnnnnnnnnnnnnnnnnnnnnnnnnnnnnnnnnnnnnnnnnnnnnnnnnnnnnnnnnnnnnnnnnnnnnnnnnnnnnnnnnnnnnnnnnnnnnnnnnnnnnnnnnnnnnnnnnnnnnnnnnnnnnnnnnnnnnnnnnnnnnnnnnnnnnnnnnnnnnnnnnnnnnnnnnnnnnnnnnnnnnnnnnnnnnnnnnnnnnnnnnnnnnnnnnnnnnnnnnnnnnnnnnnnnnnnnnnnnnnnnnnnnnnnnnnnnnnnnnnnnnnnnnnnnnnnnnnnnnnnnnnnnnnnnnnnnnnnnnnnnnnnnnnnnnnnnnnnnnnnnnnnnnnnnnnnnnnnnnnnnnnnnnnnnnnnnnnnnnnnnnnnnnnnnnnnnnnnnnnnnnnnnnnnnnnnnnnnnnnnnnnnnnnnnnnnnnnnnnnnnnnnnnnnnnnnnnnnnnnnnnnnnnnnnnnnnnnnnnnnnnnnnnnnnnnnnnnnnnnnnnnnnnnnnnnnnnnnnnnnnnnnnnnnnnnnnnnnnnnnnnnnnnnnnnnnnnnnnnnnnnnnnnnnnnnnnnnnnnnnnnnnnnnnnnnnnnnnnnnnnnnnnnnnnnnnnnnnnnnnnnnnnnnnnnnnnnnnnnnnnnnnnnnnnnnnnnnnnnnnnnnnnnnnnnnnnnnnnnnnnnnnnnnnnnnnnnnnnnnnnnnnnnnnnnnnnnnnnnnnnnnnnnnnnnnnnnnnnnnnnnnnnnnnnnnnnnnnnnnnnnnnnnnnnnnnnnnnnnnnnnnnnnnnnnnnnnnnnnnnnnnnnnnnnnnnnnnnnnnnnnnnnnnnnnnnnnnnnnnnnnnnnnnnnnnnnnnnnnnnnnnnnnnnnnnnnnnnnnnnnnnnnnnnnnnnnnnnnnnnnnnnnnnnnnnnnnnnnnnnnnnnnnnnnnnnnnnnnnnnnnnnnnnnnnnnnnnnnnnnnnnnnnnnnnnnnnnnnnnnnnnnnnnnnnnnnnnnnnnnnnnnnnnnnnnnnnnnnnnnnnnnnnnnnnnnnnnnnnnnnnnnnnnnnnnnnnnnnnnnnnnnnnnnnnnnnnnnnnnnnnnnnnnnnnnnnnnnnnnnnnnnnnnnnnnnnnnnnnnnnnnnnnnnnnnnnnnnnnnnnnnnnnnnnnnnnnnnnnnnnnnnnnnnnnnnnnnnnnnnnnnnnnnnnnnnnnnnnnnnnnnnnnnnnnnnnnnnnnnnnnnnnnnnnnnnnnnnnnnnnnnnnnnnnnnnnnnnnnnnnnnnnnnnnnnnnnnnnnnnnnnnnnnnnnnnnnnnnnnnnnnnnnnnnnnnnnnnnnnnnnnnnnnnnnnnnnnnnnnnnnnnnnnnnnnnnnnnnnnnnnnnnnnnnnnnnnnnnnnnnnnnnnnnnnnnnnnnnnnnnnnnnnnnnnnnnnnnnnnnnnnnnnnnnnnnnnnnnnnnnnnnnnnnnnnnnnnnnnnnnnnnnnnnnnnnnnnnnnnnnnnnnnnnnnnnnnnnnnnnnnnnnnnnnnnnnnnnnnnnnnnnnnnnnnnnnnnnnnnnnnnnnnnnnnnnnnnnnnnnnnnnnnnnnnnnnnnnnnnnnnnnnnnnnnnnnnnnnnnnnnnnnnnnnnnnnnnnnnnnnnnnnnnnnnnnnnnnnnnnnnnnnnnnnnnnnnnnnnnnnnnnnnnnnnnnnnnnnnnnnnnnnnnnnnnnnnnnnnnnnnnnnnnnnnnnnnnnnnnnnnnnnnnnnnnnnnnnnnnnnnnnnnnnnnnnnnnnnnnnnnnnnnnnnnnnnnnnnnnnnnnnnnnnnnnnnnnnnnnnnnnnnnnnnnnnnnnnnnnnnnnnnnnnnnnnnnnnnnnnnnnnnnnnnnnnnnnnnnnnnnnnnnnnnnnnnnnnnnnnnnnnnnnnnnnnnnnnnnnnnnnnnnnnnnnnnnnnnnnnnnnnnnnnnnnnnnnnnnnnnnnnnnnnnnnnnnnnnnnnnnnnnnnnnnnnnnnnnnnnnnnnnnnnnnnnnnnnnnnnnnnnnnnnnnnnnnnnnnnnnnnnnnnnnnnnnnnnnnnnnnnnnnnnnnnnnnnnnnnnnnnnnnnnnnnnnnnnnnnnnnnnnnnnnnnnnnnnnnnnnnnnnnnnnnnnnnnnnnnnnnnnnnnnnnnnnnnnnnnnnnnnnnnnnnnnnnnnnnnnnnnnnnnnnnnnnnnnnnnnnnnnnnnnnnnnnnnnnnnnnnnnnnnnnnnnnnnnnnnnnnnnnnnnnnnnnnnnnnnnnnnnnnnnnnnnnnnnnnnnnnnnnnnnnnnnnnnnnnnnnnnnnnnnnnnnnnnnnnnnnnnnnnnnnnnnnnnnnnnnnnnnnnnnnnnnnnnnnnnnnnnnnnnnnnnnnnnnnnnnnnnnnnnnnnnnnnnnnnnnnnnnnnnnnnnnnnnnnnnnnnnnnnnnnnnnnnnnnnnnnnnnnnnnnnnnnnnnnnnnnnnnnnnnnnnnnnnnnnnnnnnnnnnnnnnnnnnnnnnnnnnnnnnnnnnnnnnnnnnnnnnnnnnnnnnnnnnnnnnnnnnnnnnnnnnnnnnnnnnnnnnnnnnnnnnnnnnnnnnnnnnnnnnnnnnnnnnnnnnnnnnnnnnnnnnnnnnnnnnnnnnnnnnnnnnnnnnnnnnnnnnnnnnnnnnnnnnnnnnnnnnnnnnnnnnnnnnnnnnnnnnnnnnnnnnnnnnnnnnnnnnnnnnnnnnnnnnnnnnnnnnnnnnnnnnnnnnnnnnnnnnnnnnnnnnnnnnnnnnnnnnnnnnnnnnnnnnnnnnnnnnnnnnnnnnnnnnnnnnnnnnnnnnnnnnnnnnnnnnnnnnnnnnnnnnnnnnnnnnnnnnnnnnnnnnnnnnnnnnnnnnnnnnnnnnnnnnnnnnnnnnnnnnnnnnnnnnnnnnnnnnnnnnnnnnnnnnnnnnnnnnnnnnnnnnnnnnnnnnnnnnnnnnnnnnnnnnnnnnnnnnnnnnnnnnnnnnnnnnnnnnnnnnnnnnnnnnnnnnnnnnnnnnnnnnnnnnnnnnnnnnnnnnnnnnnnnnnnnnnnnnnnnnnnnnnnnnnnnnnnnnnnnnnnnnnnnnnnnnnnnnnnnnnnnnnnnnnnnnnnnnnnnnnnnnnnnnnnnnnnnnnnnnnnnnnnnnnnnnnnnnnnnnnnnnnnnnnnnnnnnnnnnnnnnnnnnnnnnnnnnnnnnnnnnnnnnnnnnnnnnnnnnnnnnnnnnnnnnnnnnnnnnnnnnnnnnnnnnnnnnnnnnnnnnnnnnnnnnnnnnnnnnnnnnnnnnnnnnnnnnnnnnnnnnnnnnnnnnnnnnnnnnnnnnnnnnnnnnnnnnnnnnnnnnnnnnnnnnnnnnnnnnnnnnnnnnnnnnnnnnnnnnnnnnnnnnnnnnnnnnnnnnnnnnnnnnnnnnnnnnnnnnnnnnnnnnnnnnnnnnnnnnnnnnnnnnnnnnnnnnnnnnnnnnnnnnnnnnnnnnnnnnnnnnnnnnnnnnnnnnnnnnnnnnnnnnnnnnnnnnnnnnnnnnnnnnnnnnnnnnnnnnnnnnnnnnnnnnnnnnnnnnnnnnnnnnnnnnnnnnnnnnnnnnnnnnnnnnnnnnnnnnnnnnnnnnnnnnnnnnnnnnnnnnnnnnnnnnnnnnnnnnnnnnnnnnnnnnnnnnnnnnnnnnnnnnnnnnnnnnnnnnnnnnnnnnnnnnnnnnnnnnnnnnnnnnnnnnnnnnnnnnnnnnnnnnnnnnnnnnnnnnnnnnnnnnnnnnnnnnnnnnnnnnnnnnnnnnnnnnnnnnnnnnnnnnnnnnnnnnnnnnnnnnnnnnnnnnnnnnnnnnnnnnnnnnnnnnnnnnnnnnnnnnnnnnnnnnnnnnnnnnnnnnnnnnnnnnnnnnnnnnnnnnnnnnnnnnnnnnnnnnnnnnnnnnnnnnnnnnnnnnnnnnnnnnnnnnnnnnnnnnnnnnnnnnnnnnnnnnnnnnnnnnnnnnnnnnnnnnnnnnnnnnnnnnnnnnnnnnnnnnnnnnnnnnnnnnnnnnnnnnnnnnnnnnnnnnnnnnnnnnnnnnnnnnnnnnnnnnnnnnnnnnnnnnnnnnnnnnnnnnnnnnnnnnnnnnnnnnnnnnnnnnnnnnnnnnnnnnnnnnnnnnnnnnnnnnnnnnnnnnnnnnnnnnnnnnnnnnnnnnnnnnnnnnnnnnnnnnnnnnnnnnnnnnnnnnnnnnnnnnnnnnnnnnnnnnnnnnnnnnnnnnnnnnnnnnnnnnnnnnnnnnnnnnnnnnnnnnnnnnnnnnnnnnnnnnnnnnnnnnnnnnnnnnnnnnnnnnnnnnnnnnnnnnnnnnnnnnnnnnnnnnnnnnnnnnnnnnnnnnnnnnnnnnnnnnnnnnnnnnnnnnnnnnnnnnnnnnnnnnnnnnnnnnnnnnnnnnnnnnnnnnnnnnnnnnnnnnnnnnnnnnnnnnnnnnnnnnnnnnnnnnnnnnnnnnnnnnnnnnnnnnnnnnnnnnnnnnnnnnnnnnnnnnnnnnnnnnnnnnnnnnnnnnnnnnnnnnnnnnnnnnnnnnnnnnnnnnnnnnnnnnnnnnnnnnnnnnnnnnnnnnnnnnnnnnnnnnnnnnnnnnnnnnnnnnnnnnnnnnnnnnnnnnnnnnnnnnnnnnnnnnnnnnnnnnnnnnnnnnnnnnnnnnnnnnnnnnnnnnnnnnnnnnnnnnnnnnnnnnnnnnnnnnnnnnnnnnnnnnnnnnnnnnnnnnnnnnnnnnnnnnnnnnnnnnnnnnnnnnnnnnnnnnnnnnnnnnnnnnnnnnnnnnnnnnnnnnnnnnnnnnnnnnnnnnnnnnnnnnnnnnnnnnnnnnnnnnnnnnnnnnnnnnnnnnnnnnnnnnnnnnnnnnnnnnnnnnnnnnnnnnnnnnnnnnnnnnnnnnnnnnnnnnnnnnnnnnnnnnnnnnnnnnnnnnnnnnnnnnnnnnnnnnnnnnnnnnnnnnnnnnnnnnnnnnnnnnnnnnnnnnnnnnnnnnnnnnnnnnnnnnnnnnnnnnnnnnnnnnnnnnnnnnnnnnnnnnnnnnnnnnnnnnnnnnnnnnnnnnnnnnnnnnnnnnnnnnnnnnnnnnnnnnnnnnnnnnnnnnnnnnnnnnnnnnnnnnnnnnnnnnnnnnnnnnnnnnnnnnnnnnnnnnnnnnnnnnnnnnnnnnnnnnnnnnnnnnnnnnnnnnnnnnnnnnnnnnnnnnnnnnnnnnnnnnnnnnnnnnnnnnnnnnnnnnnnnnnnnnnnnnnnnnnnnnnnnnnnnnnnnnnnnnnnnnnnnnnnnnnnnnnnnnnnnnnnnnnnnnnnnnnnnnnnnnnnnnnnnnnnnnnnnnnnnnnnnnnnnnnnnnnnnnnnnnnnnnnnnnnnnnnnnnnnnnnnnnnnnnnnnnnnnnnnnnnnnnnnnnnnnnnnnnnnnnnnnnnnnnnnnnnnnnnnnnnnnnnnnnnnnnnnnnnnnnnnnnnnnnnnnnnnnnnnnnnnnnnnnnnnnnnnnnnnnnnnnnnnnnnnnnnnnnnnnnnnnnnnnnnnnnnnnnnnnnnnnnnnnnnnnnnnnnnnnnnnnnnnnnnnnnnnnnnnnnnnnnnnnnnnnnnnnnnnnnnnnnnnnnnnnnnnnnnnnnnnnnnnnnnnnnnnnnnnnnnnnnnnnnnnnnnnnnnnnnnnnnnnnnnnnnnnnnnnnnnnnnnnnnnnnnnnnnnnnnnnnnnnnnnnnnnnnnnnnnnnnnnnnnnnnnnnnnnnnnnnnnnnnnnnnnnnnnnnnnnnnnnnnnnnnnnnnnnnnnnnnnnnnnnnnnnnnnnnnnnnnnnnnnnnnnnnnnnnnnnnnnnnnnnnnnnnnnnnnnnnnnnnnnnnnnnnnnnnnnnnnnnnnnnnnnnnnnnnnnnnnnnnnnnnnnnnnnnnnnnnnnnnnnnnnnnnnnnnnnnnnnnnnnnnnnnnnnnnnnnnnnnnnnnnnnnnnnnnnnnnnnnnnnnnnnnnnnnnnnnnnnnnnnnnnnnnnnnnnnnnnnnnnnnnnnnnnnnnnnnnnnnnnnnnnnnnnnnnnnnnnnnnnnnnnnnnnnnnnnnnnnnnnnnnnnnnnnnnnnnnnnnnnnnnnnnnnnnnnnnnnnnnnnnnnnnnnnnnnnnnnnnnnnnnnnnnnnnnnnnnnnnnnnnnnnnnnnnnnnnnnnnnnnnnnnnnnnnnnnnnnnnnnnnnnnnnnnnnnnnnnnnnnnnnnnnnnnnnnnnnnnnnnnnnnnnnnnnnnnnnnnnnnnnnnnnnnnnnnnnnnnnnnnnnnnnnnnnnnnnnnnnnnnnnnnnnnnnnnnnnnnnnnnnnnnnnnnnnnnnnnnnnnnnnnnnnnnnnnnnnnnnnnnnnnnnnnnnnnnnnnnnnnnnnnnnnnnnnnnnnnnnnnnnnnnnnnnnnnnnnnnnnnnnnnnnnnnnnnnnnnnnnnnnnnnnnnnnnnnnnnnnnnnnnnnnnnnnnnnnnnnnnnnnnnnnnnnnnnnnnnnnnnnnnnnnnnnnnnnnnnnnnnnnnnnnnnnnnnnnnnnnnnnnnnnnnnnnnnnnnnnnnnnnnnnnnnnnnnnnnnnnnnnnnnnnnnnnnnnnnnnnnnnnnnnnnnnnnnnnnnnnnnnnnnnnnnnnnnnnnnnnnnnnnnnnnnnnnnnnnnnnnnnnnnnnnnnnnnnnnnnnnnnnnnnnnnnnnnnnnnnnnnnnnnnnnnnnnnnnnnnnnnnnnnnnnnnnnnnnnnnnnnnnnnnnnnnnnnnnnnnnnnnnnnnnnnnnnnnnnnnnnnnnnnnnnnnnnnnnnnnnnnnnnnnnnnnnnnnnnnnnnnnnnnnnnnnnnnnnnnnnnnnnnnnnnnnnnnnnnnnnnnnnnnnnnnnnnnnnnnnnnnnnnnnnnnnnnnnnnnnnnnnnnnnnnnnnnnnnnnnnnnnnnnnnnnnnnnnnnnnnnnnnnnnnnnnnnnnnnnnnnnnnnnnnnnnnnnnnnnnnnnnnnnnnnnnnnnnnnnnnnnnnnnnnnnnnnnnnnnnnnnnnnnnnnnnnnnnnnnnnnnnnnnnnnnnnnnnnnnnnnnnnnnnnnnnnnnnnnnnnnnnnnnnnnnnnnnnnnnnnnnnnnnnnnnnnnnnnnnnnnnnnnnnnnnnnnnnnnnnnnnnnnnnnnnnnnnnnnnnnnnnnnnnnnnnnnnnnnnnnnnnnnnnnnnnnnnnnnnnnnnnnnnnnnnnnnnnnnnnnnnnnnnnnnnnnnnnnnnnnnnnnnnnnnnnnnnnnnnnnnnnnnnnnnnnnnnnnnnnnnnnnnnnnnnnnnnnnnnnnnnnnnnnnnnnnnnnnnnnnnnnnnnnnnnnnnnnnnnnnnnnnnnnnnnnnnnnnnnnnnnnnnnnnnnnnnnnnnnnnnnnnnnnnnnnnnnnnnnnnnnnnnnnnnnnnnnnnnnnnnnnnnnnnnnnnnnnnnnnnnnnnnnnnnnnnnnnnnnnnnnnnnnnnnnnnnnnnnnnnnnnnnnnnnnnnnnnnnnnnnnnnnnnnnnnnnnnnnnnnnnnnnnnnnnnnnnnnnnnnnnnnnnnnnnnnnnnnnnnnnnnnnnnnnnnnnnnnnnnnnnnnnnnnnnnnnnnnnnnnnnnnnnnnnnnnnnnnnnnnnnnnnnnnnnnnnnnnnnnnnnnnnnnnnnnnnnnnnnnnnnnnnnnnnnnnnnnnnnnnnnnnnnnnnnnnnnnnnnnnnnnnnnnnnnnnnnnnnnnnnnnnnnnnnnnnnnnnnnnnnnnnnnnnnnnnnnnnnnnnnnnnnnnnnnnnnnnnnnnnnnnnnnnnnnnnnnnnnnnnnnnnnnnnnnnnnnnnnnnnnnnnnnnnnnnnnnnnnnnnnnnnnnnnnnnnnnnnnnnnnnnnnnnnnnnnnnnnnnnnnnnnnnnnnnnnnnnnnnnnnnnnnnnnnnnnnnnnnnnnnnnnnnnnnnnnnnnnnnnnnnnnnnnnnnnnnnnnnnnnnnnnnnnnnnnnnnnnnnnnnnnnnnnnnnnnnnnnnnnnnnnnnnnnnnnnnnnnnnnnnnnnnnnnnnnnnnnnnnnnnnnnnnnnnnnnnnnnnnnnnnnnnnnnnnnnnnnnnnnnnnnnnnnnnnnnnnnnnnnnnnnnnnnnnnnnnnnnnnnnnnnnnnnnnnnnnnnnnnnnnnnnnnnnnnnnnnnnnnnnnnnnnnnnnnnnnnnnnnnnnnnnnnnnnnnnnnnnnnnnnnnnnnnnnnnnnnnnnnnnnnnnnnnnnnnnnnnnnnnnnnnnnnnnnnnnnnnnnnnnnnnnnnnnnnnnnnnnnnnnnnnnnnnnnnnnnnnnnnnnnnnnnnnnnnnnnnnnnnnnnnnnnnnnnnnnnnnnnnnnnnnnnnnnnnnnnnnnnnnnnnnnnnnnnnnnnnnnnnnnnnnnnnnnnnnnnnnnnnnnnnnnnnnnnnnnnnnnnnnnnnnnnnnnnnnnnnnnnnnnnnnnnnnnnnnnnnnnnnnnnnnnnnnnnnnnnnnnnnnnnnnnnnnnnnnnnnnnnnnnnnnnnnnnnnnnnnnnnnnnnnnnnnnnnnnnnnnnnnnnnnnnnnnnnnnnnnnnnnnnnnnnnnnnnnnnnnnnnnnnnnnnnnnnnnnnnnnnnnnnnnnnnnnnnnnnnnnnnnnnnnnnnnnnnnnnnnnnnnnnnnnnnnnnnnnnnnnnnnnnnnnnnnnnnnnnnnnnnnnnnnnnnnnnnnnnnnnnnnnnnnnnnnnnnnnnnnnnnnnnnnnnnnnnnnnnnnnnnnnnnnnnnnnnnnnnnnnnnnnnnnnnnnnnnnnnnnnnnnnnnnnnnnnnnnnnnnnnnnnnnnnnnnnnnnnnnnnnnnnnnnnnnnnnnnnnnnnnnnnnnnnnnnnnnnnnnnnnnnnnnnnnnnnnnnnnnnnnnnnnnnnnnnnnnnnnnnnnnnnnnnnnnnnnnnnnnnnnnnnnnnnnnnnnnnnnnnnnnnnnnnnnnnnnnnnnnnnnnnnnnnnnnnnnnnnnnnnnnnnnnnnnnnnnnnnnnnnnnnnnnnnnnnnnnnnnnnnnnnnnnnnnnnnnnnnnnnnnnnnnnnnnnnnnnnnnnnnnnnnnnnnnnnnnnnnnnnnnnnnnnnnnnnnnnnnnnnnnnnnnnnnnnnnnnnnnnnnnnnnnnnnnnnnnnnnnnnnnnnnnnnnnnnnnnnnnnnnnnnnnnnnnnnnnnnnnnnnnnnnnnnnnnnnnnnnnnnnnnnnnnnnnnnnnnnnnnnnnnnnnnnnnnnnnnnnnnnnnnnnnnnnnnnnnnnnnnnnnnnnnnnnnnnnnnnnnnnnnnnnnnnnnnnnnnnnnnnnnnnnnnnnnnnnnnnnnnnnnnnnnnnnnnnnnnnnnnnnnnnnnnnnnnnnnnnnnnnnnnnnnnnnnnnnnnnnnnnnnnnnnnnnnnnnnnnnnnnnnnnnnnnnnnnnnnnnnnnnnnnnnnnnnnnnnnnnnnnnnnnnnnnnnnnnnnnnnnnnnnnnnnnnnnnnnnnnnnnnnnnnnnnnnnnnnnnnnnnnnnnnnnnnnnnnnnnnnnnnnnnnnnnnnnnnnnnnnnnnnnnnnnnnnnnnnnnnnnnnnnnnnnnnnnnnnnnnnnnnnnnnnnnnnnnnnnnnnnnnnnnnnnnnnnnnnnnnnnnnnnnnnnnnnnnnnnnnnnnnnnnnnnnnnnnnnnnnnnnnnnnnnnnnnnnnnnnnnnnnnnnnnnnnnnnnnnnnnnnnnnnnnnnnnnnnnnnnnnnnnnnnnnnnnnnnnnnnnnnnnnnnnnnnnnnnnnnnnnnnnnnnnnnnnnnnnnnnnnnnnnnnnnnnnnnnnnnnnnnnnnnnnnnnnnnnnnnnnnnnnnnnnnnnnnnnnnnnnnnnnnnnnnnnnnnnnnnnnnnnnnnnnnnnnnnnnnnnnnnnnnnnnnnnnnnnnnnnnnnnnnnnnnnnnnnnnnnnnnnnnnnnnnnnnnnnnnnnnnnnnnnnnnnnnnnnnnnnnnnnnnnnnnnnnnnnnnnnnnnnnnnnnnnnnnnnnnnnnnnnnnnnnnnnnnnnnnnnnnnnnnnnnnnnnnnnnnnnnnnnnnnnnnnnnnnnnnnnnnnnnnnnnnnnnnnnnnnnnnnnnnnnnnnnnnnnnnnnnnnnnnnnnnnnnnnnnnnnnnnnnnnnnnnnnnnnnnnnnnnnnnnnnnnnnnnnnnnnnnnnnnnnnnnnnnnnnnnnnnnnnnnnnnnnnnnnnnnnnnnnnnnnnnnnnnnnnnnnnnnnnnnnnnnnnnnnnnnnnnnnnnnnnnnnnnnnnnnnnnnnnnnnnnnnnnnnnnnnnnnnnnnnnnnnnnnnnnnnnnnnnnnnnnnnnnnnnnnnnnnnnnnnnnnnnnnnnnnnnnnnnnnnnnnnnnnnnnnnnnnnnnnnnnnnnnnnnnnnnnnnnnnnnnnnnnnnnnnnnnnnnnnnnnnnnnnnnnnnnnnnnnnnnnnnnnnnnnnnnnnnnnnnnnnnnnnnnnnnnnnnnnnnnnnnnnnnnnnnnnnnnnnnnnnnnnnnnnnnnnnnnnnnnnnnnnnnnnnnnnnnnnnnnnnnnnnnnnnnnnnnnnnnnnnnnnnnnnnnnnnnnnnnnnnnnnnnnnnnnnnnnnnnnnnnnnnnnnnnnnnnnnnnnnnnnnnnnnnnnnnnnnnnnnnnnnnnnnnnnnnnnnnnnnnnnnnnnnnnnnnnnnnnnnnnnnnnnnnnnnnnnnnnnnnnnnnnnnnnnnnnnnnnnnnnnnnnnnnnnnnnnnnnnnnnnnnnnnnnnnnnnnnnnnnnnnnnnnnnnnnnnnnnnnnnnnnnnnnnnnnnnnnnnnnnnnnnnnnnnnnnnnnnnnnnnnnnnnnnnnnnnnnnnnnnnnnnnnnnnnnnnnnnnnnnnnnnnnnnnnnnnnnnnnnnnnnnnnnnnnnnnnnnnnnnnnnnnnnnnnnnnnnnnnnnnnnnnnnnnnnnnnnnnnnnnnnnnnnnnnnnnnnnnnnnnnnnnnnnnnnnnnnnnnnnnnnnnnnnnnnnnnnnnnnnnnnnnnnnnnnnnnnnnnnnnnnnnnnnnnnnnnnnnnnnnnnnnnnnnnnnnnnnnnnnnnnnnnnnnnnnnnnnnnnnnnnnnnnnnnnnnnnnnnnnnnnnnnnnnnnnnnnnnnnnnnnnnnnnnnnnnnnnnnnnnnnnnnnnnnnnnnnnnnnnnnnnnnnnnnnnnnnnnnnnnnnnnnnnnnnnnnnnnnnnnnnnnnnnnnnnnnnnnnnnnnnnnnnnnnnnnnnnnnnnnnnnnnnnnnnnnnnnnnnnnnnnnnnnnnnnnnnnnnnnnnnnnnnnnnnnnnnnnnnnnnnnnnnnnnnnnnnnnnnnnnnnnnnnnnnnnnnnnnnnnnnnnnnnnnnnnnnnnnnnnnnnnnnnnnnnnnnnnnnnnnnnnnnnnnnnnnnnnnnnnnnnnnnnnnnnnnnnnnnnnnnnnnnnnnnnnnnnnnnnnnnnnnnnnnnnnnnnnnnnnnnnnnnnnnnnnnnnnnnnnnnnnnnnnnnnnnnnnnnnnnnnnnnnnnnnnnnnnnnnnnnnnnnnnnnnnnnnnnnnnnnnnnnnnnnnnnnnnnnnnnnnnnnnnnnnnnnnnnnnnnnnnnnnnnnnnnnnnnnnnnnnnnnnnnnnnnnnnnnnnnnnnnnnnnnnnnnnnnnnnnnnnnnnnnnnnnnnnnnnnnnnnnnnnnnnnnnnnnnnnnnnnnnnnnnnnnnnnnnnnnnnnnnnnnnnnnnnnnnnnnnnnnnnnnnnnnnnnnnnnnnnnnnnnnnnnnnnnnnnnnnnnnnnnnnnnnnnnnnnnnnnnnnnnnnnnnnnnnnnnnnnnnnnnnnnnnnnnnnnnnnnnnnnnnnnnnnnnnnnnnnnnnnnnnnnnnnnnnnnnnnnnnnnnnnnnnnnnnnnnnnnnnnnnnnnnnnnnnnnnnnnnnnnnnnnnnnnnnnnnnnnnnnnnnnnnnnnnnnnnnnnnnnnnnnnnnnnnnnnnnnnnnnnnnnnnnnnnnnnnnnnnnnnnnnnnnnnnnnnnnnnnnnnnnnnnnnnnnnnnnnnnnnnnnnnnnnnnnnnnnnnnnnnnnnnnnnnnnnnnnnnnnnnnnnnnnnnnnnnnnnnnnnnnnnnnnnnnnnnnnnnnnnnnnnnnnnnnnnnnnnnnnnnnnnnnnnnnnnnnnnnnnnnnnnnnnnnnnnnnnnnnnnnnnnnnnnnnnnnnnnnnnnnnnnnnnnnnnnnnnnnnnnnnnnnnnnnnnnnnnnnnnnnnnnnnnnnnnnnnnnnnnnnnnnnnnnnnnnnnnnnnnnnnnnnnnnnnnnnnnnnnnnnnnnnnnnnnnnnnnnnnnnnnnnnnnnnnnnnnnnnnnnnnnnnnnnnnnnnnnnnnnnnnnnnnnnnnnnnnnnnnnnnnnnnnnnnnnnnnnnnnnnnnnnnnnnnnnnnnnnnnnnnnnnnnnnnnnnnnnnnnnnnnnnnnnnnnnnnnnnnnnnnnnnnnnnnnnnnnnnnnnnnnnnnnnnnnnnnnnnnnnnnnnnnnnnnnnnnnnnnnnnnnnnnnnnnnnnnnnnnnnnnnnnnnnnnnnnnnnnnnnnnnnnnnnnnnnnnnnnnnnnnnnnnnnnnnnnnnnnnnnnnnnnnnnnnnnnnnnnnnnnnnnnnnnnnnnnnnnnnnnnnnnnnnnnnnnnnnnnnnnnnnnnnnnnnnnnnnnnnnnnnnnnnnnnnnnnnnnnnnnnnnnnnnnnnnnnnnnnnnnnnnnnnnnnnnnnnnnnnnnnnnnnnnnnnnnnnnnnnnnnnnnnnnnnnnnnnnnnnnnnnnnnnnnnnnnnnnnnnnnnnnnnnnnnnnnnnnnnnnnnnnnnnnnnnnnnnnnnnnnnnnnnnnnnnnnnnnnnnnnnnnnnnnnnnnnnnnnnnnnnnnnnnnnnnnnnnnnnnnnnnnnnnnnnnnnnnnnnnnnnnnnnnnnnnnnnnnnnnnnnnnnnnnnnnnnnnnnnnnnnnnnnnnnnnnnnnnnnnnnnnnnnnnnnnnnnnnnnnnnnnnnnnnnnnnnnnnnnnnnnnnnnnnnnnnnnnnnnnnnnnnnnnnnnnnnnnnnnnnnnnnnnnnnnnnnnnnnnnnnnnnnnnnnnnnnnnnnnnnnnnnnnnnnnnnnnnnnnnnnnnnnnnnnnnnnnnnnnnnnnnnnnnnnnnnnnnnnnnnnnnnnnnnnnnnnnnnnnnnnnnnnnnnnnnnnnnnnnnnnnnnnnnnnnnnnnnnnnnnnnnnnnnnnnnnnnnnnnnnnnnnnnnnnnnnnnnnnnnnnnnnnnnnnnnnnnnnnnnnnnnnnnnnnnnnnnnnnnnnnnnnnnnnnnnnnnnnnnnnnnnnnnnnnnnnnnnnnnnnnnnnnnnnnnnnnnnnnnnnnnnnnnnnnnnnnnnnnnnnnnnnnnnnnnnnnnnnnnnnnnnnnnnnnnnnnnnnnnnnnnnnnnnnnnnnnnnnnnnnnnnnnnnnnnnnnnnnnnnnnnnnnnnnnnnnnnnnnnnnnnnnnnnnnnnnnnnnnnnnnnnnnnnnnnnnnnnnnnnnnnnnnnnnnnnnnnnnnnnnnnnnnnnnnnnnnnnnnnnnnnnnnnnnnnnnnnnnnnnnnnnnnnnnnnnnnnnnnnnnnnnnnnnnnnnnnnnnnnnnnnnnnnnnnnnnnnnnnnnnnnnnnnnnnnnnnnnnnnnnnnnnnnnnnnnnnnnnnnnnnnnnnnnnnnnnnnnnnnnnnnnnnnnnnnnnnnnnnnnnnnnnnnnnnnnnnnnnnnnnnnnnnnnnnnnnnnnnnnnnnnnnnnnnnnnnnnnnnnnnnnnnnnnnnnnnnnnnnnnnnnnnnnnnnnnnnnnnnnnnnnnnnnnnnnnnnnnnnnnnnnnnnnnnnnnnnnnnnnnnnnnnnnnnnnnnnnnnnnnnnnnnnnnnnnnnnnnnnnnnnnnnnnnnnnnnnnnnnnnnnnnnnnnnnnnnnnnnnnnnnnnnnnnnnnnnnnnnnnnnnnnnnnnnnnnnnnnnnnnnnnnnnnnnnnnnnnnnnnnnnnnnnnnnnnnnnnnnnnnnnnnnnnnnnnnnnnnnnnnnnnnnnnnnnnnnnnnnnnnnnnnnnnnnnnnnnnnnnnnnnnnnnnnnnnnnnnnnnnnnnnnnnnnnnnnnnnnnnnnnnnnnnnnnnnnnnnnnnnnnnnnnnnnnnnnnnnnnnnnnnnnnnnnnnnnnnnnnnnnnnnnnnnnnnnnnnnnnnnnnnnnnnnnnnnnnnnnnnnnnnnnnnnnnnnnnnnnnnnnnnnnnnnnnnnnnnnnnnnnnnnnnnnnnnnnnnnnnnnnnnnnnnnnnnnnnnnnnnnnnnnnnnnnnnnnnnnnnnnnnnnnnnnnnnnnnnnnnnnnnnnnnnnnnnnnnnnnnnnnnnnnnnnnnnnnnnnnnnnnnnnnnnnnnnnnnnnnnnnnnnnnnnnnnnnnnnnnnnnnnnnnnnnnnnnnnnnnnnnnnnnnnnnnnnnnnnnnnnnnnnnnnnnnnnnnnnnnnnnnnnnnnnnnnnnnnnnnnnnnnnnnnnnnnnnnnnnnnnnnnnnnnnnnnnnnnnnnnnnnnnnnnnnnnnnnnnnnnnnnnnnnnnnnnnnnnnnnnnnnnnnnnnnnnnnnnnnnnnnnnnnnnnnnnnnnnnnnnnnnnnnnnnnnnnnnnnnnnnnnnnnnnnnnnnnnnnnnnnnnnnnnnnnnnnnnnnnnnnnnnnnnnnnnnnnnnnnnnnnnnnnnnnnnnnnnnnnnnnnnnnnnnnnnnnnnnnnnnnnnnnnnnnnnnnnnnnnnnnnnnnnnnnnnnnnnnnnnnnnnnnnnnnnnnnnnnnnnnnnnnnnnnnnnnnnnnnnnnnnnnnnnnnnnnnnnnnnnnnnnnnnnnnnnnnnnnnnnnnnnnnnnnnnnnnnnnnnnnnnnnnnnnnnnnnnnnnnnnnnnnnnnnnnnnnnnnnnnnnnnnnnnnnnnnnnnnnnnnnnnnnnnnnnnnnnnnnnnnnnnnnnnnnnnnnnnnnnnnnnnnnnnnnnnnnnnnnnnnnnnnnnnnnnnnnnnnnnnnnnnnnnnnnnnnnnnnnnnnnnnnnnnnnnnnnnnnnnnnnnnnnnnnnnnnnnnnnnnnnnnnnnnnnnnnnnnnnnnnnnnnnnnnnnnnnnnnnnnnnnnnnnnnnnnnnnnnnnnnnnnnnnnnnnnnnnnnnnnnnnnnnnnnnnnnnnnnnnnnnnnnnnnnnnnnnnnnnnnnnnnnnnnnnnnnnnnnnnnnnnnnnnnnnnnnnnnnnnnnnnnnnnnnnnnnnnnnnnnnnnnnnnnnnnnnnnnnnnnnnnnnnnnnnnnnnnnnnnnnnnnnnnnnnnnnnnnnnnnnnnnnnnnnnnnnnnnnnnnnnnnnnnnnnnnnnnnnnnnnnnnnnnnnnnnnnnnnnnnnnnnnnnnnnnnnnnnnnnnnnnnnnnnnnnnnnnnnnnnnnnnnnnnnnnnnnnnnnnnnnnnnnnnnnnnnnnnnnnnnnnnnnnnnnnnnnnnnnnnnnnnnnnnnnnnnnnnnnnnnnnnnnnnnnnnnnnnnnnnnnnnnnnnnnnnnnnnnnnnnnnnnnnnnnnnnnnnnnnnnnnnnnnnnnnnnnnnnnnnnnnnnnnnnnnnnnnnnnnnnnnnnnnnnnnnnnnnnnnnnnnnnnnnnnnnnnnnnnnnnnnnnnnnnnnnnnnnnnnnnnnnnnnnnnnnnnnnnnnnnnnnnnnnnnnnnnnnnnnnnnnnnnnnnnnnnnnnnnnnnnnnnnnnnnnnnnnnnnnnnnnnnnnnnnnnnnnnnnnnnnnnnnnnnnnnnnnnnnnnnnnnnnnnnnnnnnnnnnnnnnnnnnnnnnnnnnnnnnnnnnnnnnnnnnnnnnnnnnnnnnnnnnnnnnnnnnnnnnnnnnnnnnnnnnnnnnnnnnnnnnnnnnnnnnnnnnnnnnnnnnnnnnnnnnnnnnnnnnnnnnnnnnnnnnnnnnnnnnnnnnnnnnnnnnnnnnnnnnnnnnnnnnnnnnnnnnnnnnnnnnnnnnnnnnnnnnnnnnnnnnnnnnnnnnnnnnnnnnnnnnnnnnnnnnnnnnnnnnnnnnnnnnnnnnnnnnnnnnnnnnnnnnnnnnnnnnnnnnnnnnnnnnnnnnnnnnnnnnnnnnnnnnnnnnnnnnnnnnnnnnnnnnnnnnnnnnnnnnnnnnnnnnnnnnnnnnnnnnnnnnnnnnnnnnnnnnnnnnnnnnnnnnnnnnnnnnnnnnnnnnnnnnnnnnnnnnnnnnnnnnnnnnnnnnnnnnnnnnnnnnnnnnnnnnnnnnnnnnnnnnnnnnnnnnnnnnnnnnnnnnnnnnnnnnnnnnnnnnnnnnnnnnnnnnnnnnnnnnnnnnnnnnnnnnnnnnnnnnnnnnnnnnnnnnnnnnnnnnnnnnnnnnnnnnnnnnnnnnnnnnnnnnnnnnnnnnnnnnnnnnnnnnnnnnnnnnnnnnnnnnnnnnnnnnnnnnnnnnnnnnnnnnnnnnnnnnnnnnnnnnnnnnnnnnnnnnnnnnnnnnnnnnnnnnnnnnnnnnnnnnnnnnnnnnnnnnnnnnnnnnnnnnnnnnnnnnnnnnnnnnnnnnnnnnnnnnnnnnnnnnnnnnnnnnnnnnnnnnnnnnnnnnnnnnnnnnnnnnnnnnnnnnnnnnnnnnnnnnnnnnnnnnnnnnnnnnnnnnnnnnnnnnnnnnnnnnnnnnnnnnnnnnnnnnnnnnnnnnnnnnnnnnnnnnnnnnnnnnnnnnnnnnnnnnnnnnnnnnnnnnnnnnnnnnnnnnnnnnnnnnnnnnnnnnnnnnnnnnnnnnnnnnnnnnnnnnnnnnnnnnnnnnnnnnnnnnnnnnnnnnnnnnnnnnnnnnnnnnnnnnnnnnnnnnnnnnnnnnnnnnnnnnnnnnnnnnnnnnnnnnnnnnnnnnnnnnnnnnnnnnnnnnnnnnnnnnnnnnnnnnnnnnnnnnnnnnnnnnnnnnnnnnnnnnnnnnnnnnnnnnnnnnnnnnnnnnnnnnnnnnnnnnnnnnnnnnnnnnnnnnnnnnnnnnnnnnnnnnnnnnnnnnnnnnnnnnnnnnnnnnnnnnnnnnnnnnnnnnnnnnnnnnnnnnnnnnnnnnnnnnnnnnnnnnnnnnnnnnnnnnnnnnnnnnnnnnnnnnnnnnnnnnnnnnnnnnnnnnnnnnnnnnnnnnnnnnnnnnnnnnnnnnnnnnnnnnnnnnnnnnnnnnnnnnnnnnnnnnnnnnnnnnnnnnnnnnnnnnnnnnnnnnnnnnnnnnnnnnnnnnnnnnnnnnnnnnnnnnnnnnnnnnnnnnnnnnnnnnnnnnnnnnnnnnnnnnnnnnnnnnnnnnnnnnnnnnnnnnnnnnnnnnnnnnnnnnnnnnnnnnnnnnnnnnnnnnnnnnnnnnnnnnnnnnnnnnnnnnnnnnnnnnnnnnnnnnnnnnnnnnnnnnnnnnnnnnnnnnnnnnnnnnnnnnnnnnnnnnnnnnnnnnnnnnnnnnnnnnnnnnnnnnnnnnnnnnnnnnnnnnnnnnnnnnnnnnnnnnnnnnnnnnnnnnnnnnnnnnnnnnnnnnnnnnnnnnnnnnnnnnnnnnnnnnnnnnnnnnnnnnnnnnnnnnnnnnnnnnnnnnnnnnnnnnnnnnnnnnnnnnnnnnnnnnnnnnnnnnnnnnnnnnnnnnnnnnnnnnnnnnnnnnnnnnnnnnnnnnnnnnnnnnnnnnnnnnnnnnnnnnnnnnnnnnnnnnnnnnnnnnnnnnnnnnnnnnnnnnnnnnnnnnnnnnnnnnnnnnnnnnnnnnnnnnnnnnnnnnnnnnnnnnnnnnnnnnnnnnnnnnnnnnnnnnnnnnnnnnnnnnnnnnnnnnnnnnnnnnnnnnnnnnnnnnnnnnnnnnnnnnnnnnnnnnnnnnnnnnnnnnnnnnnnnnnnnnnnnnnnnnnnnnnnnnnnnnnnnnnnnnnnnnnnnnnnnnnnnnnnnnnnnnnnnnnnnnnnnnnnnnnnnnnnnnnnnnnnnnnnnnnnnnnnnnnnnnnnnnnnnnnnnnnnnnnnnnnnnnnnnnnnnnnnnnnnnnnnnnnnnnnnnnnnnnnnnnnnnnnnnnnnnnnnnnnnnnnnnnnnnnnnnnnnnnnnnnnnnnnnnnnnnnnnnnnnnnnnnnnnnnnnnnnnnnnnnnnnnnnnnnnnnnnnnnnnnnnnnnnnnnnnnnnnnnnnnnnnnnnnnnnnnnnnnnnnnnnnnnnnnnnnnnnnnnnnnnnnnnnnnnnnnnnnnnnnnnnnnnnnnnnnnnnnnnnnnnnnnnnnnnnnnnnnnnnnnnnnnnnnnnnnnnnnnnnnnnnnnnnnnnnnnnnnnnnnnnnnnnnnnnnnnnnnnnnnnnnnnnnnnnnnnnnnnnnnnnnnnnnnnnnnnnnnnnnnnnnnnnnnnnnnnnnnnnnnnnnnnnnnnnnnnnnnnnnnnnnnnnnnnnnnnnnnnnnnnnnnnnnnnnnnnnnnnnnnnnnnnnnnnnnnnnnnnnnnnnnnnnnnnnnnnnnnnnnnnnnnnnnnnnnnnnnnnnnnnnnnnnnnnnnnnnnnnnnnnnnnnnnnnnnnnnnnnnnnnnnnnnnnnnnnnnnnnnnnnnnnnnnnnnnnnnnnnnnnnnnnnnnnnnnnnnnnnnnnnnnnnnnnnnnnnnnnnnnnnnnnnnnnnnnnnnnnnnnnnnnnnnnnnnnnnnnnnnnnnnnnnnnnnnnnnnnnnnnnnnnnnnnnnnnnnnnnnnnnnnnnnnnnnnnnnnnnnnnnnnnnnnnnnnnnnnnnnnnnnnnnnnnnnnnnnnnnnnnnnnnnnnnnnnnnnnnnnnnnnnnnnnnnnnnnnnnnnnnnnnnnnnnnnnnnnnnnnnnnnnnnnnnnnnnnnnnnnnnnnnnnnnnnnnnnnnnnnnnnnnnnnnnnnnnnnnnnnnnnnnnnnnnnnnnnnnnnnnnnnnnnnnnnnnnnnnnnnnnnnnnnnnnnnnnnnnnnnnnnnnnnnnnnnnnnnnnnnnnnnnnnnnnnnnnnnnnnnnnnnnnnnnnnnnnnnnnnnnnnnnnnnnnnnnnnnnnnnnnnnnnnnnnnnnnnnnnnnnnnnnnnnnnnnnnnnnnnnnnnnnnnnnnnnnnnnnnnnnnnnnnnnnnnnnnnnnnnnnnnnnnnnnnnnnnnnnnnnnnnnnnnnnnnnnnnnnnnnnnnnnnnnnnnnnnnnnnnnnnnnnnnnnnnnnnnnnnnnnnnnnnnnnnnnnnnnnnnnnnnnnnnnnnnnnnnnnnnnnnnnnnnnnnnnnnnnnnnnnnnnnnnnnnnnnnnnnnnnnnnnnnnnnnnnnnnnnnnnnnnnnnnnnnnnnnnnnnnnnnnnnnnnnnnnnnnnnnnnnnnnnnnnnnnnnnnnnnnnnnnnnnnnnnnnnnnnnnnnnnnnnnnnnnnnnnnnnnnnnnnnnnnnnnnnnnnnnnnnnnnnnnnnnnnnnnnnnnnnnnnnnnnnnnnnnnnnnnnnnnnnnnnnnnnnnnnnnnnnnnnnnnnnnnnnnnnnnnnnnnnnnnnnnnnnnnnnnnnnnnnnnnnnnnnnnnnnnnnnnnnnnnnnnnnnnnnnnnnnnnnnnnnnnnnnnnnnnnnnnnnnnnnnnnnnnnnnnnnnnnnnnnnnnnnnnnnnnnnnnnnnnnnnnnnnnnnnnnnnnnnnnnnnnnnnnnnnnnnnnnnnnnnnnnnnnnnnnnnnnnnnnnnnnnnnnnnnnnnnnnnnnnnnnnnnnnnnnnnnnnnnnnnnnnnnnnnnnnnnnnnnnnnnnnnnnnnnnnnnnnnnnnnnnnnnnnnnnnnnnnnnnnnnnnnnnnnnnnnnnnnnnnnnnnnnnnnnnnnnnnnnnnnnnnnnnnnnnnnnnnnnnnnnnnnnnnnnnnnnnnnnnnnnnnnnnnnnnnnnnnnnnnnnnnnnnnnnnnnnnnnnnnnnnnnnnnnnnnnnnnnnnnnnnnnnnnnnnnnnnnnnnnnnnnnnnnnnnnnnnnnnnnnnnnnnnnnnnnnnnnnnnnnnnnnnnnnnnnnnnnnnnnnnnnnnnnnnnnnnnnnnnnnnnnnnnnnnnnnnnnnnnnnnnnnnnnnnnnnnnnnnnnnnnnnnnnnnnnnnnnnnnnnnnnnnnnnnnnnnnnnnnnnnnnnnnnnnnnnnnnnnnnnnnnnnnnnnnnnnnnnnnnnnnnnnnnnnnnnnnnnnnnnnnnnnnnnnnnnnnnnnnnnnnnnnnnnnnnnnnnnnnnnnnnnnnnnnnnnnnnnnnnnnnnnnnnnnnnnnnnnnnnnnnnnnnnnnnnnnnnnnnnnnnnnnnnnnnnnnnnnnnnnnnnnnnnnnnnnnnnnnnnnnnnnnnnnnnnnnnnnnnnnnnnnnnnnnnnnnnnnnnnnnnnnnnnnnnnnnnnnnnnnnnnnnnnnnnnnnnnnnnnnnnnnnnnnnnnnnnnnnnnnnnnnnnnnnnnnnnnnnnnnnnnnnnnnnnnnnnnnnnnnnnnnnnnnnnnnnnnnnnnnnnnnnnnnnnnnnnnnnnnnnnnnnnnnnnnnnnnnnnnnnnnnnnnnnnnnnnnnnnnnnnnnnnnnnnnnnnnnnnnnnnnnnnnnnnnnnnnnnnnnnnnnnnnnnnnnnnnnnnnnnnnnnnnnnnnnnnnnnnnnnnnnnnnnnnnnnnnnnnnnnnnnnnnnnnnnnnnnnnnnnnnnnnnnnnnnnnnnnnnnnnnnnnnnnnnnnnnnnnnnnnnnnnnnnnnnnnnnnnnnnnnnnnnnnnnnnnnnnnnnnnnnnnnnnnnnnnnnnnnnnnnnnnnnnnnnnnnnnnnnnnnnnnnnnnnnnnnnnnnnnnnnnnnnnnnnnnnnnnnnnnnnnnnnnnnnnnnnnnnnnnnnnnnnnnnnnnnnnnnnnnnnnnnnnnnnnnnnnnnnnnnnnnnnnnnnnnnnnnnnnnnnnnnnnnnnnnnnnnnnnnnnnnnnnnnnnnnnnnnnnnnnnnnnnnnnnnnnnnnnnnnnnnnnnnnnnnnnnnnnnnnnnnnnnnnnnnnnnnnnnnnnnnnnnnnnnnnnnnnnnnnnnnnnnnnnnnnnnnnnnnnnnnnnnnnnnnnnnnnnnnnnnnnnnnnnnnnnnnnnnnnnnnnnnnnnnnnnnnnnnnnnnnnnnnnnnnnnnnnnnnnnnnnnnnnnnnnnnnnnnnnnnnnnnnnnnnnnnnnnnnnnnnnnnnnnnnnnnnnnnnnnnnnnnnnnnnnnnnnnnnnnnnnnnnnnnnnnnnnnnnnnnnnnnnnnnnnnnnnnnnnnnnnnnnnnnnnnnnnnnnnnnnnnnnnnnnnnnnnnnnnnnnnnnnnnnnnnnnnnnnnnnnnnnnnnnnnnnnnnnnnnnnnnnnnnnnnnnnnnnnnnnnnnnnnnnnnnnnnnnnnnnnnnnnnnnnnnnnnnnnnnnnnnnnnnnnnnnnnnnnnnnnnnnnnnnnnnnnnnnnnnnnnnnnnnnnnnnnnnnnnnnnnnnnnnnnnnnnnnnnnnnnnnnnnnnnnnnnnnnnnnnnnnnnnnnnnnnnnnnnnnnnnnnnnnnnnnnnnnnnnnnnnnnnnnnnnnnnnnnnnnnnnnnnnnnnnnnnnnnnnnnnnnnnnnnnnnnnnnnnnnnnnnnnnnnnnnnnnnnnnnnnnnnnnnnnnnnnnnnnnnnnnnnnnnnnnnnnnnnnnnnnnnnnnnnnnnnnnnnnnnnnnnnnnnnnnnnnnnnnnnnnnnnnnnnnnnnnnnnnnnnnnnnnnnnnnnnnnnnnnnnnnnnnnnnnnnnnnnnnnnnnnnnnnnnnnnnnnnnnnnnnnnnnnnnnnnnnnnnnnnnnnnnnnnnnnnnnnnnnnnnnnnnnnnnnnnnnnnnnnnnnnnnnnnnnnnnnnnnnnnnnnnnnnnnnnnnnnnnnnnnnnnnnnnnnnnnnnnnnnnnnnnnnnnnnnnnnnnnnnnnnnnnnnnnnnnnnnnnnnnnnnnnnnnnnnnnnnnnnnnnnnnnnnnnnnnnnnnnnnnnnnnnnnnnnnnnnnnnnnnnnnnnnnnnnnnnnnnnnnnnnnnnnnnnnnnnnnnnnnnnnnnnnnnnnnnnnnnnnnnnnnnnnnnnnnnnnnnnnnnnnnnnnnnnnnnnnnnnnnnnnnnnnnnnnnnnnnnnnnnnnnnnnnnnnnnnnnnnnnnnnnnnnnnnnnnnnnnnnnnnnnnnnnnnnnnnnnnnnnnnnnnnnnnnnnnnnnnnnnnnnnnnnnnnnnnnnnnnnnnnnnnnnnnnnnnnnnnnnnnnnnnnnnnnnnnnnnnnnnnnnnnnnnnnnnnnnnnnnnnnnnnnnnnnnnnnnnnnnnnnnnnnnnnnnnnnnnnnnnnnnnnnnnnnnnnnnnnnnnnnnnnnnnnnnnnnnnnnnnnnnnnnnnnnnnnnnnnnnnnnnnnnnnnnnnnnnnnnnnnnnnnnnnnnnnnnnnnnnnnnnnnnnnnnnnnnnnnnnnnnnnnnnnnnnnnnnnnnnnnnnnnnnnnnnnnnnnnnnnnnnnnnnnnnnnnnnnnnnnnnnnnnnnnnnnnnnnnnnnnnnnnnnnnnnnnnnnnnnnnnnnnnnnnnnnnnnnnnnnnnnnnnnnnnnnnnnnnnnnnnnnnnnnnnnnnnnnnnnnnnnnnnnnnnnnnnnnnnnnnnnnnnnnnnnnnnnnnnnnnnnnnnnnnnnnnnnnnnnnnnnnnnnnnnnnnnnnnnnnnnnnnnnnnnnnnnnnnnnnnnnnnnnnnnnnnnnnnnnnnnnnnnnnnnnnnnnnnnnnnnnnnnnnnnnnnnnnnnnnnnnnnnnnnnnnnnnnnnnnnnnnnnnnnnnnnnnnnnnnnnnnnnnnnnnnnnnnnnnnnnnnnnnnnnnnnnnnnnnnnnnnnnnnnnnnnnnnnnnnnnnnnnnnnnnnnnnnnnnnnnnnnnnnnnnnnnnnnnnnnnnnnnnnnnnnnnnnnnnnnnnnnnnnnnnnnnnnnnnnnnnnnnnnnnnnnnnnnnnnnnnnnnnnnnnnnnnnnnnnnnnnnnnnnnnnnnnnnnnnnnnnnnnnnnnnnnnnnnnnnnnnnnnnnnnnnnnnnnnnnnnnnnnnnnnnnnnnnnnnnnnnnnnnnnnnnnnnnnnnnnnnnnnnnnnnnnnnnnnnnnnnnnnnnnnnnnnnnnnnnnnnnnnnnnnnnnnnnnnnnnnnnnnnnnnnnnnnnnnnnnnnnnnnnnnnnnnnnnnnnnnnnnnnnnnnnnnnnnnnnnnnnnnnnnnnnnnnnnnnnnnnnnnnnnnnnnnnnnnnnnnnnnnnnnnnnnnnnnnnnnnnnnnnnnnnnnnnnnnnnnnnnnnnnnnnnnnnnnnnnnnnnnnnnnnnnnnnnnnnnnnnnnnnnnnnnnnnnnnnnnnnnnnnnnnnnnnnnnnnnnnnnnnnnnnnnnnnnnnnnnnnnnnnnnnnnnnnnnnnnnnnnnnnnnnnnnnnnnnnnnnnnnnnnnnnnnnnnnnnnnnnnnnnnnnnnnnnnnnnnnnnnnnnnnnnnnnnnnnnnnnnnnnnnnnnnnnnnnnnnnnnnnnnnnnnnnnnnnnnnnnnnnnnnnnnnnnnnnnnnnnnnnnnnnnnnnnnnnnnnnnnnnnnnnnnnnnnnnnnnnnnnnnnnnnnnnnnnnnnnnnnnnnnnnnnnnnnnnnnnnnnnnnnnnnnnnnnnnnnnnnnnnnnnnnnnnnnnnnnnnnnnnnnnnnnnnnnnnnnnnnnnnnnnnnnnnnnnnnnnnnnnnnnnnnnnnnnnnnnnnnnnnnnnnnnnnnnnnnnnnnnnnnnnnnnnnnnnnnnnnnnnnnnnnnnnnnnnnnnnnnnnnnnnnnnnnnnnnnnnnnnnnnnnnnnnnnnnnnnnnnnnnnnnnnnnnnnnnnnnnnnnnnnnnnnnnnnnnnnnnnnnnnnnnnnnnnnnnnnnnnnnnnnnnnnnnnnnnnnnnnnnnnnnnnnnnnnnnnnnnnnnnnnnnnnnnnnnnnnnnnnnnnnnnnnnnnnnnnnnnnnnnnnnnnnnnnnnnnnnnnnnnnnnnnnnnnnnnnnnnnnnnnnnnnnnnnnnnnnnnnnnnnnnnnnnnnnnnnnnnnnnnnnnnnnnnnnnnnnnnnnnnnnnnnnnnnnnnnnnnnnnnnnnnnnnnnnnnnnnnnnnnnnnnnnnnnnnnnnnnnnnnnnnnnnnnnnnnnnnnnnnnnnnnnnnnnnnnnnnnnnnnnnnnnnnnnnnnnnnnnnnnnnnnnnnnnnnnnnnnnnnnnnnnnnnnnnnnnnnnnnnnnnnnnnnnnnnnnnnnnnnnnnnnnnnnnnnnnnnnnnnnnnnnnnnnnnnnnnnnnnnnnnnnnnnnnnnnnnnnnnnnnnnnnnnnnnnnnnnnnnnnnnnnnnnnnnnnnnnnnnnnnnnnnnnnnnnnnnnnnnnnnnnnnnnnnnnnnnnnnnnnnnnnnnnnnnnnnnnnnnnnnnnnnnnnnnnnnnnnnnnnnnnnnnnnnnnnnnnnnnnnnnnnnnnnnnnnnnnnnnnnnnnnnnnnnnnnnnnnnnnnnnnnnnnnnnnnnnnnnnnnnnnnnnnnnnnnnnnnnnnnnnnnnnnnnnnnnnnnnnnnnnnnnnnnnnnnnnnnnnnnnnnnnnnnnnnnnnnnnnnnnnnnnnnnnnnnnnnnnnnnnnnnnnnnnnnnnnnnnnnnnnnnnnnnnnnnnnnnnnnnnnnnnnnnnnnnnnnnnnnnnnnnnnnnnnnnnnnnnnnnnnnnnnnnnnnnnnnnnnnnnnnnnnnnnnnnnnnnnnnnnnnnnnnnnnnnnnnnnnnnnnnnnnnnnnnnnnnnnnnnnnnnnnnnnnnnnnnnnnnnnnnnnnnnnnnnnnnnnnnnnnnnnnnnnnnnnnnnnnnnnnnnnnnnnnnnnnnnnnnnnnnnnnnnnnnnnnnnnnnnnnnnnnnnnnnnnnnnnnnnnnnnnnnnnnnnnnnnnnnnnnnnnnnnnnnnnnnnnnnnnnnnnnnnnnnnnnnnnnnnnnnnnnnnnnnnnnnnnnnnnnnnnnnnnnnnnnnnnnnnnnnnnnnnnnnnnnnnnnnnnnnnnnnnnnnnnnnnnnnnnnnnnnnnnnnnnnnnnnnnnnnnnnnnnnnnnnnnnnnnnnnnnnnnnnnnnnnnnnnnnnnnnnnnnnnnnnnnnnnnnnnnnnnnnnnnnnnnnnnnnnnnnnnnnnnnnnnnnnnnnnnnnnnnnnnnnnnnnnnnnnnnnnnnnnnnnnnnnnnnnnnnnnnnnnnnnnnnnnnnnnnnnnnnnnnnnnnnnnnnnnnnnnnnnnnnnnnnnnnnnnnnnnnnnnnnnnnnnnnnnnnnnnnnnnnnnnnnnnnnnnnnnnnnnnnnnnnnnnnnnnnnnnnnnnnnnnnnnnnnnnnnnnnnnnnnnnnnnnnnnnnnnnnnnnnnnnnnnnnnnnnnnnnnnnnnnnnnnnnnnnnnnnnnnnnnnnnnnnnnnnnnnnnnnnnnnnnnnnnnnnnnnnnnnnnnnnnnnnnnnnnnnnnnnnnnnnnnnnnnnnnnnnnnnnnnnnnnnnnnnnnnnnnnnnnnnnnnnnnnnnnnnnnnnnnnnnnnnnnnnnnnnnnnnnnnnnnnnnnnnnnnnnnnnnnnnnnnnnnnnnnnnnnnnnnnnnnnnnnnnnnnnnnnnnnnnnnnnnnnnnnnnnnnnnnnnnnnnnnnnnnnnnnnnnnnnnnnnnnnnnnnnnnnnnnnnnnnnnnnnnnnnnnnnnnnnnnnnnnnnnnnnnnnnnnnnnnnnnnnnnnnnnnnnnnnnnnnnnnnnnnnnnnnnnnnnnnnnnnnnnnnnnnnnnnnnnnnnnnnnnnnnnnnnnnnnnnnnnnnnnnnnnnnnnnnnnnnnnnnnnnnnnnnnnnnnnnnnnnnnnnnnnnnnnnnnnnnnnnnnnnnnnnnnnnnnnnnnnnnnnnnnnnnnnnnnnnnnnnnnnnnnnnnnnnnnnnnnnnnnnnnnnnnnnnnnnnnnnnnnnnnnnnnnnnnnnnnnnnnnnnnnnnnnnnnnnnnnnnnnnnnnnnnnnnnnnnnnnnnnnnnnnnnnnnnnnnnnnnnnnnnnnnnnnnnnnnnnnnnnnnnnnnnnnnnnnnnnnnnnnnnnnnnnnnnnnnnnnnnnnnnnnnnnnnnnnnnnnnnnnnnnnnnnnnnnnnnnnnnnnnnnnnnnnnnnnnnnnnnnnnnnnnnnnnnnnnnnnnnnnnnnnnnnnnnnnnnnnnnnnnnnnnnnnnnnnnnnnnnnnnnnnnnnnnnnnnnnnnnnnnnnnnnnnnnnnnnnnnnnnnnnnnnnnnnnnnnnnnnnnnnnnnnnnnnnnnnnnnnnnnnnnnnnnnnnnnnnnnnnnnnnnnnnnnnnnnnnnnnnnnnnnnnnnnnnnnnnnnnnnnnnnnnnnnnnnnnnnnnnnnnnnnnnnnnnnnnnnnnnnnnnnnnnnnnnnnnnnnnnnnnnnnnnnnnnnnnnnnnnnnnnnnnnnnnnnnnnnnnnnnnnnnnnnnnnnnnnnnnnnnnnnnnnnnnnnnnnnnnnnnnnnnnnnnnnnnnnnnnnnnnnnnnnnnnnnnnnnnnnnnnnnnnnnnnnnnnnnnnnnnnnnnnnnnnnnnnnnnnnnnnnnnnnnnnnnnnnnnnnnnnnnnnnnnnnnnnnnnnnnnnnnnnnnnnnnnnnnnnnnnnnnnnnnnnnnnnnnnnnnnnnnnnnnnnnnnnnnnnnnnnnnnnnnnnnnnnnnnnnnnnnnnnnnnnnnnnnnnnnnnnnnnnnnnnnnnnnnnnnnnnnnnnnnnnnnnnnnnnnnnnnnnnnnnnnnnnnnnnnnnnnnnnnnnnnnnnnnnnnnnnnnnnnnnnnnnnnnnnnnnnnnnnnnnnnnnnnnnnnnnnnnnnnnnnnnnnnnnnnnnnnnnnnnnnnnnnnnnnnnnnnnnnnnnnnnnnnnnnnnnnnnnnnnnnnnnnnnnnnnnnnnnnnnnnnnnnnnnnnnnnnnnnnnnnnnnnnnnnnnnnnnnnnnnnnnnnnnnnnnnnnnnnnnnnnnnnnnnnnnnnnnnnnnnnnnnnnnnnnnnnnnnnnnnnnnnnnnnnnnnnnnnnnnnnnnnnnnnnnnnnnnnnnnnnnnnnnnnnnnnnnnnnnnnnnnnnnnnnnnnnnnnnnnnnnnnnnnnnnnnnnnnnnnnnnnnnnnnnnnnnnnnnnnnnnnnnnnnnnnnnnnnnnnnnnnnnnnnnnnnnnnnnnnnnnnnnnnnnnnnnnnnnnnnnnnnnnnnnnnnnnnnnnnnnnnnnnnnnnnnnnnnnnnnnnnnnnnnnnnnnnnnnnnnnnnnnnnnnnnnnnnnnnnnnnnnnnnnnnnnnnnnnnnnnnnnnnnnnnnnnnnnnnnnnnnnnnnnnnnnnnnnnnnnnnnnnnnnnnnnnnnnnnnnnnnnnnnnnnnnnnnnnnnnnnnnnnnnnnnnnnnnnnnnnnnnnnnnnnnnnnnnnnnnnnnnnnnnnnnnnnnnnnnnnnnnnnnnnnnnnnnnnnnnnnnnnnnnnnnnnnnnnnnnnnnnnnnnnnnnnnnnnnnnnnnnnnnnnnnnnnnnnnnnnnnnnnnnnnnnnnnnnnnnnnnnnnnnnnnnnnnnnnnnnnnnnnnnnnnnnnnnnnnnnnnnnnnnnnnnnnnnnnnnnnnnnnnnnnnnnnnnnnnnnnnnnnnnnnnnnnnnnnnnnnnnnnnnnnnnnnnnnnnnnnnnnnnnnnnnnnnnnnnnnnnnnnnnnnnnnnnnnnnnnnnnnnnnnnnnnnnnnnnnnnnnnnnnnnnnnnnnnnnnnnnnnnnnnnnnnnnnnnnnnnnnnnnnnnnnnnnnnnnnnnnnnnnnnnnnnnnnnnnnnnnnnnnnnnnnnnnnnnnnnnnnnnnnnnnnnnnnnnnnnnnnnnnnnnnnnnnnnnnnnnnnnnnnnnnnnnnnnnnnnnnnnnnnnnnnnnnnnnnnnnnnnnnnnnnnnnnnnnnnnnnnnnnnnnnnnnnnnnnnnnnnnnnnnnnnnnnnnnnnnnnnnnnnnnnnnnnnnnnnnnnnnnnnnnnnnnnnnnnnnnnnnnnnnnnnnnnnnnnnnnnnnnnnnnnnnnnnnnnnnnnnnnnnnnnnnnnnnnnnnnnnnnnnnnnnnnnnnnnnnnnnnnnnnnnnnnnnnnnnnnnnnnnnnnnnnnnnnnnnnnnnnnnnnnnnnnnnnnnnnnnnnnnnnnnnnnnnnnnnnnnnnnnnnnnnnnnnnnnnnnnnnnnnnnnnnnnnnnnnnnnnnnnnnnnnnnnnnnnnnnnnnnnnnnnnnnnnnnnnnnnnnnnnnnnnnnnnnnnnnnnnnnnnnnnnnnnnnnnnnnnnnnnnnnnnnnnnnnnnnnnnnnnnnnnnnnnnnnnnnnnnnnnnnnnnnnnnnnnnnnnnnnnnnnnnnnnnnnnnnnnnnnnnnnnnnnnnnnnnnnnnnnnnnnnnnnnnnnnnnnnnnnnnnnnnnnnnnnnnnnnnnnnnnnnnnnnnnnnnnnnnnnnnnnnnnnnnnnnnnnnnnnnnnnnnnnnnnnnnnnnnnnnnnnnnnnnnnnnnnnnnnnnnnnnnnnnnnnnnnnnnnnnnnnnnnnnnnnnnnnnnnnnnnnnnnnnnnnnnnnnnnnnnnnnnnnnnnnnnnnnnnnnnnnnnnnnnnnnnnnnnnnnnnnnnnnnnnnnnnnnnnnnnnnnnnnnnnnnnnnnnnnnnnnnnnnnnnnnnnnnnnnnnnnnnnnnnnnnnnnnnnnnnnnnnnnnnnnnnnnnnnnnnnnnnnnnnnnnnnnnnnnnnnnnnnnnnnnnnnnnnnnnnnnnnnnnnnnnnnnnnnnnnnnnnnnnnnnnnnnnnnnnnnnnnnnnnnnnnnnnnnnnnnnnnnnnnnnnnnnnnnnnnnnnnnnnnnnnnnnnnnnnnnnnnnnnnnnnnnnnnnnnnnnnnnnnnnnnnnnnnnnnnnnnnnnnnnnnnnnnnnnnnnnnnnnnnnnnnnnnnnnnnnnnnnnnnnnnnnnnnnnnnnnnnnnnnnnnnnnnnnnnnnnnnnnnnnnnnnnnnnnnnnnnnnnnnnnnnnnnnnnnnnnnnnnnnnnnnnnnnnnnnnnnnnnnnnnnnnnnnnnnnnnnnnnnnnnnnnnnnnnnnnnnnnnnnnnnnnnnnnnnnnnnnnnnnnnnnnnnnnnnnnnnnnnnnnnnnnnnnnnnnnnnnnnnnnnnnnnnnnnnnnnnnnnnnnnnnnnnnnnnnnnnnnnnnnnnnnnnnnnnnnnnnnnnnnnnnnnnnnnnnnnnnnnnnnnnnnnnnnnnnnnnnnnnnnnnnnnnnnnnnnnnnnnnnnnnnnnnnnnnnnnnnnnnnnnnnnnnnnnnnnnnnnnnnnnnnnnnnnnnnnnnnnnnnnnnnnnnnnnnnnnnnnnnnnnnnnnnnnnnnnnnnnnnnnnnnnnnnnnnnnnnnnnnnnnnnnnnnnnnnnnnnnnnnnnnnnnnnnnnnnnnnnnnnnnnnnnnnnnnnnnnnnnnnnnnnnnnnnnnnnnnnnnnnnnnnnnnnnnnnnnnnnnnnnnnnnnnnnnnnnnnnnnnnnnnnnnnnnnnnnnnnnnnnnnnnnnnnnnnnnnnnnnnnnnnnnnnnnnnnnnnnnnnnnnnnnnnnnnnnnnnnnnnnnnnnnnnnnnnnnnnnnnnnnnnnnnnnnnnnnnnnnnnnnnnnnnnnnnnnnnnnnnnnnnnnnnnnnnnnnnnnnnnnnnnnnnnnnnnnnnnnnnnnnnnnnnnnnnnnnnnnnnnnnnnnnnnnnnnnnnnnnnnnnnnnnnnnnnnnnnnnnnnnnnnnnnnnnnnnnnnnnnnnnnnnnnnnnnnnnnnnnnnnnnnnnnnnnnnnnnnnnnnnnnnnnnnnnnnnnnnnnnnnnnnnnnnnnnnnnnnnnnnnnnnnnnnnnnnnnnnnnnnnnnnnnnnnnnnnnnnnnnnnnnnnnnnnnnnnnnnnnnnnnnnnnnnnnnnnnnnnnnnnnnnnnnnnnnnnnnnnnnnnnnnnnnnnnnnnnnnnnnnnnnnnnnnnnnnnnnnnnnnnnnnnnnnnnnnnnnnnnnnnnnnnnnnnnnnnnnnnnnnnnnnnnnnnnnnnnnnnnnnnnnnnnnnnnnnnnnnnnnnnnnnnnnnnnnnnnnnnnnnnnnnnnnnnnnnnnnnnnnnnnnnnnnnnnnnnnnnnnnnnnnnnnnnnnnnnnnnnnnnnnnnnnnnnnnnnnnnnnnnnnnnnnnnnnnnnnnnnnnnnnnnnnnnnnnnnnnnnnnnnnnnnnnnnnnnnnnnnnnnnnnnnnnnnnnnnnnnnnnnnnnnnnnnnnnnnnnnnnnnnnnnnnnnnnnnnnnnnnnnnnnnnnnnnnnnnnnnnnnnnnnnnnnnnnnnnnnnnnnnnnnnnnnnnnnnnnnnnnnnnnnnnnnnnnnnnnnnnnnnnnnnnnnnnnnnnnnnnnnnnnnnnnnnnnnnnnnnnnnnnnnnnnnnnnnnnnnnnnnnnnnnnnnnnnnnnnnnnnnnnnnnnnnnnnnnnnnnnnnnnnnnnnnnnnnnnnnnnnnnnnnnnnnnnnnnnnnnnnnnnnnnnnnnnnnnnnnnnnnnnnnnnnnnnnnnnnnnnnnnnnnnnnnnnnnnnnnnnnnnnnnnnnnnnnnnnnnnnnnnnnnnnnnnnnnnnnnnnnnnnnnnnnnnnnnnnnnnnnnnnnnnnnnnnnnnnnnnnnnnnnnnnnnnnnnnnnnnnnnnnnnnnnnnnnnnnnnnnnnnnnnnnnnnnnnnnnnnnnnnnnnnnnnnnnnnnnnnnnnnnnnnnnnnnnnnnnnnnnnnnnnnnnnnnnnnnnnnnnnnnnnnnnnnnnnnnnnnnnnnnnnnnnnnnnnnnnnnnnnnnnnnnnnnnnnnnnnnnnnnnnnnnnnnnnnnnnnnnnnnnnnnnnnnnnnnnnnnnnnnnnnnnnnnnnnnnnnnnnnnnnnnnnnnnnnnnnnnnnnnnnnnnnnnnnnnnnnnnnnnnnnnnnnnnnnnnnnnnnnnnnnnnnnnnnnnnnnnnnnnnnnnnnnnnnnnnnnnnnnnnnnnnnnnnnnnnnnnnnnnnnnnnnnnnnnnnnnnnnnnnnnnnnnnnnnnnnnnnnnnnnnnnnnnnnnnnnnnnnnnnnnnnnnnnnnnnnnnnnnnnnnnnnnnnnnnnnnnnnnnnnnnnnnnnnnnnnnnnnnnnnnnnnnnnnnnnnnnnnnnnnnnnnnnnnnnnnnnnnnnnnnnnnnnnnnnnnnnnnnnnnnnnnnnnnnnnnnnnnnnnnnnnnnnnnnnnnnnnnnnnnnnnnnnnnnnnnnnnnnnnnnnnnnnnnnnnnnnnnnnnnnnnnnnnnnnnnnnnnnnnnnnnnnnnnnnnnnnnnnnnnnnnnnnnnnnnnnnnnnnnnnnnnnnnnnnnnnnnnnnnnnnnnnnnnnnnnnnnnnnnnnnnnnnnnnnnnnnnnnnnnnnnnnnnnnnnnnnnnnnnnnnnnnnnnnnnnnnnnnnnnnnnnnnnnnnnnnnnnnnnnnnnnnnnnnnnnnnnnnnnnnnnnnnnnnnnnnnnnnnnnnnnnnnnnnnnnnnnnnnnnnnnnnnnnnnnnnnnnnnnnnnnnnnnnnnnnnnnnnnnnnnnnnnnnnnnnnnnnnnnnnnnnnnnnnnnnnnnnnnnnnnnnnnnnnnnnnnnnnnnnnnnnnnnnnnnnnnnnnnnnnnnnnnnnnnnnnnnnnnnnnnnnnnnnnnnnnnnnnnnnnnnnnnnnnnnnnnnnnnnnnnnnnnnnnnnnnnnnnnnnnnnnnnnnnnnnnnnnnnnnnnnnnnnnnnnnnnnnnnnnnnnnnnnnnnnnnnnnnnnnnnnnnnnnnnnnnnnnnnnnnnnnnnnnnnnnnnnnnnnnnnnnnnnnnnnnnnnnnnnnnnnnnnnnnnnnnnnnnnnnnnnnnnnnnnnnnnnnnnnnnnnnnnnnnnnnnnnnnnnnnnnnnnnnnnnnnnnnnnnnnnnnnnnnnnnnnnnnnnnnnnnnnnnnnnnnnnnnnnnnnnnnnnnnnnnnnnnnnnnnnnnnnnnnnnnnnnnnnnnnnnnnnnnnnnnnnnnnnnnnnnnnnnnnnnnnnnnnnnnnnnnnnnnnnnnnnnnnnnnnnnnnnnnnnnnnnnnnnnnnnnnnnnnnnnnnnnnnnnnnnnnnnnnnnnnnnnnnnnnnnnnnnnnnnnnnnnnnnnnnnnnnnnnnnnnnnnnnnnnnnnnnnnnnnnnnnnnnnnnnnnnnnnnnnnnnnnnnnnnnnnnnnnnnnnnnnnnnnnnnnnnnnnnnnnnnnnnnnnnnnnnnnnnnnnnnnnnnnnnnnnnnnnnnnnnnnnnnnnnnnnnnnnnnnnnnnnnnnnnnnnnnnnnnnnnnnnnnnnnnnnnnnnnnnnnnnnnnnnnnnnnnnnnnnnnnnnnnnnnnnnnnnnnnnnnnnnnnnnnnnnnnnnnnnnnnnnnnnnnnnnnnnnnnnnnnnnnnnnnnnnnnnnnnnnnnnnnnnnnnnnnnnnnnnnnnnnnnnnnnnnnnnnnnnnnnnnnnnnnnnnnnnnnnnnnnnnnnnnnnnnnnnnnnnnnnnnnnnnnnnnnnnnnnnnnnnnnnnnnnnnnnnnnnnnnnnnnnnnnnnnnnnnnnnnnnnnnnnnnnnnnnnnnnnnnnnnnnnnnnnnnnnnnnnnnnnnnnnnnnnnnnnnnnnnnnnnnnnnnnnnnnnnnnnnnnnnnnnnnnnnnnnnnnnnnnnnnnnnnnnnnnnnnnnnnnnnnnnnnnnnnnnnnnnnnnnnnnnnnnnnnnnnnnnnnnnnnnnnnnnnnnnnnnnnnnnnnnnnnnnnnnnnnnnnnnnnnnnnnnnnnnnnnnnnnnnnnnnnnnnnnnnnnnnnnnnnnnnnnnnnnnnnnnnnnnnnnnnnnnnnnnnnnnnnnnnnnnnnnnnnnnnnnnnnnnnnnnnnnnnnnnnnnnnnnnnnnnnnnnnnnnnnnnnnnnnnnnnnnnnnnnnnnnnnnnnnnnnnnnnnnnnnnnnnnnnnnnnnnnnnnnnnnnnnnnnnnnnnnnnnnnnnnnnnnnnnnnnnnnnnnnnnnnnnnnnnnnnnnnnnnnnnnnnnnnnnnnnnnnnnnnnnnnnnnnnnnnnnnnnnnnnnnnnnnnnnnnnnnnnnnnnnnnnnnnnnnnnnnnnnnnnnnnnnnnnnnnnnnnnnnnnnnnnnnnnnnnnnnnnnnnnnnnnnnnnnnnnnnnnnnnnnnnnnnnnnnnnnnnnnnnnnnnnnnnnnnnnnnnnnnnnnnnnnnnnnnnnnnnnnnnnnnnnnnnnnnnnnnnnnnnnnnnnnnnnnnnnnnnnnnnnnnnnnnnnnnnnnnnnnnnnnnnnnnnnnnnnnnnnnnnnnnnnnnnnnnnnnnnnnnnnnnnnnnnnnnnnnnnnnnnnnnnnnnnnnnnnnnnnnnnnnnnnnnnnnnnnnnnnnnnnnnnnnnnnnnnnnnnnnnnnnnnnnnnnnnnnnnnnnnnnnnnnnnnnnnnnnnnnnnnnnnnnnnnnnnnnnnnnnnnnnnnnnnnnnnnnnnnnnnnnnnnnnnnnnnnnnnnnnnnnnnnnnnnnnnnnnnnnnnnnnnnnnnnnnnnnnnnnnnnnnnnnnnnnnnnnnnnnnnnnnnnnnnnnnnnnnnnnnnnnnnnnnnnnnnnnnnnnnnnnnnnnnnnnnnnnnnnnnnnnnnnnnnnnnnnnnnnnnnnnnnnnnnnnnnnnnnnnnnnnnnnnnnnnnnnnnnnnnnnnnnnnnnnnnnnnnnnnnnnnnnnnnnnnnnnnnnnnnnnnnnnnnnnnnnnnnnnnnnnnnnnnnnnnnnnnnnnnnnnnnnnnnnnnnnnnnnnnnnnnnnnnnnnnnnnnnnnnnnnnnnnnnnnnnnnnnnnnnnnnnnnnnnnnnnnnnnnnnnnnnnnnnnnnnnnnnnnnnnnnnnnnnnnnnnnnnnnnnnnnnnnnnnnnnnnnnnnnnnnnnnnnnnnnnnnnnnnnnnnnnnnnnnnnnnnnnnnnnnnnnnnnnnnnnnnnnnnnnnnnnnnnnnnnnnnnnnnnnnnnnnnnnnnnnnnnnnnnnnnnnnnnnnnnnnnnnnnnnnnnnnnnnnnnnnnnnnnnnnnnnnnnnnnnnnnnnnnnnnnnnnnnnnnnnnnnnnnnnnnnnnnnnnnnnnnnnnnnnnnnnnnnnnnnnnnnnnnnnnnnnnnnnnnnnnnnnnnnnnnnnnnnnnnnnnnnnnnnnnnnnnnnnnnnnnnnnnnnnnnnnnnnnnnnnnnnnnnnnnnnnnnnnnnnnnnnnnnnnnnnnnnnnnnnnnnnnnnnnnnnnnnnnnnnnnnnnnnnnnnnnnnnnnnnnnnnnnnnnnnnnnnnnnnnnnnnnnnnnnnnnnnnnnnnnnnnnnnnnnnnnnnnnnnnnnnnnnnnnnnnnnnnnnnnnnnnnnnnnnnnnnnnnnnnnnnnnnnnnnnnnnnnnnnnnnnnnnnnnnnnnnnnnnnnnnnnnnnnnnnnnnnnnnnnnnnnnnnnnnnnnnnnnnnnnnnnnnnnnnnnnnnnnnnnnnnnnnnnnnnnnnnnnnnnnnnnnnnnnnnnnnnnnnnnnnnnnnnnnnnnnnnnnnnnnnnnnnnnnnnnnnnnnnnnnnnnnnnnnnnnnnnnnnnnnnnnnnnnnnnnnnnnnnnnnnnnnnnnnnnnnnnnnnnnnnnnnnnnnnnnnnnnnnnnnnnnnnnnnnnnnnnnnnnnnnnnnnnnnnnnnnnnnnnnnnnnnnnnnnnnnnnnnnnnnnnnnnnnnnnnnnnnnnnnnnnnnnnnnnnnnnnnnnnnnnnnnnnnnnnnnnnnnnnnnnnnnnnnnnnnnnnnnnnnnnnnnnnnnnnnnnnnnnnnnnnnnnnnnnnnnnnnnnnnnnnnnnnnnnnnnnnnnnnnnnnnnnnnnnnnnnnnnnnnnnnnnnnnnnnnnnnnnnnnnnnnnnnnnnnnnnnnnnnnnnnnnnnnnnnnnnnnnnnnnnnnnnnnnnnnnnnnnnnnnnnnnnnnnnnnnnnnnnnnnnnnnnnnnnnnnnnnnnnnnnnnnnnnnnnnnnnnnnnnnnnnnnnnnnnnnnnnnnnnnnnnnnnnnnnnnnnnnnnnnnnnnnnnnnnnnnnnnnnnnnnnnnnnnnnnnnnnnnnnnnnnnnnnnnnnnnnnnnnnnnnnnnnnnnnnnnnnnnnnnnnnnnnnnnnnnnnnnnnnnnnnnnnnnnnnnnnnnnnnnnnnnnnnnnnnnnnnnnnnnnnnnnnnnnnnnnnnnnnnnnnnnnnnnnnnnnnnnnnnnnnnnnnnnnnnnnnnnnnnnnnnnnnnnnnnnnnnnnnnnnnnnnnnnnnnnnnnnnnnnnnnnnnnnnnnnnnnnnnnnnnnnnnnnnnnnnnnnnnnnnnnnnnnnnnnnnnnnnnnnnnnnnnnnnnnnnnnnnnnnnnnnnnnnnnnnnnnnnnnnnnnnnnnnnnnnnnnnnnnnnnnnnnnnnnnnnnnnnnnnnnnnnnnnnnnnnnnnnnnnnnnnnnnnnnnnnnnnnnnnnnnnnnnnnnnnnnnnnnnnnnnnnnnnnnnnnnnnnnnnnnnnnnnnnnnnnnnnnnnnnnnnnnnnnnnnnnnnnnnnnnnnnnnnnnnnnnnnnnnnnnnnnnnnnnnnnnnnnnnnnnnnnnnnnnnnnnnnnnnnnnnnnnnnnnnnnnnnnnnnnnnnnnnnnnnnnnnnnnnnnnnnnnnnnnnnnnnnnnnnnnnnnnnnnnnnnnnnnnnnnnnnnnnnnnnnnnnnnnnnnnnnnnnnnnnnnnnnnnnnnnnnnnnnnnnnnnnnnnnnnnnnnnnnnnnnnnnnnnnnnnnnnnnnnnnnnnnnnnnnnnnnnnnnnnnnnnnnnnnnnnnnnnnnnnnnnnnnnnnnnnnnnnnnnnnnnnnnnnnnnnnnnnnnnnnnnnnnnnnnnnnnnnnnnnnnnnnnnnnnnnnnnnnnnnnnnnnnnnnnnnnnnnnnnnnnnnnnnnnnnnnnnnnnnnnnnnnnnnnnnnnnnnnnnnnnnnnnnnnnnnnnnnnnnnnnnnnnnnnnnnnnnnnnnnnnnnnnnnnnnnnnnnnnnnnnnnnnnnnnnnnnnnnnnnnnnnnnnnnnnnnnnnnnnnnnnnnnnnnnnnnnnnnnnnnnnnnnnnnnnnnnnnnnnnnnnnnnnnnnnnnnnnnnnnnnnnnnnnnnnnnnnnnnnnnnnnnnnnnnnnnnnnnnnnnnnnnnnnnnnnnnnnnnnnnnnnnnnnnnnnnnnnnnnnnnnnnnnnnnnnnnnnnnnnnnnnnnnnnnnnnnnnnnnnnnnnnnnnnnnnnnnnnnnnnnnnnnnnnnnnnnnnnnnnnnnnnnnnnnnnnnnnnnnnnnnnnnnnnnnnnnnnnnnnnnnnnnnnnnnnnnnnnnnnnnnnnnnnnnnnnnnnnnnnnnnnnnnnnnnnnnnnnnnnnnnnnnnnnnnnnnnnnnnnnnnnnnnnnnnnnnnnnnnnnnnnnnnnnnnnnnnnnnnnnnnnnnnnnnnnnnnnnnnnnnnnnnnnnnnnnnnnnnnnnnnnnnnnnnnnnnnnnnnnnnnnnnnnnnnnnnnnnnnnnnnnnnnnnnnnnnnnnnnnnnnnnnnnnnnnnnnnnnnnnnnnnnnnnnnnnnnnnnnnnnnnnnnnnnnnnnnnnnnnnnnnnnnnnnnnnnnnnnnnnnnnnnnnnnnnnnnnnnnnnnnnnnnnnnnnnnnnnnnnnnnnnnnnnnnnnnnnnnnnnnnnnnnnnnnnnnnnnnnnnnnnnnnnnnnnnnnnnnnnnnnnnnnnnnnnnnnnnnnnnnnnnnnnnnnnnnnnnnnnnnnnnnnnnnnnnnnnnnnnnnnnnnnnnnnnnnnnnnnnnnnnnnnnnnnnnnnnnnnnnnnnnnnnnnnnnnnnnnnnnnnnnnnnnnnnnnnnnnnnnnnnnnnnnnnnnnnnnnnnnnnnnnnnnnnnnnnnnnnnnnnnnnnnnnnnnnnnnnnnnnnnnnnnnnnnnnnnnnnnnnnnnnnnnnnnnnnnnnnnnnnnnnnnnnnnnnnnnnnnnnnnnnnnnnnnnnnnnnnnnnnnnnnnnnnnnnnnnnnnnnnnnnnnnnnnnnnnnnnnnnnnnnnnnnnnnnnnnnnnnnnnnnnnnnnnnnnnnnnnnnnnnnnnnnnnnnnnnnnnnnnnnnnnnnnnnnnnnnnnnnnnnnnnnnnnnnnnnnnnnnnnnnnnnnnnnnnnnnnnnnnnnnnnnnnnnnnnnnnnnnnnnnnnnnnnnnnnnnnnnnnnnnnnnnnnnnnnnnnnnnnnnnnnnnnnnnnnnnnnnnnnnnnnnnnnnnnnnnnnnnnnnnnnnnnnnnnnnnnnnnnnnnnnnnnnnnnnnnnnnnnnnnnnnnnnnnnnnnnnnnnnnnnnnnnnnnnnnnnnnnnnnnnnnnnnnnnnnnnnnnnnnnnnnnnnnnnnnnnnnnnnnnnnnnnnnnnnnnnnnnnnnnnnnnnnnnnnnnnnnnnnnnnnnnnnnnnnnnnnnnnnnnnnnnnnnnnnnnnnnnnnnnnnnnnnnnnnnnnnnnnnnnnnnnnnnnnnnnnnnnnnnnnnnnnnnnnnnnnnnnnnnnnnnnnnnnnnnnnnnnnnnnnnnnnnnnnnnnnnnnnnnnnnnnnnnnnnnnnnnnnnnnnnnnnnnnnnnnnnnnnnnnnnnnnnnnnnnnnnnnnnnnnnnnnnnnnnnnnnnnnnnnnnnnnnnnnnnnnnnnnnnnnnnnnnnnnnnnnnnnnnnnnnnnnnnnnnnnnnnnnnnnnnnnnnnnnnnnnnnnnnnnnnnnnnnnnnnnnnnnnnnnnnnnnnnnnnnnnnnnnnnnnnnnnnnnnnnnnnnnnnnnnnnnnnnnnnnnnnnnnnnnnnnnnnnnnnnnnnnnnnnnnnnnnnnnnnnnnnnnnnnnnnnnnnnnnnnnnnnnnnnnnnnnnnnnnnnnnnnnnnnnnnnnnnnnnnnnnnnnnnnnnnnnnnnnnnnnnnnnnnnnnnnnnnnnnnnnnnnnnnnnnnnnnnnnnnnnnnnnnnnnnnnnnnnnnnnnnnnnnnnnnnnnnnnnnnnnnnnnnnnnnnnnnnnnnnnnnnnnnnnnnnnnnnnnnnnnnnnnnnnnnnnnnnnnnnnnnnnnnnnnnnnnnnnnnnnnnnnnnnnnnnnnnnnnnnnnnnnnnnnnnnnnnnnnnnnnnnnnnnnnnnnnnnnnnnnnnnnnnnnnnnnnnnnnnnnnnnnnnnnnnnnnnnnnnnnnnnnnnnnnnnnnnnnnnnnnnnnnnnnnnnnnnnnnnnnnnnnnnnnnnnnnnnnnnnnnnnnnnnnnnnnnnnnnnnnnnnnnnnnnnnnnnnnnnnnnnnnnnnnnnnnnnnnnnnnnnnnnnnnnnnnnnnnnnnnnnnnnnnnnnnnnnnnnnnnnnnnnnnnnnnnnnnnnnnnnnnnnnnnnnnnnnnnnnnnnnnnnnnnnnnnnnnnnnnnnnnnnnnnnnnnnnnnnnnnnnnnnnnnnnnnnnnnnnnnnnnnnnnnnnnnnnnnnnnnnnnnnnnnnnnnnnnnnnnnnnnnnnnnnnnnnnnnnnnnnnnnnnnnnnnnnnnnnnnnnnnnnnnnnnnnnnnnnnnnnnnnnnnnnnnnnnnnnnnnnnnnnnnnnnnnnnnnnnnnnnnnnnnnnnnnnnnnnnnnnnnnnnnnnnnnnnnnnnnnnnnnnnnnnnnnnnnnnnnnnnnnnnnnnnnnnnnnnnnnnnnnnnnnnnnnnnnnnnnnnnnnnnnnnnnnnnnnnnnnnnnnnnnnnnnnnnnnnnnnnnnnnnnnnnnnnnnnnnnnnnnnnnnnnnnnnnnnnnnnnnnnnnnnnnnnnnnnnnnnnnnnnnnnnnnnnnnnnnnnnnnnnnnnnnnnnnnnnnnnnnnnnnnnnnnnnnnnnnnnnnnnnnnnnnnnnnnnnnnnnnnnnnnnnnnnnnnnnnnnnnnnnnnnnnnnnnnnnnnnnnnnnnnnnnnnnnnnnnnnnnnnnnnnnnnnnnnnnnnnnnnnnnnnnnnnnnnnnnnnnnnnnnnnnnnnnnnnnnnnnnnnnnnnnnnnnnnnnnnnnnnnnnnnnnnnnnnnnnnnnnnnnnnnnnnnnnnnnnnnnnnnnnnnnnnnnnnnnnnnnnnnnnnnnnnnnnnnnnnnnnnnnnnnnnnnnnnnnnnnnnnnnnnnnnnnnnnnnnnnnnnnnnnnnnnnnnnnnnnnnnnnnnnnnnnnnnnnnnnnnnnnnnnnnnnnnnnnnnnnnnnnnnnnnnnnnnnnnnnnnnnnnnnnnnnnnnnnnnnnnnnnnnnnnnnnnnnnnnnnnnnnnnnnnnnnnnnnnnnnnnnnnnnnnnnnnnnnnnnnnnnnnnnnnnnnnnnnnnnnnnnnnnnnnnnnnnnnnnnnnnnnnnnnnnnnnnnnnnnnnnnnnnnnnnnnnnnnnnnnnnnnnnnnnnnnnnnnnnnnnnnnnnnnnnnnnnnnnnnnnnnnnnnnnnnnnnnnnnnnnnnnnnnnnnnnnnnnnnnnnnnnnnnnnnnnnnnnnnnnnnnnnnnnnnnnnnnnnnnnnnnnnnnnnnnnnnnnnnnnnnnnnnnnnnnnnnnnnnnnnnnnnnnnnnnnnnnnnnnnnnnnnnnnnnnnnnnnnnnnnnnnnnnnnnnnnnnnnnnnnnnnnnnnnnnnnnnnnnnnnnnnnnnnnnnnnnnnnnnnnnnnnnnnnnnnnnnnnnnnnnnnnnnnnnnnnnnnnnnnnnnnnnnnnnnnnnnnnnnnnnnnnnnnnnnnnnnnnnnnnnnnnnnnnnnnnnnnnnnnnnnnnnnnnnnnnnnnnnnnnnnnnnnnnnnnnnnnnnnnnnnnnnnnnnnnnnnnnnnnnnnnnnnnnnnnnnnnnnnnnnnnnnnnnnnnnnnnnnnnnnnnnnnnnnnnnnnnnnnnnnnnnnnnnnnnnnnnnnnnnnnnnnnnnnnnnnnnnnnnnnnnnnnnnnnnnnnnnnnnnnnnnnnnnnnnnnnnnnnnnnnnnnnnnnnnnnnnnnnnnnnnnnnnnnnnnnnnnnnnnnnnnnnnnnnnnnnnnnnnnnnnnnnnnnnnnnnnnnnnnnnnnnnnnnnnnnnnnnnnnnnnnnnnnnnnnnnnnnnnnnnnnnnnnnnnnnnnnnnnnnnnnnnnnnnnnnnnnnnnnnnnnnnnnnnnnnnnnnnnnnnnnnnnnnnnnnnnnnnnnnnnnnnnnnnnnnnnnnnnnnnnnnnnnnnnnnnnnnnnnnnnnnnnnnnnnnnnnnnnnnnnnnnnnnnnnnnnnnnnnnnnnnnnnnnnnnnnnnnnnnnnnnnnnnnnnnnnnnnnnnnnnnnnnnnnnnnnnnnnnnnnnnnnnnnnnnnnnnnnnnnnnnnnnnnnnnnnnnnnnnnnnnnnnnnnnnnnnnnnnnnnnnnnnnnnnnnnnnnnnnnnnnnnnnnnnnnnnnnnnnnnnnnnnnnnnnnnnnnnnnnnnnnnnnnnnnnnnnnnnnnnnnnnnnnnnnnnnnnnnnnnnnnnnnnnnnnnnnnnnnnnnnnnnnnnnnnnnnnnnnnnnnnnnnnnnnnnnnnnnnnnnnnnnnnnnnnnnnnnnnnnnnnnnnnnnnnnnnnnnnnnnnnnnnnnnnnnnnnnnnnnnnnnnnnnnnnnnnnnnnnnnnnnnnnnnnnnnnnnnnnnnnnnnnnnnnnnnnnnnnnnnnnnnnnnnnnnnnnnnnnnnnnnnnnnnnnnnnnnnnnnnnnnnnnnnnnnnnnnnnnnnnnnnnnnnnnnnnnnnnnnnnnnnnnnnnnnnnnnnnnnnnnnnnnnnnnnnnnnnnnnnnnnnnnnnnnnnnnnnnnnnnnnnnnnnnnnnnnnnnnnnnnnnnnnnnnnnnnnnnnnnnnnnnnnnnnnnnnnnnnnnnnnnnnnnnnnnnnnnnnnnnnnnnnnnnnnnnnnnnnnnnnnnnnnnnnnnnnnnnnnnnnnnnnnnnnnnnnnnnnnnnnnnnnnnnnnnnnnnnnnnnnnnnnnnnnnnnnnnnnnnnnnnnnnnnnnnnnnnnnnnnnnnnnnnnnnnnnnnnnnnnnnnnnnnnnnnnnnnnnnnnnnnnnnnnnnnnnnnnnnnnnnnnnnnnnnnnnnnnnnnnnnnnnnnnnnnnnnnnnnnnnnnnnnnnnnnnnnnnnnnnnnnnnnnnnnnnnnnnnnnnnnnnnnnnnnnnnnnnnnnnnnnnnnnnnnnnnnnnnnnnnnnnnnnnnnnnnnnnnnnnnnnnnnnnnnnnnnnnnnnnnnnnnnnnnnnnnnnnnnnnnnnnnnnnnnnnnnnnnnnnnnnnnnnnnnnnnnnnnnnnnnnnnnnnnnnnnnnnnnnnnnnnnnnnnnnnnnnnnnnnnnnnnnnnnnnnnnnnnnnnnnnnnnnnnnnnnnnnnnnnnnnnnnnnnnnnnnnnnnnnnnnnnnnnnnnnnnnnnnnnnnnnnnnnnnnnnnnnnnnnnnnnnnnnnnnnnnnnnnnnnnnnnnnnnnnnnnnnnnnnnnnnnnnnnnnnnnnnnnnnnnnnnnnnnnnnnnnnnnnnnnnnnnnnnnnnnnnnnnnnnnnnnnnnnnnnnnnnnnnnnnnnnnnnnnnnnnnnnnnnnnnnnnnnnnnnnnnnnnnnnnnnnnnnnnnnnnnnnnnnnnnnnnnnnnnnnnnnnnnnnnnnnnnnnnnnnnnnnnnnnnnnnnnnnnnnnnnnnnnnnnnnnnnnnnnnnnnnnnnnnnnnnnnnnnnnnnnnnnnnnnnnnnnnnnnnnnnnnnnnnnnnnnnnnnnnnnnnnnnnnnnnnnnnnnnnnnnnnnnnnnnnnnnnnnnnnnnnnnnnnnnnnnnnnnnnnnnnnnnnnnnnnnnnnnnnnnnnnnnnnnnnnnnnnnnnnnnnnnnnnnnnnnnnnnnnnnnnnnnnnnnnnnnnnnnnnnnnnnnnnnnnnnnnnnnnnnnnnnnnnnnnnnnnnnnnnnnnnnnnnnnnnnnnnnnnnnnnnnnnnnnnnnnnnnnnnnnnnnnnnnnnnnnnnnnnnnnnnnnnnnnnnnnnnnnnnnnnnnnnnnnnnnnnnnnnnnnnnnnnnnnnnnnnnnnnnnnnnnnnnnnnnnnnnnnnnnnnnnnnnnnnnnnnnnnnnnnnnnnnnnnnnnnnnnnnnnnnnnnnnnnnnnnnnnnnnnnnnnnnnnnnnnnnnnnnnnnnnnnnnnnnnnnnnnnnnnnnnnnnnnnnnnnnnnnnnnnnnnnnnnnnnnnnnnnnnnnnnnnnnnnnnnnnnnnnnnnnnnnnnnnnnnnnnnnnnnnnnnnnnnnnnnnnnnnnnnnnnnnnnnnnnnnnnnnnnnnnnnnnnnnnnnnnnnnnnnnnnnnnnnnnnnnnnnnnnnnnnnnnnnnnnnnnnnnnnnnnnnnnnnnnnnnnnnnnnnnnnnnnnnnnnnnnnnnnnnnnnnnnnnnnnnnnnnnnnnnnnnnnnnnnnnnnnnnnnnnnnnnnnnnnnnnnnnnnnnnnnnnnnnnnnnnnnnnnnnnnnnnnnnnnnnnnnnnnnnnnnnnnnnnnnnnnnnnnnnnnnnnnnnnnnnnnnnnnnnnnnnnnnnnnnnnnnnnnnnnnnnnnnnnnnnnnnnnnnnnnnnnnnnnnnnnnnnnnnnnnnnnnnnnnnnnnnnnnnnnnnnnnnnnnnnnnnnnnnnnnnnnnnnnnnnnnnnnnnnnnnnnnnnnnnnnnnnnnnnnnnnnnnnnnnnnnnnnnnnnnnnnnnnnnnnnnnnnnnnnnnnnnnnnnnnnnnnnnnnnnnnnnnnnnnnnnnnnnnnnnnnnnnnnnnnnnnnnnnnnnnnnnnnnnnnnnnnnnnnnnnnnnnnnnnnnnnnnnnnnnnnnnnnnnnnnnnnnnnnnnnnnnnnnnnnnnnnnnnnnnnnnnnnnnnnnnnnnnnnnnnnnnnnnnnnnnnnnnnnnnnnnnnnnnnnnnnnnnnnnnnnnnnnnnnnnnnnnnnnnnnnnnnnnnnnnnnnnnnnnnnnnnnnnnnnnnnnnnnnnnnnnnnnnnnnnnnnnnnnnnnnnnnnnnnnnnnnnnnnnnnnnnnnnnnnnnnnnnnnnnnnnnnnnnnnnnnnnnnnnnnnnnnnnnnnnnnnnnnnnnnnnnnnnnnnnnnnnnnnnnnnnnnnnnnnnnnnnnnnnnnnnnnnnnnnnnnnnnnnnnnnnnnnnnnnnnnnnnnnnnnnnnnnnnnnnnnnnnnnnnnnnnnnnnnnnnnnnnnnnnnnnnnnnnnnnnnnnnnnnnnnnnnnnnnnnnnnnnnnnnnnnnnnnnnnnnnnnnnnnnnnnnnnnnnnnnnnnnnnnnnnnnnnnnnnnnnnnnnnnnnnnnnnnnnnnnnnnnnnnnnnnnnnnnnnnnnnnnnnnnnnnnnnnnnnnnnnnnnnnnnnnnnnnnnnnnnnnnnnnnnnnnnnnnnnnnnnnnnnnnnnnnnnnnnnnnnnnnnnnnnnnnnnnnnnnnnnnnnnnnnnnnnnnnnnnnnnnnnnnnnnnnnnnnnnnnnnnnnnnnnnnnnnnnnnnnnnnnnnnnnnnnnnnnnnnnnnnnnnnnnnnnnnnnnnnnnnnnnnnnnnnnnnnnnnnnnnnnnnnnnnnnnnnnnnnnnnnnnnnnnnnnnnnnnnnnnnnnnnnnnnnnnnnnnnnnnnnnnnnnnnnnnnnnnnnnnnnnnnnnnnnnnnnnnnnnnnnnnnnnnnnnnnnnnnnnnnnnnnnnnnnnnnnnnnnnnnnnnnnnnnnnnnnnnnnnnnnnnnnnnnnnnnnnnnnnnnnnnnnnnnnnnnnnnnnnnnnnnnnnnnnnnnnnnnnnnnnnnnnnnnnnnnnnnnnnnnnnnnnnnnnnnnnnnnnnnnnnnnnnnnnnnnnnnnnnnnnnnnnnnnnnnnnnnnnnnnnnnnnnnnnnnnnnnnnnnnnnnnnnnnnnnnnnnnnnnnnnnnnnnnnnnnnnnnnnnnnnnnnnnnnnnnnnnnnnnnnnnnnnnnnnnnnnnnnnnnnnnnnnnnnnnnnnnnnnnnnnnnnnnnnnnnnnnnnnnnnnnnnnnnnnnnnnnnnnnnnnnnnnnnnnnnnnnnnnnnnnnnnnnnnnnnnnnnnnnnnnnnnnnnnnnnnnnnnnnnnnnnnnnnnnnnnnnnnnnnnnnnnnnnnnnnnnnnnnnnnnnnnnnnnnnnnnnnnnnnnnnnnnnnnnnnnnnnnnnnnnnnnnnnnnnnnnnnnnnnnnnnnnnnnnnnnnnnnnnnnnnnnnnnnnnnnnnnnnnnnnnnnnnnnnnnnnnnnnnnnnnnnnnnnnnnnnnnnnnnnnnnnnnnnnnnnnnnnnnnnnnnnnnnnnnnnnnnnnnnnnnnnnnnnnnnnnnnnnnnnnnnnnnnnnnnnnnnnnnnnnnnnnnnnnnnnnnnnnnnnnnnnnnnnnnnnnnnnnnnnnnnnnnnnnnnnnnnnnnnnnnnnnnnnnnnnnnnnnnnnnnnnnnnnnnnnnnnnnnnnnnnnnnnnnnnnnnnnnnnnnnnnnnnnnnnnnnnnnnnnnnnnnnnnnnnnnnnnnnnnnnnnnnnnnnnnnnnnnnnnnnnnnnnnnnnnnnnnnnnnnnnnnnnnnnnnnnnnnnnnnnnnnnnnnnnnnnnnnnnnnnnnnnnnnnnnnnnnnnnnnnnnnnnnnnnnnnnnnnnnnnnnnnnnnnnnnnnnnnnnnnnnnnnnnnnnnnnnnnnnnnnnnnnnnnnnnnnnnnnnnnnnnnnnnnnnnnnnnnnnnnnnnnnnnnnnnnnnnnnnnnnnnnnnnnnnnnnnnnnnnnnnnnnnnnnnnnnnnnnnnnnnnnnnnnnnnnnnnnnnnnnnnnnnnnnnnnnnnnnnnnnnnnnnnnnnnnnnnnnnnnnnnnnnnnnnnnnnnnnnnnnnnnnnnnnnnnnnnnnnnnnnnnnnnnnnnnnnnnnnnnnnnnnnnnnnnnnnnnnnnnnnnnnnnnnnnnnnnnnnnnnnnnnnnnnnnnnnnnnnnnnnnnnnnnnnnnnnnnnnnnnnnnnnnnnnnnnnnnnnnnnnnnnnnnnnnnnnnnnnnnnnnnnnnnnnnnnnnnnnnnnnnnnnnnnnnnnnnnnnnnnnnnnnnnnnnnnnnnnnnnnnnnnnnnnnnnnnnnnnnnnnnnnnnnnnnnnnnnnnnnnnnnnnnnnnnnnnnnnnnnnnnnnnnnnnnnnnnnnnnnnnnnnnnnnnnnnnnnnnnnnnnnnnnnnnnnnnnnnnnnnnnnnnnnnnnnnnnnnnnnnnnnnnnnnnnnnnnnnnnnnnnnnnnnnnnnnnnnnnnnnnnnnnnnnnnnnnnnnnnnnnnnnnnnnnnnnnnnnnnnnnnnnnnnnnnnnnnnnnnnnnnnnnnnnnnnnnnnnnnnnnnnnnnnnnnnnnnnnnnnnnnnnnnnnnnnnnnnnnnnnnnnnnnnnnnnnnnnnnnnnnnnnnnnnnnnnnnnnnnnnnnnnnnnnnnnnnnnnnnnnnnnnnnnnnnnnnnnnnnnnnnnnnnnnnnnnnnnnnnnnnnnnnnnnnnnnnnnnnnnnnnnnnnnnnnnnnnnnnnnnnnnnnnnnnnnnnnnnnnnnnnnnnnnnnnnnnnnnnnnnnnnnnnnnnnnnnnnnnnnnnnnnnnnnnnnnnnnnnnnnnnnnnnnnnnnnnnnnnnnnnnnnnnnnnnnnnnnnnnnnnnnnnnnnnnnnnnnnnnnnnnnnnnnnnnnnnnnnnnnnnnnnnnnnnnnnnnnnnnnnnnnnnnnnnnnnnnnnnnnnnnnnnnnnnnnnnnnnnnnnnnnnnnnnnnnnnnnnnnnnnnnnnnnnnnnnnnnnnnnnnnnnnnnnnnnnnnnnnnnnnnnnnnnnnnnnnnnnnnnnnnnnnnnnnnnnnnnnnnnnnnnnnnnnnnnnnnnnnnnnnnnnnnnnnnnnnnnnnnnnnnnnnnnnnnnnnnnnnnnnnnnnnnnnnnnnnnnnnnnnnnnnnnnnnnnnnnnnnnnnnnnnnnnnnnnnnnnnnnnnnnnnnnnnnnnnnnnnnnnnnnnnnnnnnnnnnnnnnnnnnnnnnnnnnnnnnnnnnnnnnnnnnnnnnnnnnnnnnnnnnnnnnnnnnnnnnnnnnnnnnnnnnnnnnnnnnnnnnnnnnnnnnnnnnnnnnnnnnnnnnnnnnnnnnnnnnnnnnnnnnnnnnnnnnnnnnnnnnnnnnnnnnnnnnnnnnnnnnnnnnnnnnnnnnnnnnnnnnnnnnnnnnnnnnnnnnnnnnnnnnnnnnnnnnnnnnnnnnnnnnnnnnnnnnnnnnnnnnnnnnnnnnnnnnnnnnnnnnnnnnnnnnnnnnnnnnnnnnnnnnnnnnnnnnnnnnnnnnnnnnnnnnnnnnnnnnnnnnnnnnnnnnnnnnnnnnnnnnnnnnnnnnnnnnnnnnnnnnnnnnnnnnnnnnnnnnnnnnnnnnnnnnnnnnnnnnnnnnnnnnnnnnnnnnnnnnnnnnnnnnnnnnnnnnnnnnnnnnnnnnnnnnnnnnnnnnnnnnnnnnnnnnnnnnnnnnnnnnnnnnnnnnnnnnnnnnnnnnnnnnnnnnnnnnnnnnnnnnnnnnnnnnnnnnnnnnnnnnnnnnnnnnnnnnnnnnnnnnnnnnnnnnnnnnnnnnnnnnnnnnnnnnnnnnnnnnnnnnnnnnnnnnnnnnnnnnnnnnnnnnnnnnnnnnnnnnnnnnnnnnnnnnnnnnnnnnnnnnnnnnnnnnnnnnnnnnnnnnnnnnnnnnnnnnnnnnnnnnnnnnnnnnnnnnnnnnnnnnnnnnnnnnnnnnnnnnnnnnnnnnnnnnnnnnnnnnnnnnnnnnnnnnnnnnnnnnnnnnnnnnnnnnnnnnnnnnnnnnnnnnnnnnnnnnnnnnnnnnnnnnnnnnnnnnnnnnnnnnnnnnnnnnnnnnnnnnnnnnnnnnnnnnnnnnnnnnnnnnnnnnnnnnnnnnnnnnnnnnnnnnnnnnnnnnnnnnnnnnnnnnnnnnnnnnnnnnnnnnnnnnnnnnnnnnnnnnnnnnnnnnnnnnnnnnnnnnnnnnnnnnnnnnnnnnnnnnnnnnnnnnnnnnnnnnnnnnnnnnnnnnnnnnnnnnnnnnnnnnnnnnnnnnnnnnnnnnnnnnnnnnnnnnnnnnnnnnnnnnnnnnnnnnnnnnnnnnnnnnnnnnnnnnnnnnnnnnnnnnnnnnnnnnnnnnnnnnnnnnnnnnnnnnnnnnnnnnnnnnnnnnnnnnnnnnnnnnnnnnnnnnnnnnnnnnnnnnnnnnnnnnnnnnnnnnnnnnnnnnnnnnnnnnnnnnnnnnnnnnnnnnnnnnnnnnnnnnnnnnnnnnnnnnnnnnnnnnnnnnnnnnnnnnnnnnnnnnnnnnnnnnnnnnnnnnnnnnnnnnnnnnnnnnnnnnnnnnnnnnnnnnnnnnnnnnnnnnnnnnnnnnnnnnnnnnnnnnnnnnnnnnnnnnnnnnnnnnnnnnnnnnnnnnnnnnnnnnnnnnnnnnnnnnnnnnnnnnnnnnnnnnnnnnnnnnnnnnnnnnnnnnnnnnnnnnnnnnnnnnnnnnnnnnnnnnnnnnnnnnnnnnnnnnnnnnnnnnnnnnnnnnnnnnnnnnnnnnnnnnnnnnnnnnnnnnnnnnnnnnnnnnnnnnnnnnnnnnnnnnnnnnnnnnnnnnnnnnnnnnnnnnnnnnnnnnnnnnnnnnnnnnnnnnnnnnnnnnnnnnnnnnnnnnnnnnnnnnnnnnnnnnnnnnnnnnnnnnnnnnnnnnnnnnnnnnnnnnnnnnnnnnnnnnnnnnnnnnnnnnnnnnnnnnnnnnnnnnnnnnnnnnnnnnnnnnnnnnnnnnnnnnnnnnnnnnnnnnnnnnnnnnnnnnnnnnnnnnnnnnnnnnnnnnnnnnnnnnnnnnnnnnnnnnnnnnnnnnnnnnnnnnnnnnnnnnnnnnnnnnnnnnnnnnnnnnnnnnnnnnnnnnnnnnnnnnnnnnnnnnnnnnnnnnnnnnnnnnnnnnnnnnnnnnnnnnnnnnnnnnnnnnnnnnnnnnnnnnnnnnnnnnnnnnnnnnnnnnnnnnnnnnnnnnnnnnnnnnnnnnnnnnnnnnnnnnnnnnnnnnnnnnnnnnnnnnnnnnnnnnnnnnnnnnnnnnnnnnnnnnnnnnnnnnnnnnnnnnnnnnnnnnnnnnnnnnnnnnnnnnnnnnnnnnnnnnnnnnnnnnnnnnnnnnnnnnnnnnnnnnnnnnnnnnnnnnnnnnnnnnnnnnnnnnnnnnnnnnnnnnnnnnnnnnnnnnnnnnnnnnnnnnnnnnnnnnnnnnnnnnnnnnnnnnnnnnnnnnnnnnnnnnnnnnnnnnnnnnnnnnnnnnnnnnnnnnnnnnnnnnnnnnnnnnnnnnnnnnnnnnnnnnnnnnnnnnnnnnnnnnnnnnnnnnnnnnnnnnnnnnnnnnnnnnnnnnnnnnnnnnnnnnnnnnnnnnnnnnnnnnnnnnnnnnnnnnnnnnnnnnnnnnnnnnnnnnnnnnnnnnnnnnnnnnnnnnnnnnnnnnnnnnnnnnnnnnnnnnnnnnnnnnnnnnnnnnnnnnnnnnnnnnnnnnnnnnnnnnnnnnnnnnnnnnnnnnnnnnnnnnnnnnnnnnnnnnnnnnnnnnnnnnnnnnnnnnnnnnnnnnnnnnnnnnnnnnnnnnnnnnnnnnnnnnnnnnnnnnnnnnnnnnnnnnnnnnnnnnnnnnnnnnnnnnnnnnnnnnnnnnnnnnnnnnnnnnnnnnnnnnnnnnnnnnnnnnnnnnnnnnnnnnnnnnnnnnnnnnnnnnnnnnnnnnnnnnnnnnnnnnnnnnnnnnnnnnnnnnnnnnnnnnnnnnnnnnnnnnnnnnnnnnnnnnnnnnnnnnnnnnnnnnnnnnnnnnnnnnnnnnnnnnnnnnnnnnnnnnnnnnnnnnnnnnnnnnnnnnnnnnnnnnnnnnnnnnnnnnnnnnnnnnnnnnnnnnnnnnnnnnnnnnnnnnnnnnnnnnnnnnnnnnnnnnnnnnnnnnnnnnnnnnnnnnnnnnnnnnnnnnnnnnnnnnnnnnnnnnnnnnnnnnnnnnnnnnnnnnnnnnnnnnnnnnnnnnnnnnnnnnnnnnnnnnnnnnnnnnnnnnnnnnnnnnnnnnnnnnnnnnnnnnnnnnnnnnnnnnnnnnnnnnnnnnnnnnnnnnnnnnnnnnnnnnnnnnnnnnnnnnnnnnnnnnnnnnnnnnnnnnnnnnnnnnnnnnnnnnnnnnnnnnnnnnnnnnnnnnnnnnnnnnnnnnnnnnnnnnnnnnnnnnnnnnnnnnnnnnnnnnnnnnnnnnnnnnnnnnnnnnnnnnnnnnnnnnnnnnnnnnnnnnnnnnnnnnnnnnnnnnnnnnnnnnnnnnnnnnnnnnnnnnnnnnnnnnnnnnnnnnnnnnnnnnnnnnnnnnnnnnnnnnnnnnnnnnnnnnnnnnnnnnnnnnnnnnnnnnnnnnnnnnnnnnnnnnnnnnnnnnnnnnnnnnnnnnnnnnnnnnnnnnnnnnnnnnnnnnnnnnnnnnnnnnnnnnnnnnnnnnnnnnnnnnnnnnnnnnnnnnnnnnnnnnnnnnnnnnnnnnnnnnnnnnnnnnnnnnnnnnnnnnnnnnnnnnnnnnnnnnnnnnnnnnnnnnnnnnnnnnnnnnnnnnnnnnnnnnnnnnnnnnnnnnnnnnnnnnnnnnnnnnnnnnnnnnnnnnnnnnnnnnnnnnnnnnnnnnnnnnnnnnnnnnnnnnnnnnnnnnnnnnnnnnnnnnnnnnnnnnnnnnnnnnnnnnnnnnnnnnnnnnnnnnnnnnnnnnnnnnnnnnnnnnnnnnnnnnnnnnnnnnnnnnnnnnnnnnnnnnnnnnnnnnnnnnnnnnnnnnnnnnnnnnnnnnnnnnnnnnnnnnnnnnnnnnnnnnnnnnnnnnnnnnnnnnnnnnnnnnnnnnnnnnnnnnnnnnnnnnnnnnnnnnnnnnnnnnnnnnnnnnnnnnnnnnnnnnnnnnnnnnnnnnnnnnnnnnnnnnnnnnnnnnnnnnnnnnnnnnnnnnnnnnnnnnnnnnnnnnnnnnnnnnnnnnnnnnnnnnnnnnnnnnnnnnnnnnnnnnnnnnnnnnnnnnnnnnnnnnnnnnnnnnnnnnnnnnnnnnnnnnnnnnnnnnnnnnnnnnnnnnnnnnnnnnnnnnnnnnnnnnnnnnnnnnnnnnnnnnnnnnnnnnnnnnnnnnnnnnnnnnnnnnnnnnnnnnnnnnnnnnnnnnnnnnnnnnnnnnnnnnnnnnnnnnnnnnnnnnnnnnnnnnnnnnnnnnnnnnnnnnnnnnnnnnnnnnnnnnnnnnnnnnnnnnnnnnnnnnnnnnnnnnnnnnnnnnnnnnnnnnnnnnnnnnnnnnnnnnnnnnnnnnnnnnnnnnnnnnnnnnnnnnnnnnnnnnnnnnnnnnnnnnnnnnnnnnnnnnnnnnnnnnnnnnnnnnnnnnnnnnnnnnnnnnnnnnnnnnnnnnnnnnnnnnnnnnnnnnnnnnnnnnnnnnnnnnnnnnnnnnnnnnnnnnnnnnnnnnnnnnnnnnnnnnnnnnnnnnnnnnnnnnnnnnnnnnnnnnnnnnnnnnnnnnnnnnnnnnnnnnnnnnnnnnnnnnnnnnnnnnnnnnnnnnnnnnnnnnnnnnnnnnnnnnnnnnnnnnnnnnnnnnnnnnnnnnnnnnnnnnnnnnnnnnnnnnnnnnnnnnnnnnnnnnnnnnnnnnnnnnnnnnnnnnnnnnnnnnnnnnnnnnnnnnnnnnnnnnnnnnnnnnnnnnnnnnnnnnnnnnnnnnnnnnnnnnnnnnnnnnnnnnnnnnnnnnnnnnnnnnnnnnnnnnnnnnnnnnnnnnnnnnnnnnnnnnnnnnnnnnnnnnnnnnnnnnnnnnnnnnnnnnnnnnnnnnnnnnnnnnnnnnnnnnnnnnnnnnnnnnnnnnnnnnnnnnnnnnnnnnnnnnnnnnnnnnnnnnnnnnnnnnnnnnnnnnnnnnnnnnnnnnnnnnnnnnnnnnnnnnnnnnnnnnnnnnnnnnnnnnnnnnnnnnnnnnnnnnnnnnnnnnnnnnnnnnnnnnnnnnnnnnnnnnnnnnnnnnnnnnnnnnnnnnnnnnnnnnnnnnnnnnnnnnnnnnnnnnnnnnnnnnnnnnnnnnnnnnnnnnnnnnnnnnnnnnnnnnnnnnnnnnnnnnnnnnnnnnnnnnnnnnnnnnnnnnnnnnnnnnnnnnnnnnnnnnnnnnnnnnnnnnnnnnnnnnnnnnnnnnnnnnnnnnnnnnnnnnnnnnnnnnnnnnnnnnnnnnnnnnnnnnnnnnnnnnnnnnnnnnnnnnnnnnnnnnnnnnnnnnnnnnnnnnnnnnnnnnnnnnnnnnnnnnnnnnnnnnnnnnnnnnnnnnnnnnnnnnnnnnnnnnnnnnnnnnnnnnnnnnnnnnnnnnnnnnnnnnnnnnnnnnnnnnnnnnnnnnnnnnnnnnnnnnnnnnnnnnnnnnnnnnnnnnnnnnnnnnnnnnnnnnnnnnnnnnnnnnnnnnnnnnnnnnnnnnnnnnnnnnnnnnnnnnnnnnnnnnnnnnnnnnnnnnnnnnnnnnnnnnnnnnnnnnnnnnnnnnnnnnnnnnnnnnnnnnnnnnnnnnnnnnnnnnnnnnnnnnnnnnnnnnnnnnnnnnnnnnnnnnnnnnnnnnnnnnnnnnnnnnnnnnnnnnnnnnnnnnnnnnnnnnnnnnnnnnnnnnnnnnnnnnnnnnnnnnnnnnnnnnnnnnnnnnnnnnnnnnnnnnnnnnnnnnnnnnnnnnnnnnnnnnnnnnnnnnnnnnnnnnnnnnnnnnnnnnnnnnnnnnnnnnnnnnnnnnnnnnnnnnnnnnnnnnnnnnnnnnnnnnnnnnnnnnnnnnnnnnnnnnnnnnnnnnnnnnnnnnnnnnnnnnnnnnnnnnnnnnnnnnnnnnnnnnnnnnnnnnnnnnnnnnnnnnnnnnnnnnnnnnnnnnnnnnnnnnnnnnnnnnnnnnnnnnnnnnnnnnnnnnnnnnnnnnnnnnnnnnnnnnnnnnnnnnnnnnnnnnnnnnnnnnnnnnnnnnnnnnnnnnnnnnnnnnnnnnnnnnnnnnnnnnnnnnnnnnnnnnnnnnnnnnnnnnnnnnnnnnnnnnnnnnnnnnnnnnnnnnnnnnnnnnnnnnnnnnnnnnnnnnnnnnnnnnnnnnnnnnnnnnnnnnnnnnnnnnnnnnnnnnnnnnnnnnnnnnnnnnnnnnnnnnnnnnnnnnnnnnnnnnnnnnnnnnnnnnnnnnnnnnnnnnnnnnnnnnnnnnnnnnnnnnnnnnnnnnnnnnnnnnnnnnnnnnnnnnnnnnnnnnnnnnnnnnnnnnnnnnnnnnnnnnnnnnnnnnnnnnnnnnnnnnnnnnnnnnnnnnnnnnnnnnnnnnnnnnnnnnnnnnnnnnnnnnnnnnnnnnnnnnnnnnnnnnnnnnnnnnnnnnnnnnnnnnnnnnnnnnnnnnnnnnnnnnnnnnnnnnnnnnnnnnnnnnnnnnnnnnnnnnnnnnnnnnnnnnnnnnnnnnnnnnnnnnnnnnnnnnnnnnnnnnnnnnnnnnnnnnnnnnnnnnnnnnnnnnnnnnnnnnnnnnnnnnnnnnnnnnnnnnnnnnnnnnnnnnnnnnnnnnnnnnnnnnnnnnnnnnnnnnnnnnnnnnnnnnnnnnnnnnnnnnnnnnnnnnnnnnnnnnnnnnnnnnnnnnnnnnnnnnnnnnnnnnnnnnnnnnnnnnnnnnnnnnnnnnnnnnnnnnnnnnnnnnnnnnnnnnnnnnnnnnnnnnnnnnnnnnnnnnnnnnnnnnnnnnnnnnnnnnnnnnnnnnnnnnnnnnnnnnnnnnnnnnnnnnnnnnnnnnnnnnnnnnnnnnnnnnnnnnnnnnnnnnnnnnnnnnnnnnnnnnnnnnnnnnnnnnnnnnnnnnnnnnnnnnnnnnnnnnnnnnnnnnnnnnnnnnnnnnnnnnnnnnnnnnnnnnnnnnnnnnnnnnnnnnnnnnnnnnnnnnnnnnnnnnnnnnnnnnnnnnnnnnnnnnnnnnnnnnnnnnnnnnnnnnnnnnnnnnnnnnnnnnnnnnnnnnnnnnnnnnnnnnnnnnnnnnnnnnnnnnnnnnnnnnnnnnnnnnnnnnnnnnnnnnnnnnnnnnnnnnnnnnnnnnnnnnnnnnnnnnnnnnnnnnnnnnnnnnnnnnnnnnnnnnnnnnnnnnnnnnnnnnnnnnnnnnnnnnnnnnnnnnnnnnnnnnnnnnnnnnnnnnnnnnnnnnnnnnnnnnnnnnnnnnnnnnnnnnnnnnnnnnnnnnnnnnnnnnnnnnnnnnnnnnnnnnnnnnnnnnnnnnnnnnnnnnnnnnnnnnnnnnnnnnnnnnnnnnnnnnnnnnnnnnnnnnnnnnnnnnnnnnnnnnnnnnnnnnnnnnnnnnnnnnnnnnnnnnnnnnnnnnnnnnnnnnnnnnnnnnnnnnnnnnnnnnnnnnnnnnnnnnnnnnnnnnnnnnnnnnnnnnnnnnnnnnnnnnnnnnnnnnnnnnnnnnnnnnnnnnnnnnnnnnnnnnnnnnnnnnnnnnnnnnnnnnnnnnnnnnnnnnnnnnnnnnnnnnnnnnnnnnnnnnnnnnnnnnnnnnnnnnnnnnnnnnnnnnnnnnnnnnnnnnnnnnnnnnnnnnnnnnnnnnnnnnnnnnnnnnnnnnnnnnnnnnnnnnnnnnnnnnnnnnnnnnnnnnnnnnnnnnnnnnnnnnnnnnnnnnnnnnnnnnnnnnnnnnnnnnnnnnnnnnnnnnnnnnnnnnnnnnnnnnnnnnnnnnnnnnnnnnnnnnnnnnnnnnnnnnnnnnnnnnnnnnnnnnnnnnnnnnnnnnnnnnnnnnnnnnnnnnnnnnnnnnnnnnnnnnnnnnnnnnnnnnnnnnnnnnnnnnnnnnnnnnnnnnnnnnnnnnnnnnnnnnnnnnnnnnnnnnnnnnnnnnnnnnnnnnnnnnnnnnnnnnnnnnnnnnnnnnnnnnnnnnnnnnnnnnnnnnnnnnnnnnnnnnnnnnnnnnnnnnnnnnnnnnnnnnnnnnnnnnnnnnnnnnnnnnnnnnnnnnnnnnnnnnnnnnnnnnnnnnnnnnnnnnnnnnnnnnnnnnnnnnnnnnnnnnnnnnnnnnnnnnnnnnnnnnnnnnnnnnnnnnnnnnnnnnnnnnnnnnnnnnnnnnnnnnnnnnnnnnnnnnnnnnnnnnnnnnnnnnnnnnnnnnnnnnnnnnnnnnnnnnnnnnnnnnnnnnnnnnnnnnnnnnnnnnnnnnnnnnnnnnnnnnnnnnnnnnnnnnnnnnnnnnnnnnnnnnnnnnnnnnnnnnnnnnnnnnnnnnnnnnnnnnnnnnnnnnnnnnnnnnnnnnnnnnnnnnnnnnnnnnnnnnnnnnnnnnnnnnnnnnnnnnnnnnnnnnnnnnnnnnnnnnnnnnnnnnnnnnnnnnnnnnnnnnnnnnnnnnnnnnnnnnnnnnnnnnnnnnnnnnnnnnnnnnnnnnnnnnnnnnnnnnnnnnnnnnnnnnnnnnnnnnnnnnnnnnnnnnnnnnnnnnnnnnnnnnnnnnnnnnnnnnnnnnnnnnnnnnnnnnnnnnnnnnnnnnnnnnnnnnnnnnnnnnnnnnnnnnnnnnnnnnnnnnnnnnnnnnnnnnnnnnnnnnnnnnnnnnnnnnnnnnnnnnnnnnnnnnnnnnnnnnnnnnnnnnnnnnnnnnnnnnnnnnnnnnnnnnnnnnnnnnnnnnnnnnnnnnnnnnnnnnnnnnnnnnnnnnnnnnnnnnnnnnnnnnnnnnnnnnnnnnnnnnnnnnnnnnnnnnnnnnnnnnnnnnnnnnnnnnnnnnnnnnnnnnnnnnnnnnnnnnnnnnnnnnnnnnnnnnnnnnnnnnnnnnnnnnnnnnnnnnnnnnnnnnnnnnnnnnnnnnnnnnnnnnnnnnnnnnnnnnnnnnnnnnnnnnnnnnnnnnnnnnnnnnnnnnnnnnnnnnnnnnnnnnnnnnnnnnnnnnnnnnnnnnnnnnnnnnnnnnnnnnnnnnnnnnnnnnnnnnnnnnnnnnnnnnnnnnnnnnnnnnnnnnnnnnnnnnnnnnnnnnnnnnnnnnnnnnnnnnnnnnnnnnnnnnnnnnnnnnnnnnnnnnnnnnnnnnnnnnnnnnnnnnnnnnnnnnnnnnnnnnnnnnnnnnnnnnnnnnnnnnnnnnnnnnnnnnnnnnnnnnnnnnnnnnnnnnnnnnnnnnnnnnnnnnnnnnnnnnnnnnnnnnnnnnnnnnnnnnnnnnnnnnnnnnnnnnnnnnnnnnnnnnnnnnnnnnnnnnnnnnnnnnnnnnnnnnnnnnnnnnnnnnnnnnnnnnnnnnnnnnnnnnnnnnnnnnnnnnnnnnnnnnnnnnnnnnnnnnnnnnnnnnnnnnnnnnnnnnnnnnnnnnnnnnnnnnnnnnnnnnnnnnnnnnnnnnnnnnnnnnnnnnnnnnnnnnnnnnnnnnnnnnnnnnnnnnnnnnnnnnnnnnnnnnnnnnnnnnnnnnnnnnnnnnnnnnnnnnnnnnnnnnnnnnnnnnnnnnnnnnnnnnnnnnnnnnnnnnnnnnnnnnnnnnnnnnnnnnnnnnnnnnnnnnnnnnnnnnnnnnnnnnnnnnnnnnnnnnnnnnnnnnnnnnnnnnnnnnnnnnnnnnnnnnnnnnnnnnnnnnnnnnnnnnnnnnnnnnnnnnnnnnnnnnnnnnnnnnnnnnnnnnnnnnnnnnnnnnnnnnnnnnnnnnnnnnnnnnnnnnnnnnnnnnnnnnnnnnnnnnnnnnnnnnnnnnnnnnnnnnnnnnnnnnnnnnnnnnnnnnnnnnnnnnnnnnnnnnnnnnnnnnnnnnnnnnnnnnnnnnnnnnnnnnnnnnnnnnnnnnnnnnnnnnnnnnnnnnnnnnnnnnnnnnnnnnnnnnnnnnnnnnnnnnnnnnnnnnnnnnnnnnnnnnnnnnnnnnnnnnnnnnnnnnnnnnnnnnnnnnnnnnnnnnnnnnnnnnnnnnnnnnnnnnnnnnnnnnnnnnnnnnnnnnnnnnnnnnnnnnnnnnnnnnnnnnnnnnnnnnnnnnnnnnnnnnnnnnnnnnnnnnnnnnnnnnnnnnnnnnnnnnnnnnnnnnnnnnnnnnnnnnnnnnnnnnnnnnnnnnnnnnnnnnnnnnnnnnnnnnnnnnnnnnnnnnnnnnnnnnnnnnnnnnnnnnnnnnnnnnnnnnnnnnnnnnnnnnnnnnnnnnnnnnnnnnnnnnnnnnnnnnnnnnnnnnnnnnnnnnnnnnnnnnnnnnnnnnnnnnnnnnnnnnnnnnnnnnnnnnnnnnnnnnnnnnnnnnnnnnnnnnnnnnnnnnnnnnnnnnnnnnnnnnnnnnnnnnnnnnnnnnnnnnnnnnnnnnnnnnnnnnnnnnnnnnnnnnnnnnnnnnnnnnnnnnnnnnnnnnnnnnnnnnnnnnnnnnnnnnnnnnnnnnnnnnnnnnnnnnnnnnnnnnnnnnnnnnnnnnnnnnnnnnnnnnnnnnnnnnnnnnnnnnnnnnnnnnnnnnnnnnnnnnnnnnnnnnnnnnnnnnnnnnnnnnnnnnnnnnnnnnnnnnnnnnnnnnnnnnnnnnnnnnnnnnnnnnnnnnnnnnnnnnnnnnnnnnnnnnnnnnnnnnnnnnnnnnnnnnnnnnnnnnnnnnnnnnnnnnnnnnnnnnnnnnnnnnnnnnnnnnnnnnnnnnnnnnnnnnnnnnnnnnnnnnnnnnnnnnnnnnnnnnnnnnnnnnnnnnnnnnnnnnnnnnnnnnnnnnnnnnnnnnnnnnnnnnnnnnnnnnnnnnnnnnnnnnnnnnnnnnnnnnnnnnnnnnnnnnnnnnnnnnnnnnnnnnnnnnnnnnnnnnnnnnnnnnnnnnnnnnnnnnnnnnnnnnnnnnnnnnnnnnnnnnnnnnnnnnnnnnnnnnnnnnnnnnnnnnnnnnnnnnnnnnnnnnnnnnnnnnnnnnnnnnnnnnnnnnnnnnnnnnnnnnnnnnnnnnnnnnnnnnnnnnnnnnnnnnnnnnnnnnnnnnnnnnnnnnnnnnnnnnnnnnnnnnnnnnnnnnnnnnnnnnnnnnnnnnnnnnnnnnnnnnnnnnnnnnnnnnnnnnnnnnnnnnnnnnnnnnnnnnnnnnnnnnnnnnnnnnnnnnnnnnnnnnnnnnnnnnnnnnnnnnnnnnnnnnnnnnnnnnnnnnnnnnnnnnnnnnnnnnnnnnnnnnnnnnnnnnnnnnnnnnnnnnnnnnnnnnnnnnnnnnnnnnnnnnnnnnnnnnnnnnnnnnnnnnnnnnnnnnnnnnnnnnnnnnnnnnnnnnnnnnnnnnnnnnnnnnnnnnnnnnnnnnnnnnnnnnnnnnnnnnnnnnnnnnnnnnnnnnnnnnnnnnnnnnnnnnnnnnnnnnnnnnnnnnnnnnnnnnnnnnnnnnnnnnnnnnnnnnnnnnnnnnnnnnnnnnnnnnnnnnnnnnnnnnnnnnnnnnnnnnnnnnnnnnnnnnnnnnnnnnnnnnnnnnnnnnnnnnnnnnnnnnnnnnnnnnnnnnnnnnnnnnnnnnnnnnnnnnnnnnnnnnnnnnnnnnnnnnnnnnnnnnnnnnnnnnnnnnnnnnnnnnnnnnnnnnnnnnnnnnnnnnnnnnnnnnnnnnnnnnnnnnnnnnnnnnnnnnnnnnnnnnnnnnnnnnnnnnnnnnnnnnnnnnnnnnnnnnnnnnnnnnnnnnnnnnnnnnnnnnnnnnnnnnnnnnnnnnnnnnnnnnnnnnnnnnnnnnnnnnnnnnnnnnnnnnnnnnnnnnnnnnnnnnnnnnnnnnnnnnnnnnnnnnnnnnnnnnnnnnnnnnnnnnnnnnnnnnnnnnnnnnnnnnnnnnnnnnnnnnnnnnnnnnnnnnnnnnnnnnnnnnnnnnnnnnnnnnnnnnnnnnnnnnnnnnnnnnnnnnnnnnnnnnnnnnnnnnnnnnnnnnnnnnnnnnnnnnnnnnnnnnnnnnnnnnnnnnnnnnnnnnnnnnnnnnnnnnnnnnnnnnnnnnnnnnnnnnnnnnnnnnnnnnnnnnnnnnnnnnnnnnnnnnnnnnnnnnnnnnnnnnnnnnnnnnnnnnnnnnnnnnnnnnnnnnnnnnnnnnnnnnnnnnnnnnnnnnnnnnnnnnnnnnnnnnnnnnnnnnnnnnnnnnnnnnnnnnnnnnnnnnnnnnnnnnnnnnnnnnnnnnnnnnnnnnnnnnnnnnnnnnnnnnnnnnnnnnnnnnnnnnnnnnnnnnnnnnnnnnnnnnnnnnnnnnnnnnnnnnnnnnnnnnnnnnnnnnnnnnnnnnnnnnnnnnnnnnnnnnnnnnnnnnnnnnnnnnnnnnnnnnnnnnnnnnnnnnnnnnnnnnnnnnnnnnnnnnnnnnnnnnnnnnnnnnnnnnnnnnnnnnnnnnnnnnnnnnnnnnnnnnnnnnnnnnnnnnnnnnnnnnnnnnnnnnnnnnnnnnnnnnnnnnnnnnnnnnnnnnnnnnnnnnnnnnnnnnnnnnnnnnnnnnnnnnnnnnnnnnnnnnnnnnnnnnnnnnnnnnnnnnnnnnnnnnnnnnnnnnnnnnnnnnnnnnnnnnnnnnnnnnnnnnnnnnnnnnnnnnnnnnnnnnnnnnnnnnnnnnnnnnnnnnnnnnnnnnnnnnnnnnnnnnnnnnnnnnnnnnnnnnnnnnnnnnnnnnnnnnnnnnnnnnnnnnnnnnnnnnnnnnnnnnnnnnnnnnnnnnnnnnnnnnnnnnnnnnnnnnnnnnnnnnnnnnnnnnnnnnnnnnnnnnnnnnnnnnnnnnnnnnnnnnnnnnnnnnnnnnnnnnnnnnnnnnnnnnnnnnnnnnnnnnnnnnnnnnnnnnnnnnnnnnnnnnnnnnnnnnnnnnnnnnnnnnnnnnnnnnnnnnnnnnnnnnnnnnnnnnnnnnnnnnnnnnnnnnnnnnnnnnnnnnnnnnnnnnnnnnnnnnnnnnnnnnnnnnnnnnnnnnnnnnnnnnnnnnnnnnnnnnnnnnnnnnnnnnnnnnnnnnnnnnnnnnnnnnnnnnnnnnnnnnnnnnnnnnnnnnnnnnnnnnnnnnnnnnnnnnnnnnnnnnnnnnnnnnnnnnnnnnnnnnnnnnnnnnnnnnnnnnnnnnnnnnnnnnnnnnnnnnnnnnnnnnnnnnnnnnnnnnnnnnnnnnnnnnnnnnnnnnnnnnnnnnnnnnnnnnnnnnnnnnnnnnnnnnnnnnnnnnnnnnnnnnnnnnnnnnnnnnnnnnnnnnnnnnnnnnnnnnnnnnnnnnnnnnnnnnnnnnnnnnnnnnnnnnnnnnnnnnnnnnnnnnnnnnnnnnnnnnnnnnnnnnnnnnnnnnnnnnnnnnnnnnnnnnnnnnnnnnnnnnnnnnnnnnnnnnnnnnnnnnnnnnnnnnnnnnnnnnnnnnnnnnnnnnnnnnnnnnnnnnnnnnnnnnnnnnnnnnnnnnnnnnnnnnnnnnnnnnnnnnnnnnnnnnnnnnnnnnnnnnnnnnnnnnnnnnnnnnnnnnnnnnnnnnnnnnnnnnnnnnnnnnnnnnnnnnnnnnnnnnnnnnnnnnnnnnnnnnnnnnnnnnnnnnnnnnnnnnnnnnnnnnnnnnnnnnnnnnnnnnnnnnnnnnnnnnnnnnnnnnnnnnnnnnnnnnnnnnnnnnnnnnnnnnnnnnnnnnnnnnnnnnnnnnnnnnnnnnnnnnnnnnnnnnnnnnnnnnnnnnnnnnnnnnnnnnnnnnnnnnnnnnnnnnnnnnnnnnnnnnnnnnnnnnnnnnnnnnnnnnnnnnnnnnnnnnnnnnnnnnnnnnnnnnnnnnnnnnnnnnnnnnnnnnnnnnnnnnnnnnnnnnnnnnnnnnnnnnnnnnnnnnnnnnnnnnnnnnnnnnnnnnnnnnnnnnnnnnnnnnnnnnnnnnnnnnnnnnnnnnnnnnnnnnnnnnnnnnnnnnnnnnnnnnnnnnnnnnnnnnnnnnnnnnnnnnnnnnnnnnnnnnnnnnnnnnnnnnnnnnnnnnnnnnnnnnnnnnnnnnnnnnnnnnnnnnnnnnnnnnnnnnnnnnnnnnnnnnnnnnnnnnnnnnnnnnnnnnnnnnnnnnnnnnnnnnnnnnnnnnnnnnnnnnnnnnnnnnnnnnnnnnnnnnnnnnnnnnnnnnnnnnnnnnnnnnnnnnnnnnnnnnnnnnnnnnnnnnnnnnnnnnnnnnnnnnnnnnnnnnnnnnnnnnnnnnnnnnnnnnnnnnnnnnnnnnnnnnnnnnnnnnnnnnnnnnnnnnnnnnnnnnnnnnnnnnnnnnnnnnnnnnnnnnnnnnnnnnnnnnnnnnnnnnnnnnnnnnnnnnnnnnnnnnnnnnnnnnnnnnnnnnnnnnnnnnnnnnnnnnnnnnnnnnnnnnnnnnnnnnnnnnnnnnnnnnnnnnnnnnnnnnnnnnnnnnnnnnnnnnnnnnnnnnnnnnnnnnnnnnnnnnnnnnnnnnnnnnnnnnnnnnnnnnnnnnnnnnnnnnnnnnnnnnnnnnnnnnnnnnnnnnnnnnnnnnnnnnnnnnnnnnnnnnnnnnnnnnnnnnnnnnnnnnnnnnnnnnnnnnnnnnnnnnnnnnnnnnnnnnnnnnnnnnnnnnnnnnnnnnnnnnnnnnnnnnnnnnnnnnnnnnnnnnnnnnnnnnnnnnnnnnnnnnnnnnnnnnnnnnnnnnnnnnnnnnnnnnnnnnnnnnnnnnnnnnnnnnnnnnnnnnnnnnnnnnnnnnnnnnnnnnnnnnnnnnnnnnnnnnnnnnnnnnnnnnnnnnnnnnnnnnnnnnnnnnnnnnnnnnnnnnnnnnnnnnnnnnnnnnnnnnnnnnnnnnnnnnnnnnnnnnnnnnnnnnnnnnnnnnnnnnnnnnnnnnnnnnnnnnnnnnnnnnnnnnnnnnnnnnnnnnnnnnnnnnnnnnnnnnnnnnnnnnnnnnnnnnnnnnnnnnnnnnnnnnnnnnnnnnnnnnnnnnnnnnnnnnnnnnnnnnnnnnnnnnnnnnnnnnnnnnnnnnnnnnnnnnnnnnnnnnnnnnnnnnnnnnnnnnnnnnnnnnnnnnnnnnnnnnnnnnnnnnnnnnnnnnnnnnnnnnnnnnnnnnnnnnnnnnnnnnnnnnnnnnnnnnnnnnnnnnnnnnnnnnnnnnnnnnnnnnnnnnnnnnnnnnnnnnnnnnnnnnnnnnnnnnnnnnnnnnnnnnnnnnnnnnnnnnnnnnnnnnnnnnnnnnnnnnnnnnnnnnnnnnnnnnnnnnnnnnnnnnnnnnnnnnnnnnnnnnnnnnnnnnnnnnnnnnnnnnnnnnnnnnnnnnnnnnnnnnnnnnnnnnnnnnnnnnnnnnnnnnnnnnnnnnnnnnnnnnnnnnnnnnnnnnnnnnnnnnnnnnnnnnnnnnnnnnnnnnnnnnnnnnnnnnnnnnnnnnnnnnnnnnnnnnnnnnnnnnnnnnnnnnnnnnnnnnnnnnnnnnnnnnnnnnnnnnnnnnnnnnnnnnnnnnnnnnnnnnnnnnnnnnnnnnnnnnnnnnnnnnnnnnnnnnnnnnnnnnnnnnnnnnnnnnnnnnnnnnnnnnnnnnnnnnnnnnnnnnnnnnnnnnnnnnnnnnnnnnnnnnnnnnnnnnnnnnnnnnnnnnnnnnnnnnnnnnnnnnnnnnnnnnnnnnnnnnnnnnnnnnnnnnnnnnnnnnnnnnnnnnnnnnnnnnnnnnnnnnnnnnnnnnnnnnnnnnnnnnnnnnnnnnnnnnnnnnnnnnnnnnnnnnnnnnnnnnnnnnnnnnnnnnnnnnnnnnnnnnnnnnnnnnnnnnnnnnnnnnnnnnnnnnnnnnnnnnnnnnnnnnnnnnnnnnnnnnnnnnnnnnnnnnnnnnnnnnnnnnnnnnnnnnnnnnnnnnnnnnnnnnnnnnnnnnnnnnnnnnnnnnnnnnnnnnnnnnnnnnnnnnnnnnnnnnnnnnnnnnnnnnnnnnnnnnnnnnnnnnnnnnnnnnnnnnnnnnnnnnnnnnnnnnnnnnnnnnnnnnnnnnnnnnnnnnnnnnnnnnnnnnnnnnnnnnnnnnnnnnnnnnnnnnnnnnnnnnnnnnnnnnnnnnnnnnnnnnnnnnnnnnnnnnnnnnnnnnnnnnnnnnnnnnnnnnnnnnnnnnnnnnnnnnnnnnnnnnnnnnnnnnnnnnnnnnnnnnnnnnnnnnnnnnnnnnnnnnnnnnnnnnnnnnnnnnnnnnnnnnnnnnnnnnnnnnnnnnnnnnnnnnnnnnnnnnnnnnnnnnnnnnnnnnnnnnnnnnnnnnnnnnnnnnnnnnnnnnnnnnnnnnnnnnnnnnnnnnnnnnnnnnnnnnnnnnnnnnnnnnnnnnnnnnnnnnnnnnnnnnnnnnnnnnnnnnnnnnnnnnnnnnnnnnnnnnnnnnnnnnnnnnnnnnnnnnnnnnnnnnnnnnnnnnnnnnnnnnnnnnnnnnnnnnnnnnnnnnnnnnnnnnnnnnnnnnnnnnnnnnnnnnnnnnnnnnnnnnnnnnnnnnnnnnnnnnnnnnnnnnnnnnnnnnnnnnnnnnnnnnnnnnnnnnnnnnnnnnnnnnnnnnnnnnnnnnnnnnnnnnnnnnnnnnnnnnnnnnnnnnnnnnnnnnnnnnnnnnnnnnnnnnnnnnnnnnnnnnnnnnnnnnnnnnnnnnnnnnnnnnnnnnnnnnnnnnnnnnnnnnnnnnnnnnnnnnnnnnnnnnnnnnnnnnnnnnnnnnnnnnnnnnnnnnnnnnnnnnnnnnnnnnnnnnnnnnnnnnnnnnnnnnnnnnnnnnnnnnnnnnnnnnnnnnnnnnnnnnnnnnnnnnnnnnnnnnnnnnnnnnnnnnnnnnnnnnnnnnnnnnnnnnnnnnnnnnnnnnnnnnnnnnnnnnnnnnnnnnnnnnnnnnnnnnnnnnnnnnnnnnnnnnnnnnnnnnnnnnnnnnnnnnnnnnnnnnnnnnnnnnnnnnnnnnnnnnnnnnnnnnnnnnnnnnnnnnnnnnnnnnnnnnnnnnnnnnnnnnnnnnnnnnnnnnnnnnnnnnnnnnnnnnnnnnnnnnnnnnnnnnnnnnnnnnnnnnnnnnnnnnnnnnnnnnnnnnnnnnnnnnnnnnnnnnnnnnnnnnnnnnnnnnnnnnnnnnnnnnnnnnnnnnnnnnnnnnnnnnnnnnnnnnnnnnnnnnnnnnnnnnnnnnnnnnnnnnnnnnnnnnnnnnnnnnnnnnnnnnnnnnnnnnnnnnnnnnnnnnnnnnnnnnnnnnnnnnnnnnnnnnnnnnnnnnnnnnnnnnnnnnnnnnnnnnnnnnnnnnnnnnnnnnnnnnnnnnnnnnnnnnnnnnnnnnnnnnnnnnnnnnnnnnnnnnnnnnnnnnnnnnnnnnnnnnnnnnnnnnnnnnnnnnnnnnnnnnnnnnnnnnnnnnnnnnnnnnnnnnnnnnnnnnnnnnnnnnnnnnnnnnnnnnnnnnnnnnnnnnnnnnnnnnnnnnnnnnnnnnnnnnnnnnnnnnnnnnnnnnnnnnnnnnnnnnnnnnnnnnnnnnnnnnnnnnnnnnnnnnnnnnnnnnnnnnnnnnnnnnnnnnnnnnnnnnnnnnnnnnnnnnnnnnnnnnnnnnnnnnnnnnnnnnnnnnnnnnnnnnnnnnnnnnnnnnnnnnnnnnnnnnnnnnnnnnnnnnnnnnnnnnnnnnnnnnnnnnnnnnnnnnnnnnnnnnnnnnnnnnnnnnnnnnnnnnnnnnnnnnnnnnnnnnnnnnnnnnnnnnnnnnnnnnnnnnnnnnnnnnnnnnnnnnnnnnnnnnnnnnnnnnnnnnnnnnnnnnnnnnnnnnnnnnnnnnnnnnnnnnnnnnnnnnnnnnnnnnnnnnnnnnnnnnnnnnnnnnnnnnnnnnnnnnnnnnnnnnnnnnnnnnnnnnnnnnnnnnnnnnnnnnnnnnnnnnnnnnnnnnnnnnnnnnnnnnnnnnnnnnnnnnnnnnnnnnnnnnnnnnnnnnnnnnnnnnnnnnnnnnnnnnnnnnnnnnnnnnnnnnnnnnnnnnnnnnnnnnnnnnnnnnnnnnnnnnnnnnnnnnnnnnnnnnnnnnnnnnnnnnnnnnnnnnnnnnnnnnnnnnnnnnnnnnnnnnnnnnnnnnnnnnnnnnnnnnnnnnnnnnnnnnnnnnnnnnnnnnnnnnnnnnnnnnnnnnnnnnnnnnnnnnnnnnnnnnnnnnnnnnnnnnnnnnnnnnnnnnnnnnnnnnnnnnnnnnnnnnnnnnnnnnnnnnnnnnnnnnnnnnnnnnnnnnnnnnnnnnnnnnnnnnnnnnnnnnnnnnnnnnnnnnnnnnnnnnnnnnnnnnnnnnnnnnnnnnnnnnnnnnnnnnnnnnnnnnnnnnnnnnnnnnnnnnnnnnnnnnnnnnnnnnnnnnnnnnnnnnnnnnnnnnnnnnnnnnnnnnnnnnnnnnnnnnnnnnnnnnnnnnnnnnnnnnnnnnnnnnnnnnnnnnnnnnnnnnnnnnnnnnnnnnnnnnnnnnnnnnnnnnnnnnnnnnnnnnnnnnnnnnnnnnnnnnnnnnnnnnnnnnnnnnnnnnnnnnnnnnnnnnnnnnnnnnnnnnnnnnnnnnnnnnnnnnnnnnnnnnnnnnnnnnnnnnnnnnnnnnnnnnnnnnnnnnnnnnnnnnnnnnnnnnnnnnnnnnnnnnnnnnnnnnnnnnnnnnnnnnnnnnnnnnnnnnnnnnnnnnnnnnnnnnnnnnnnnnnnnnnnnnnnnnnnnnnnnnnnnnnnnnnnnnnnnnnnnnnnnnnnnnnnnnnnnnnnnnnnnnnnnnnnnnnnnnnnnnnnnnnnnnnnnnnnnnnnnnnnnnnnnnnnnnnnnnnnnnnnnnnnnnnnnnnnnnnnnnnnnnnnnnnnnnnnnnnnnnnnnnnnnnnnnnnnnnnnnnnnnnnnnnnnnnnnnnnnnnnnnnnnnnnnnnnnnnnnnnnnnnnnnnnnnnnnnnnnnnnnnnnnnnnnnnnnnnnnnnnnnnnnnnnnnnnnnnnnnnnnnnnnnnnnnnnnnnnnnnnnnnnnnnnnnnnnnnnnnnnnnnnnnnnnnnnnnnnnnnnnnnnnnnnnnnnnnnnnnnnnnnnnnnnnnnnnnnnnnnnnnnnnnnnnnnnnnnnnnnnnnnnnnnnnnnnnnnnnnnnnnnnnnnnnnnnnnnnnnnnnnnnnnnnnnnnnnnnnnnnnnnnnnnnnnnnnnnnnnnnnnnnnnnnnnnnnnnnnnnnnnnnnnnnnnnnnnnnnnnnnnnnnnnnnnnnnnnnnnnnnnnnnnnnnnnnnnnnnnnnnnnnnnnnnnnnnnnnnnnnnnnnnnnnnnnnnnnnnnnnnnnnnnnnnnnnnnnnnnnnnnnnnnnnnnnnnnnnnnnnnnnnnnnnnnnnnnnnnnnnnnnnnnnnnnnnnnnnnnnnnnnnnnnnnnnnnnnnnnnnnnnnnnnnnnnnnnnnnnnnnnnnnnnnnnnnnnnnnnnnnnnnnnnnnnnnnnnnnnnnnnnnnnnnnnnnnnnnnnnnnnnnnnnnnnnnnnnnnnnnnnnnnnnnnnnnnnnnnnnnnnnnnnnnnnnnnnnnnnnnnnnnnnnnnnnnnnnnnnnnnnnnnnnnnnnnnnnnnnnnnnnnnnnnnnnnnnnnnnnnnnnnnnnnnnnnnnnnnnnnnnnnnnnnnnnnnnnnnnnnnnnnnnnnnnnnnnnnnnnnnnnnnnnnnnnnnnnnnnnnnnnnnnnnnnnnnnnnnnnnnnnnnnnnnnnnnnnnnnnnnnnnnnnnnnnnnnnnnnnnnnnnnnnnnnnnnnnnnnnnnnnnnnnnnnnnnnnnnnnnnnnnnnnnnnnnnnnnnnnnnnnnnnnnnnnnnnnnnnnnnnnnnnnnnnnnnnnnnnnnnnnnnnnnnnnnnnnnnnnnnnnnnnnnnnnnnnnnnnnnnnnnnnnnnnnnnnnnnnnnnnnnnnnnnnnnnnnnnnnnnnnnnnnnnnnnnnnnnnnnnnnnnnnnnnnnnnnnnnnnnnnnnnnnnnnnnnnnnnnnnnnnnnnnnnnnnnnnnnnnnnnnnnnnnnnnnnnnnnnnnnnnnnnnnnnnnnnnnnnnnnnnnnnnnnnnnnnnnnnnnnnnnnnnnnnnnnnnnnnnnnnnnnnnnnnnnnnnnnnnnnnnnnnnnnnnnnnnnnnnnnnnnnnnnnnnnnnnnnnnnnnnnnnnnnnnnnnnnnnnnnnnnnnnnnnnnnnnnnnnnnnnnnnnnnnnnnnnnnnnnnnnnnnnnnnnnnnnnnnnnnnnnnnnnnnnnnnnnnnnnnnnnnnnnnnnnnnnnnnnnnnnnnnnnnnnnnnnnnnnnnnnnnnnnnnnnnnnnnnnnnnnnnnnnnnnnnnnnnnnnnnnnnnnnnnnnnnnnnnnnnnnnnnnnnnnnnnnnnnnnnnnnnnnnnnnnnnnnnnnnnnnnnnnnnnnnnnnnnnnnnnnnnnnnnnnnnnnnnnnnnnnnnnnnnnnnnnnnnnnnnnnnnnnnnnnnnnnnnnnnnnnnnnnnnnnnnnnnnnnnnnnnnnnnnnnnnnnnnnnnnnnnnnnnnnnnnnnnnnnnnnnnnnnnnnnnnnnnnnnnnnnnnnnnnnnnnnnnnnnnnnnnnnnnnnnnnnnnnnnnnnnnnnnnnnnnnnnnnnnnnnnnnnnnnnnnnnnnnnnnnnnnnnnnnnnnnnnnnnnnnnnnnnnnnnnnnnnnnnnnnnnnnnnnnnnnnnnnnnnnnnnnnnnnnnnnnnnnnnnnnnnnnnnnnnnnnnnnnnnnnnnnnnnnnnnnnnnnnnnnnnnnnnnnnnnnnnnnnnnnnnnnnnnnnnnnnnnnnnnnnnnnnnnnnnnnnnnnnnnnnnnnnnnnnnnnnnnnnnnnnnnnnnnnnnnnnnnnnnnnnnnnnnnnnnnnnnnnnnnnnnnnnnnnnnnnnnnnnnnnnnnnnnnnnnnnnnnnnnnnnnnnnnnnnnnnnnnnnnnnnnnnnnnnnnnnnnnnnnnnnnnnnnnnnnnnnnnnnnnnnnnnnnnnnnnnnnnnnnnnnnnnnnnnnnnnnnnnnnnnnnnnnnnnnnnnnnnnnnnnnnnnnnnnnnnnnnnnnnnnnnnnnnnnnnnnnnnnnnnnnnnnnnnnnnnnnnnnnnnnnnnnnnnnnnnnnnnnnnnnnnnnnnnnnnnnnnnnnnnnnnnnnnnnnnnnnnnnnnnnnnnnnnnnnnnnnnnnnnnnnnnnnnnnnnnnnnnnnnnnnnnnnnnnnnnnnnnnnnnnnnnnnnnnnnnnnnnnnnnnnnnnnnnnnnnnnnnnnnnnnnnnnnnnnnnnnnnnnnnnnnnnnnnnnnnnnnnnnnnnnnnnnnnnnnnnnnnnnnnnnnnnnnnnnnnnnnnnnnnnnnnnnnnnnnnnnnnnnnnnnnnnnnnnnnnnnnnnnnnnnnnnnnnnnnnnnnnnnnnnnnnnnnnnnnnnnnnnnnnnnnnnnnnnnnnnnnnnnnnnnnnnnnnnnnnnnnnnnnnnnnnnnnnnnnnnnnnnnnnnnnnnnnnnnnnnnnnnnnnnnnnnnnnnnnnnnnnnnnnnnnnnnnnnnnnnnnnnnnnnnnnnnnnnnnnnnnnnnnnnnnnnnnnnnnnnnnnnnnnnnnnnnnnnnnnnnnnnnnnnnnnnnnnnnnnnnnnnnnnnnnnnnnnnnnnnnnnnnnnnnnnnnnnnnnnnnnnnnnnnnnnnnnnnnnnnnnnnnnnnnnnnnnnnnnnnnnnnnnnnnnnnnnnnnnnnnnnnnnnnnnnnnnnnnnnnnnnnnnnnnnnnnnnnnnnnnnnnnnnnnnnnnnnnnnnnnnnnnnnnnnnnnnnnnnnnnnnnnnnnnnnnnnnnnnnnnnnnnnnnnnnnnnnnnnnnnnnnnnnnnnnnnnnnnnnnnnnnnnnnnnnnnnnnnnnnnnnnnnnnnnnnnnnnnnnnnnnnnnnnnnnnnnnnnnnnnnnnnnnnnnnnnnnnnnnnnnnnnnnnnnnnnnnnnnnnnnnnnnnnnnnnnnnnnnnnnnnnnnnnnnnnnnnnnnnnnnnnnnnnnnnnnnnnnnnnnnnnnnnnnnnnnnnnnnnnnnnnnnnnnnnnnnnnnnnnnnnnnnnnnnnnnnnnnnnnnnnnnnnnnnnnnnnnnnnnnnnnnnnnnnnnnnnnnnnnnnnnnnnnnnnnnnnnnnnnnnnnnnnnnnnnnnnnnnnnnnnnnnnnnnnnnnnnnnnnnnnnnnnnnnnnnnnnnnnnnnnnnnnnnnnnnnnnnnnnnnnnnnnnnnnnnnnnnnnnnnnnnnnnnnnnnnnnnnnnnnnnnnnnnnnnnnnnnnnnnnnnnnnnnnnnnnnnnnnnnnnnnnnnnnnnnnnnnnnnnnnnnnnnnnnnnnnnnnnnnnnnnnnnnnnnnnnnnnnnnnnnnnnnnnnnnnnnnnnnnnnnnnnnnnnnnnnnnnnnnnnnnnnnnnnnnnnnnnnnnnnnnnnnnnnnnnnnnnnnnnnnnnnnnnnnnnnnnnnnnnnnnnnnnnnnnnnnnnnnnnnnnnnnnnnnnnnnnnnnnnnnnnnnnnnnnnnnnnnnnnnnnnnnnnnnnnnnnnnnnnnnnnnnnnnnnnnnnnnnnnnnnnnnnnnnnnnnnnnnnnnnnnnnnnnnnnnnnnnnnnnnnnnnnnnnnnnnnnnnnnnnnnnnnnnnnnnnnnnnnnnnnnnnnnnnnnnnnnnnnnnnnnnnnnnnnnnnnnnnnnnnnnnnnnnnnnnnnnnnnnnnnnnnnnnnnnnnnnnnnnnnnnnnnnnnnnnnnnnnnnnnnnnnnnnnnnnnnnnnnnnnnnnnnnnnnnnnnnnnnnnnnnnnnnnnnnnnnnnnnnnnnnnnnnnnnnnnnnnnnnnnnnnnnnnnnnnnnnnnnnnnnnnnnnnnnnnnnnnnnnnnnnnnnnnnnnnnnnnnnnnnnnnnnnnnnnnnnnnnnnnnnnnnnnnnnnnnnnnnnnnnnnnnnnnnnnnnnnnnnnnnnnnnnnnnnnnnnnnnnnnnnnnnnnnnnnnnnnnnnnnnnnnnnnnnnnnnnnnnnnnnnnnnnnnnnnnnnnnnnnnnnnnnnnnnnnnnnnnnnnnnnnnnnnnnnnnnnnnnnnnnnnnnnnnnnnnnnnnnnnnnnnnnnnnnnnnnnnnnnnnnnnnnnnnnnnnnnnnnnnnnnnnnnnnnnnnnnnnnnnnnnnnnnnnnnnnnnnnnnnnnnnnnnnnnnnnnnnnnnnnnnnnnnnnnnnnnnnnnnnnnnnnnnnnnnnnnnnnnnnnnnnnnnnnnnnnnnnnnnnnnnnnnnnnnnnnnnnnnnnnnnnnnnnnnnnnnnnnnnnnnnnnnnnnnnnnnnnnnnnnnnnnnnnnnnnnnnnnnnnnnnnnnnnnnnnnnnnnnnnnnnnnnnnnnnnnnnnnnnnnnnnnnnnnnnnnnnnnnnnnnnnnnnnnnnnnnnnnnnnnnnnnnnnnnnnnnnnnnnnnnnnnnnnnnnnnnnnnnnnnnnnnnnnnnnnnnnnnnnnnnnnnnnnnnnnnnnnnnnnnnnnnnnnnnnnnnnnnnnnnnnnnnnnnnnnnnnnnnnnnnnnnnnnnnnnnnnnnnnnnnnnnnnnnnnnnnnnnnnnnnnnnnnnnnnnnnnnnnnnnnnnnnnnnnnnnnnnnnnnnnnnnnnnnnnnnnnnnnnnnnnnnnnnnnnnnnnnnnnnnnnnnnnnnnnnnnnnnnnnnnnnnnnnnnnnnnnnnnnnnnnnnnnnnnnnnnnnnnnnnnnnnnnnnnnnnnnnnnnnnnnnnnnnnnnnnnnnnnnnnnnnnnnnnnnnnnnnnnnnnnnnnnnnnnnnnnnnnnnnnnnnnnnnnnnnnnnnnnnnnnnnnnnnnnnnnnnnnnnnnnnnnnnnnnnnnnnnnnnnnnnnnnnnnnnnnnnnnnnnnnnnnnnnnnnnnnnnnnnnnnnnnnnnnnnnnnnnnnnnnnnnnnnnnnnnnnnnnnnnnnnnnnnnnnnnnnnnnnnnnnnnnnnnnnnnnnnnnnnnnnnnnnnnnnnnnnnnnnnnnnnnnnnnnnnnnnnnnnnnnnnnnnnnnnnnnnnnnnnnnnnnnnnnnnnnnnnnnnnnnnnnnnnnnnnnnnnnnnnnnnnnnnnnnnnnnnnnnnnnnnnnnnnnnnnnnnnnnnnnnnnnnnnnnnnnnnnnnnnnnnnnnnnnnnnnnnnnnnnnnnnnnnnnnnnnnnnnnnnnnnnnnnnnnnnnnnnnnnnnnnnnnnnnnnnnnnnnnnnnnnnnnnnnnnnnnnnnnnnnnnnnnnnnnnnnnnnnnnnnnnnnnnnnnnnnnnnnnnnnnnnnnnnnnnnnnnnnnnnnnnnnnnnnnnnnnnnnnnnnnnnnnnnnnnnnnnnnnnnnnnnnnnnnnnnnnnnnnnnnnnnnnnnnnnnnnnnnnnnnnnnnnnnnnnnnnnnnnnnnnnntcgtgagcgcgtagttgcccacgagcgatgcgtcgtccgcaatcttccccggctggcggtcggtcggccagtaaccagtcgtccagttaggcttatagaaatacgagccgcgcgccgccttgctcgcttgcttcttcatcgtttccttctgctccggcgtcagcgcgccccaatggatcacctttggttggccgggctttaccgtgggcgacgaaccccagtatatcttcactgtgaaatcgggcatcgcgtcggggttgaaggccccaccctcaaccttctcggcctgcggccggtagaggctgaggtcgagccggttgccctgcttgagcccggccgcaggcgcgatgtaggcgaatgcgtcgggcggcgcaatacccggcgaccacagccgcacatccagtagccgctgcggagcaccgggcatcgcgggcacgttccgcatccctggaatcttcgacaggtctacgcctggcggtagcgtcggcattgccggcatcgcaggcattcccgccatccgcatgaccttggtctctgcgaagatgccgaggtacgcttggtcgccgacagccaacgcgctggtggcggccagcaacaagagcgctaaagttacagccttcctcatcggtgggcctccttatcccgaatcgctatgcctgcggcgcaaccccgctgtagcaacacggtgcagcgcccgcgtgcgggtccacagccgtcttctgcctggtcttgacgcaacctcttgctcagaaaacacagccacacacagcggctaggcgccggtgatagcgttgcccctgccgtccgcccccgaactctacctcgattcattccccgattcgtcccacgaacgctgaagcttaacaggatgaaggcgggcggaggcgcctgagcggcgaagattctgccgggaagatgaacgtcgcaattcggcgccgccggcttgcgcgctttccgccgaaagcaggcttccgtcgtggtttcgctggaagaccaggttacgtacgcaaagctacttgacggctatgagaggccaatggctcggctgtacagagcatatgcagcgtttgtcggtcctcagcaaacgtggggcacgccagggggtgaatcaagtcgcagttccggcgtccctgctctcgattcttgatccctccgcgcgagcttgcgatggtgctcacgcctggcctatccaagcaggccgcgggtttcgatccgccgcctgatgtcttcgacattgcgagttcgtcggattgccgcaacgaagtccggcacggtttccagatctacgcccgtacgctcgacgatctcgtcagcccaatcctcggggaggtttacgcggatgcacatgccgccatcccacatcggccagcccatctgctgcgccaccgccttagccttggcctgctctggctcgaggatgcagtttggcacggtcattccctttcccccgaagacgtcgtgacgtgcgagccgcaaccgacttcgctcccaaatacgctgacatccgcgatccgatacatgcgattcccgagccgaatgatgacgtccgagaggtaaaagcctggcaggccagagcgatcatcgggaatgacagagtcggggcgcttgctgcaaacagaggcgtgaacgggtggacaccgcgtggcgcaagcccgcccgcgcttgccgagcttgcgctgcaagcatgaggtcttcggcgtaaggcatccgtggaggggccggaaccacgtcattagccgtctgccccacggacgggactccggacaaccataggccgtcttcgacgaactgggcaccattgtctccgcacgctcacagtgcgaactgccgatcaggattggtgcttcgggatgggctgcagcggccgcgcttggcagccgccactgcgggctcttcttcgcggcctggcggcagactccttctggcgaatcagtcggcccccactggtgtcgccgacggctactcctcacgggcgcatatcgaagtcccgcggggcggacctgccgtagaactggaggtcggcgaaatcgaggagcgcctgccagtccggtagggtgtgcgcgtgcgcgccgtctcggtaccagatgccgatccgatcccccacccccaggaaacggtaaacctcgcgcgcggcctcgtgagtcagtcgggtgccccgggggctggcccagatgtcgccgcgtgcctccgtgctgagcagcgagcgcggcgccaccgcagccttgagggcgtgctggtcgaagggcaactcggactcccgtccgacatactctttcaggcgggggcagaaccaattcgggaaagaccgaatgatgtcggcaagtcgttcccctccctcatccgggaaccgggagcacccggcgccgcagcagccggagttgttcggcgccgtcagcgcaacccgttcatcggttgcccccgccaggagggcggccttcccgctgcgtgaatgtccggtgacggcgatgcgcgcatggtcaatggtaggcaagtgctgcaagaagtccacgacccgatggtagccccaggcccaggccgccagtgcgccgaagtcgcccccggggaaaactgagcacaggccgcggtcaccggcatcgccgggattgtccggcgccagcccgtcgcggctgaagatcgcgagcgcgtaacctctccgcgccgctacgagtaagaccccatcggcgagatgccgcgagtgtccgtcgcccacgacaaccgggaacggcccggcgccagccggcgtgcagaccgtgagcggcaagctcaactcgccggttcctgctgtcagacggtagtgcgtggcgatgaggccctgctcgcgcgagtatgtggcggaatccaaccggcgggcggccacggccaggggtggcggcaggtgaccatactggatcgcctggagcgcctcgagtaactcggcccgccgcgccggccagtcctcgggcgatgatactcggcggccatcagcgaagagcagcagctccggtaggtcggcggcacagggggtgttagccatgtcgttcaactgatgatctccacctcgggcgatctcgcggaaaccccgcgggtgagttgagttgccgcacgtgcgggcttgcagagcagtcttcgctagcggcggcgaccctccctgcgcgctgagcgtagccagaagctatccccgagaagcgttgagtcggtggtacggccgcgctgtaccgcctgacgtacgtaaggccgcatcggcaggagcctgcgcttggtctgccgtaatgagtgccggcgcgggccgtgtgcacacacgaagcagctgcaacttgacaggctgcgatcccggctttcacgctcagggacgtggagcgaccgtgacgacgttgccgtcagtcgccctggggcgctatgaacagcgacaacctgatccaggtggtctggggtaagacgcaagcggggacaggcgaccgtcacccgctcgtctgtcacatgctcgacgtcggccaagttgcccgggcactggtggcatcccccgcctggaaacatgtcgcgacccgcctgggatcacgccttgggatcgacccccttctagcgccgtcactttgcggcttcctcgcatcgctccacgacctcggcaaggccgcgcccgcgttccaggccaagtggtcgtcaggctggcagagcgtcctcgacgccgggctcttgcccgatcctaacccgccgcgtgacttccaccacggagccgagacctacgcctcgctgcccgcgttgctggaggactcgggcgtgcttcgagttgaagacggcaacttgcaccgactgtgcgaccggctcgcgcaggccgtcgccgcccaccatgggacgttcttgtcaggaagagtgtacgccgaggttcgaccccagggccgggatgccgatggcttcgagacgggctggcgccgggtacgcagagccctgatcgaacgactcgccagtatcttcatcggtgacttcgtgcccgtcacctgccgacccgccaatctctcggctgccggcgtgctgctctgcggaatcgtgatccttgccgactggatcgcatccaatgcagaccgcttcccgcctgcgggcgagtgcgacctcgacgagtatgtgtctgtatcctccgagcacgctcgccgcgcgattgacagcctggggattgtcgcgtccccatccattggatcggcgccgcgcttctcggacctattcccagcgatcaaacccactcggcccgaaaccgcacaccgattccgattgaggcccaccactggttccacgcgaaccccgtcgaagcggcgcgaggacagacgcgggtgtccctcccatcgcaggatcattgagcttgcgacagccctcgcgcctgatcaccaccgcgaacctctcgttctctgccgggccagaaccgcctccttgggccgaactcgcgtgggtacgcgggcgctgagttgcggcgcatctgtaatcacagaaggagtgcgcgaccacaagggcgaacctgggtttgcctgcgtcggccgtgacgcccttggccgcagcgaggccaaggcgccaggaggttcgcccatgagggattcgcctctgctggatatgaacctcgcaccgtgcttcgcccccgtactaccttactggctatctcacctcaccccatcacctgacattggctatcgaggagcaagaccggcatgagctacaacctccttgaggaaaagtggattccggttctgcggagcgatggcaccgcggagcgcgtgggcatcaggacggcgctggtggaggcgggcggcatccggcagatcgcggcgagcaatcccatggaccgcgtggcagttctgcgtttcctccttgcgttgctgtattggtgtaaagggaacccgccagacgaagggagcgccgtctccggcaactcgttccctgcagtttggttctctaagctcgatgacaattgggactgcttcaaccttctgggctatggaaagcggttctatcaggatcgcgacgccaaacgaagccgggcggctacggatctgatccaggagattcctacaggcaacaacttctggcatttccggcactcgatagaccaggaggacggactctgccccgcatgctgcgccatggggctactgcggttgccgctgttttccgtgagcggcctgcctgatctgaagtccggcatcaacggcaccccaccggtgtatgtcgtaccctggggcgtgtcattgctggcgacgcttcaggcaaactgggtgacatacacagaccttggcgaacccgcatgggttcaacccggcattcgcccaactcctggccagggcgtacccctgcttaccggtttgacactgctgtccaggcgggtttggctgcatgagcccggacagtctggcacatgcgttggttgcggagcagaaaatgcggcgctcattcaaacatgcatgtttcagtcggctggcgagcaaaagaacgaccgatggaatgatcctcatgtggtctattcggacgcgacgccacgaaaagcctggaaagcgccagatctgacggcagccggtaagttccggatggaccgcccgtggccccgtctgcttgccagtgtcatcgaaacgggcaagttcggatttagggacaagccaatatcgcttctggtcgtcgggtttgccactgatcaggcaaagaacattgacgtgtgggaacgaaccattgctgcgccatcaacagaatcaactcaaggaacggcggcatcgttgatgcagcaatggcagaaggaggctgaacggctcgggaaaagggtagcgaggtctgaggtcgagggcgcggccaccatcgccgccattcgcccccacgtcgagggcagagtctccgcgagggcgggtgagctcattgccggcacggacgaagcttgggatcgggctgcggcggaatatcgtccgatgatggacgccatcgccaggtctctttccccgggcttcaccgtcgcggcggtcgagcgccggagggagattgccaggacactgccggatatgcggcccagaacaaagtcagctgggaaacctcgccgaaagaaaggaggaaacgagtgaccgcgacggagcagtacgtcgaagccctggcgcacctgaagcctggcgaactggggctgctgcggacccacgcgggacaagatctcgacgaaaccgtggacgggttcgacctgttcgcgggcctatggtggccgttgcggcagacgagcccgcgggcgccgcggcgcgaggtagcgtggcttatcgcaaagctctacgcgtcccgcccaatccctcaatcgcgcggggacacgctcgcgcgccaactgcgaggatgccaaccggctagggatccggcgagacaccgttttcaggatgcgttcgaccggatgctcgtgctcccgctgggcaagattgagcctgcgctgcggcgggcgcttgacgtggttgcatctggagcgaacaagctggattgggtccaactcacggacgatctgtctttgtgggagcgcgaagccacgcgcctgaagtgggcctatcagttcatcggacacaacgaaaggggagaatcatgctgatcgaaatccatgcgattcagaaccacagcccggcgaacctgaaccgggacgacctgggcgcgcccaagacttgcttcttcggcggggtcctgcgctcgcgcgtttccagccagtgcctcaagcgaagcatccgcacgagcgagcagttccagaggttgctcggcggtgttcggactcggcagttggcgcgattgattgccgagcaagtcaagggcaagtccgacatgacgaagcgtgcggaaaagatcctcggaatctgtggatttgctgccaaggatgaggatgctcctgaaggttccgagaagagcaagatgcttgtctacacgacgcgcgaggcgatcggggagatggcaagactcctgcaagatgggaaggcgaagaccgatgcagcgctggcacttgacttcgcgaagctgatccgcgagcgcgtggctgtgccggatatggcactgtcagggagaatgctggagcctgacaagtcagccaaggaggtgtggaagggactcgacacgaccgtagacgcggcgctgcaggttgctcacgcgatctcgacgcatgaggcccgtccggaagtggattactacgttgccgctgatgatatcccgggcgaggacgcaggagcgggctatgtggacgaggcaatgttcgcctccgcctgtttctacaagtacttctcgatccattgggaaacgctggttgacaacctcaagggctacggcgagaagcacgagaagctggcggcccacacggtcggcgcgttcatccgcggagcggcgctggccaatccgacgggcaagcaaaacagttgcgccgcgcacaatccccccgatggaatgctgattgagatcaagagcactccaatcagctacgccaatgccttcgccgacccagtgccgacgaagggcgaacgggacctgatctcgcaaagcatcgcccaaatggcacagtatgtccacgacttggacactgggtacggcaggccacagaaacgcttctggttctcgcccaatctgcgctatcccctgagcatcgcaggcgacggccgtaagcaagtgaaccttgccgagcacaacgtgaagtccctagaggagttggtccccgctgtggtcggcgccatcgggcacgactgggaaaaggttcagaaggtgatcgtcaacccagaggtgcaggcatgagcgagaataccctgttcctacgcctcgaaggtccgttccaggcgtggggcgatcaggagtccaagttcgtcatccgacggacggccgaggcgccgacgaaatcaggggtggtcggcatgctctgcgcagctttgggcgtttcgcggtccgacgccgccaaggagtggctgccgaagctgaccgccctgcgcatgggcgtccgggttgacgtgccgggtgtccgctggtgggactatcacacggtcggcgctggcatgcagatgcgcattgcggaagggcagggaaagaccaagccgggcgccatgctcagcaggcgcgagtatctgtgcgatgcttcctttctggtagtgcttcagggcgaagcggcgctgattggcgaactcgccgcggcggttcggaatccgaaatggacgctctatctcgggcggaagtcgtgccccccctcccggccgctgctggaacatccgtgctgcacgtctctggatctactctcggcggtagcatccgtcccctggcggcggcggctgtccagagatgacgcgccgcaggccgtgggttgcctgctcgattggcaaccgacccgtgaccagcccgaagcgcccgacggtgcgctcgtctggtatgacgtcccgctgacattcgaaccgccgtcgcacggcccccgattcgtcatccgcaaggacttgcgcgtgggtacggacggggaggtgcagatcgcggacaagccagcgcagttgcctaccccggctccggcgcgcccgcgcgcggattacggcaacactcggtataaggcggcgcgcagtgcccgcgttgcggcagactacgagctctgcgtgttctgcaaggcgcccgccgccacggtgcagcatatcacctaccgccgggccggaggcgacgagtcgcaagatgacctgcgctcgctctgccgcctctgtcatgacgccgtgaccatgatcgagtacggcctgggcatgggcctggaccgcatcaacccggaggaaccgcgctggcgagagaagatcatcgagaaacgcgggaagattagcaagttccgttcgctggaaacccgccgtcggcgcctcagcgccgaggaggtggaatagacatgtacctgtcctgcctcttgatcgacgtgggtgatgaccccgaccggccccggcccggcaggttgtggctgcgcaacctctaccacgttcaccaacggttgtgcatggcgtttccatcggcgtccaggatatccgatgatgcggattttctccaacccttcaagccggaagacttcggccgagagccagttcatgtcgctcgaggatcgtgcgccgggtttctgtttcgcatcgacccgcagccgggcggccgggtcgtgattcttatgcagtctgcggtgaagcccgactgggactacgcctttcgcaacgctcgttatctgctggcggctcccccacaggtaaaggcattcgctccccgcttcgcgcacggacagcgtcttcggttccgtctggcggcgaatccgacgcgcaagatcgacacgaagagcggaccggacgggcgtcggcgcaacggacagcgcgtctctgtgccgcccgaccaattccatgaatggctcgctcgccgggctgagccggcggggttcgccatcgacaaggattccaccaccgtccagccgggctacatctatgtgaacaaggcacagaacggcaatgggcaacgcctgcgctcggtccgatacgacggggtactcaaggtcaccgacccaactcgcttccaggagacccttgtgcgaggcatcggccccgctaaggccttcggcttcggccttctatccgtcgccccgctgtagagtgaacgacataaccaaggcatggtaatgagtaacaagcgcatggacgatcttcaccgtctgccgaagttccgcgactgcttgtcgtacctctatctggagcatggtcgcgttgaccagcacgagaagtctatagcttttcacgacgcccagggcatggtgcccattccggctgcctcgctggctctgctcatgcttggcccgggcacctccatcacccatgccgcaatacgcgccttggccgacaacaactgcctgctcgtctggtgcggcgaagagaacgtccgcttctatgcctcgggcatgggcggcacccgcagcgctgcggctctgctccatcaggcccgtctcgccagcgatgagaaactgcgcctccaggtgatcgcccgcatgtaccgcatgcgtttccaggaggagcttccgcccgagaccaccgtcgagcaactgcgaggactcgaagggtcgcgcgttcgcgccgcctatgcccgcctcagccgcgagaccggcgtaccctgggctcgccgcaactatgaccgcaccgactggacggcgggcgatcccatcaaccgcgccctctcggccgccaatgcctgtctttacgggctatgccacgcggccattctctccgtcggtctcagtccggccctcggcttcattcacaccggcaagcaactctcatttgtctatgacatcgccgatctgtacaaagttgacctgaccacgccgatcgcctttcgcaccacctccgaaagcgaggccgatatcgagcgccgcgtccgcctcgcctgccgcgacgctttccgtcagggtcgcttgcttcagcgcatcatccccgatattcgcgaggtccttggcgcgactgatgaaggtgacgtcttggctgacatctgggccagcgatccctctatgcccgcgcaactttgggaaccgtctcacggcaccgtcatcgtcacgccgcccgacacggacactccaccggaggtgacgacatggtcgtcctgatcgtcgaaaacgcgcccgccagcctgcggggcgagctcagtcgctggatgattgagccgcgcgccggtgttttcgtcggcaccatgtccgccatggtcagagataagctgtgggagcgtgtcgctcgcgctggcatagatggcggggctactatgcttcactcatccaataccgagcaagggtttgcagtgcgaaccttcggcagcacctcacgccagatcgttgagatcgagggcctggttcttgtccagcgcagcgacccgtccgcaaacagccgttccgacccgtgaagcaaacgggggtttctgtgttccccacgcacgtgggggtggaccggccgtatcgcgtatgatctgcatggtaaccttgtgttccccacgcacgtgggggtggaccgtcatattgtgattcgcgtggcggctcgtttgtgtgttccccacgcacgtgggggtggaccgcagcacatggctgacaccgcgcgacggtacaagtgttccccacgcacgtgggggtggaccgaaacacgaggatggatttaatcaacaaatcggtgtgttccccacgcacgtgggggtggaccgcagcacatggctgacaccgcgcgacggtacaagtgttccccacgcacgtgggggtggaccggggtgccgacacagataaagatgatgtcgggcgtgttccccacgcacgtgggggtggaccgcagtggtcaagccctcgccgagcgcgaccttcgtgttccccacgcacgtgggggtggaccggtgtggtagccctgacaactaaccatggggaagtgttccccacgcacgtgggggtggaccgaccgttaggcaaatcctggcagacaacctgacgtgttccccacgcacgtgggggtggaccggcgaacctgacggcagggagcagccggagattgtgttccccacgcacgtgggggtggaccgcatgtccgagcatttcacgcgcaatatccagagtgttccccacgcacgtgggggtggaccgacggcgacctgttgaggctcgattcgggcgaggtgttccccacgcacgtgggggtggaccgcgggtaggacgcgtagccattgtcataggcccgtgttccccacgcacgtgggggtggaccggcgaacccaagatcgcagatgccgaccctctggtgttccccacgcacgtgggggtggaccgcaaaacgcgcaccgattcgggcacccgcgcgagtgttccccacgcacgtgggggtggaccgccgtaagccacgcgctgcgcgcagcgcatcaagtgttccccacgcacgtgggggtggaccgcaacgccttcgggtcggggacgtgctcaaagagtgttccccacgcacgtgggggtggaccgtcgttgtatccgcagatgggcggttccggcccgtgttccccacgcacgtgggggtggaccgggggcgaacccatgacatctgccatgacgaaggtgttccccacgcacgtgggggtggaccgtttgcgagcattgggcggcgcgacaaactcgggtgttccccacgcacgtgggggtggaccgcagatcagcggcttcgatggcgggtatgaggagtgttccccacgcacgtgggggtggaccgatgcgcgccgcgacgcaaggcggcctgcgccggtgttccccacgcacgtgggggtggaccgcgaactcggtgagtatcgggaggacaacggaggtgttccccacgcacgtgggggtggaccgtaacgcaacgatcgttcatccccggcatgggcgtgttccccacgcacgtgggggtggaccggacgattcgtcggcgacggcgagcgcgctgacgtgttccccacgcacgtgggggtggaccgataaacgtacgcatcgaggaaaaactggccccgtgttccccacgcacgtgggggtggaccgtttgcgagcattgggcggcgcgacaaactcgggtgttccccacgcacgtgggggtggaccgcggaccggaaaacgcagggcggaaacagcgaagtgttccccacgcacgtgggggtggaccgtgggttcattgcacggaagatcgctatgtttcgtgttccccacgcacgtgggggtggaccgcagttgctgctctcagggatgcgtgagggctagtgttccccacgcacgtgggggtggaccggcgacgcagaaatgatctcagtcatcaccccggtgttccccacgcacgtgggggtggaccgctcgcgcgccttaccgtcgttagtgtaacagggtgttccccacgcacgtgggggtggaccgccggcgaatgtcggccaagcggtggaagcggtgtgttccccacgcacgtgggggtggaccgggaatcgcgcgtagtgcgccggggggccgggggtgttccccacgcacgtgggcgtggaccgtggcggcgcttctgctggcagtcgcagagttcgtgttccccacgcacgtgggggtggaccgcaggccacgccctggctaagcggcggtcgcacgtgttccccacgcacgtgggggtggaccgcaatcgctgggtcgcatccgcagcgacttcgagtgttccccacgcacgtgggggtggaccgacaatgccccctcgacgccaagcgcaaacgacgtgttccccacgcacgtgggggtggaccgtgcccaagtttcgagccgtgattgagaagccggtgttccccacgcacgtgggggtggaccggcgagtggcgcgacccaaccccagaggaggctgtgttccccacgcacgtgggggtggaccggaggggggcgcgactgaatcattgccggcagcgtgttccccacgcacgtgggggtggaccgcattacctacgtctacgccatccttggctcgtgtgttccccacgcacgtgggggtggaccgcatccgaatggcatcctctcgccgcaaccaacgtgttccccacgcacgtgggggtggaccgcgattgatcgaggagggaatcgagttggacgggtgttccccacgcacgtgggggtggaccgatagccaggaccgctgggaaccgcgtcgccgggtgttccccacgcacgtgggggtggaccggcgtacagtcttatggacacggcatggttgacgtgttccccacgcacgtgggggtggaccgttcctcgcgcggttgcctgccaatcagcaggcgtgttccccacgcacgtgggggtggaccgaatgcctcgtccggcagccgcacgtgcccctcgtgttccccacgcacgtgggggtggaccgcgatgaaccacgagttgctctcgctctttgaggtgttccccacgcacgtgggggtggaccggttggcccggatgctcaactctgtttcgactagtgttccccacgcacgtgggggtggaccgcgattggagcacgcccttctcgtccgcgtcgcgtgttccccacgcacgtgggggtggaccgcgcattgaggcgctggaggcggacaatgccaagtgttccccacgcacgtgggggtggaccggtttacctgcgggcggaggatcgcaaactgacgtgttccccacgcacgtgggggtggaccgagccgccgcgcgatgtcactcgcggtaatcgcgtgttccccacgcacgtgggggtggaccgaacgggaccaccgtgtcctcgctcaactcgccgtgttccccacgcacgtgggggtggaccgcaaacgcggaggagaacgagatgtcctatgacgtgttccccacgcacgtgggggtggaccgcaggggcagggaggtgggtgataccatgagttgtgttccccacgcacgtgggggtggaccgttcgacctcgcctaccagcgcgccgccaaggagtgttccccacgcacgtgggggtggacatgcaggatatcgcggcgcgcacccggccgcgaacggggcgccctgggcgcctgtgtggcgcgctcagcacgcgtctacgcctaccgtcgccaactgctcgttccgccgccgtgggcgcccccatgcgcgttgtgtcggcactatcggctgctcttggccttgacttccgcggcgcgaacctcctccctatgttcttatgcgatgttcagcacgcgcgtgaggagggcaacatgaccaagggaggatcagggaaggtagggaggggtaaggttcgggcgagccagcagactcggtcgctgctagccgagttcctggatgcgctcgcgcttgaggggcgctcgccgcattcggtgaagtcgtatcgccgcgacctcgaaccgctgctggcggcgctgccggcccggctcgacctggtgcatcccgccgacctgcgggactacttccgcgaccagttgcaggctggccgcgcgccctccagcatcaaccacgctatcgccgccacccgttccttcttcagcttcctggtggacaatcgcctgctggattccagccccgccatgaccttgcgctccatccgcgtcgggccaagcttggcccccaagcacctgacggtggaggaggtggatcggctgctggccgagccgcaagttgagaacggcgctggtgtacgcgatctggctctgctcgcctttctctacaacaccggcctgcgggtgggggagctgtgctcgctcgaccgcgccgatgtccagttgccgccggacggctgggggcaggtgcaactggtgggcaagggccggcggctgcgctgggtgcccatcaactcccgcgcccgccggacgctcgaggattacctggcccaacgtcaggacgacaatcccgcgctgtttctcaaccgcagcgggcagcgtttctcggtgcggggagtggccttgctggtgaaccggtatctgcggcgcatcgggattaccgaccgctccgggccgcatctgctgcgccacacctttgccactcacgccctgcgagcgcggcacaatctgcgcgcggtgcaggagctactggggcattccagcgtcaccaccacccagcgctacacgcacatggacgccgatgacctgcgccaacaggtggcggagttgccggccaaccggttgcggctgtgacacaccccgccagccgtagcgctagggccggccccatccatagcccgacgcgccagccggccaaggtcttcgcaggcggcgagctcatggcaggcgtcccgcagccatctggcgcccggggtatgtcaggacgacagcggtctcaatcagggctgacaaccacacactgtctccccgcggcgacagcttccgagcattaactgcgatgctcacctggttcgataaaggtgaacgcttggtcgctggcgaaccaagccgaaacaagagggaaatgcttcaccggaggtaatcagctatgcccaaaacagtgtatgtgggaccacacagcctcgtctaccacctcagctccaagtgtcgccaccttatgggggaagccaagcggactacggacgtcgccgcccagaagaagggaatcacgaaggcgtgcagcacctgtcaggcactcgtcgcggcgaaaccgaacaaagggaaagaccctgaagcgacgctgacccctacgaggtggtgatcgagtcgaaggcccggccatatcataggccgggccaggattcccatcccggaaagcattgaacccgcggggacctgaaggcctcgacggtcagcatgagcgagtgtcagcgcggccttcccggtttctccttgggggtcttctgggatcggcccacaacttcgtaacctcccgccgcaggaactatatcgtcgccaactgcgccggtctgatttccaagctctcggccgacctgctcttcggggagcagtcggatttcgtcgtcgcctcggaagacgaaacctgggaggatgcgggctcgccgcggccgagctgaggaagggggactgagcccataagaccagtcttgcctatccggctgattcaccaggacacaacatcctgtaggtcatatgtgcgccataggagcccacctacaagatgctgtaccgtggtgagcggacaggataggcagaagaccagttatggggccagtagacacgaccggcgcggcccaacctgcgcgccgtccaggagctgctcggccactccagcgtcaccaccacccagcgctatacccacatggacgccgacgacctgcgccggcaggtggcggaaatgccagccaaccactgccggcagtgacaagcagagggctgaagctcatttactaccgccgcgccagccggggcgccggccactgcgccagagccgcctacggtgccttccagagaaccttaccgtccctgtcgaacaagaccagccctgggctcccgtcggggagcacgcccaggccggcgcgcgcctcaacggctggagctacgcataatcgggttctcagggtgtaggcgcccgggcgcgcacagcactctcacgtcgcggcaaatggtcgaacggtgcaacccccgtccccctttcatacttgacccgctgccggagctagagagttatcctcgtgccgtctcgcagcctcaccacgactggccgccactccgtccgctggcgccatgccttcgctgtaccaacatgttccctagctacaaacacgcgcacctcgaagggccccttggggtcgtactggggtggtttggccaaccacaaactcgacgccaaagcctccatttccgggcccctcatcggtccgtagaacgcgcccatcttcagatgaacctccacaaggcgcccagactttacggcgatgcgctttatcccctcgcgcagcttctctctgtccgcccagtcaagcatccaccgaggcgcggatgaactgtgggacagcacatctgcgatcttcttatgcccgtaatcgtcagctgcgcgcgacggcgtcgcgccgaaccggttcctcgcgttcgcgttagctcttccggcgcgaagcaactggacaacctccgcgtaccccgccgcggccgctatatgcaagggcgtattgccgttctcgttcttcgcgttaacgctcgcacctttggcaatcaacagccgcaccacttcgacctgaccctccgaggctgccacgtacagcggcgtatcaccccatttgctcttcgcgttaacgctagcgcctgcggacagcaatacctgcgcgacctcagtttggcccgttgcggccgcataatgaagcggcgtctcctgagagtcgtctttcgcgtttaccctggccgcttttgagagcagtactcttgccaaatcggtatgccctgcccaagccgccatgtggagcggcgtcgtggagtctatggcccgggcattaacgttggcccccgaggagagcaacagccgtgccgtgtcgacgcgcccttcgatagcagccacgtacaagggcgtttcgctgacccctgccccggcgttcacattagcgcccttggacaacagaagtcgcaccacttccgaagcaccggctccagcggcctcgtgcagcggtgtgtggccccatgcgtccttggcatccaaggcagcgcctctagagatcaagagatccgccacatccccgtgtccgtcgcgggctgcgcaagctaagggggtttcccgtccccacacgcgaacggctctctcctgggcaccgcgaagctctccggccgccgtcaaagcctctgccattcggtcaggcggtaagttaccaccgctataaagaaggggttcggtgttctccttgtccttggcgttgacgcttgctcccttggttagcaggaattgcacgactgccgtctggcccgccgccgccgcgacatgcaaaggtgtcctcccgcggccgtcaggctgctccaggaaggccgggtttctttctaggagactgcgaacaagcgccacgtctccgcttgacgccgcagcgtggatgtcgccccgccgcccggcgcaccccgccgcgacgatccccgccagcaccacacacacagccaccagcaccgcccacttgaccttgctcatgctcctgccctccttgtcagcttatcaccacgcccccgccagccgcagcgctctaagccgccatggccaccgcggggcttcaacggcggtcgtaggcttattggcagaccgctgccgacggtcagtgcgctacggagcgttccagagaacccggccgtactggtcgcataacgccaacaccggacttccgtcggctcggagggagaaggttgcacgcatcttgccgtttgcgtcgtttaggtctagccaggggctcccgtccgcgagcaccccgagaactgcggccgccttactctgtccgtgcgacaaaacgagcgataggctgccgtcgtctaggaccccaaagagcgcttgtggtttgccgtccgggccgttcaacgcgggcaccgggctgccgtcagtatccacggaaagggcaatgcgcgtcttgtcatccgtgtcgagcaagtgtagatgcggggtgtcgcccaccacccccaagaccacccgtaacttaccgtttcggtcattaaactggagccccggactcccgtaggacgatggacccagcacagcgcgggcaacgccctcgggactcaccatctcaaatcgctcagctcgcaccaccttcgctgccggctccgtcgccgccaggcatacgaaaccggcgactaccgctgccaacgccaacaccccagtcttgagccgccggttcgcttgctccagccgctcgactcgttgctccagcgctgctacgtccacgggattctccttttcgtgggttcccggccttcgcgttctcatactactgtcggctgctccaacgcccattcgtcctaccgttcaacgaccgcgtcccgcgcgcagcgaaagccgtagcaatcccatctctcggtgggacggtcactgcgcctggacgcgcaacgcgcgaaggccgggtctatcatccgccaactgccgccgcgaatgactcgcatggttccactggcaggcggggtcagatcgccccgagcgtagcgcagataagccgccttgtcgtaccaatcggcgcaccactccgacgcgttacctgccatgtcgaagcacccgtatacgccagcatcggtcgggtaggaacccactaccgccagaccgtcctccggcacgtggtgcgtgcgtagccatgggcctatcgccgcatcccaaacctgcagtgttgcccagctgcggccggttacgacttcggaactccggcacagccctttgtcccacttgttgccccacgggaagaaacgtccgtcggtgccgcgcgccgccttctcccattccaactcggtcggcagccgcagcccagcccattcacagtacgcgcgcgcatcatgccaatccacggtcaccgcaggacggctctccaggcccttcggcagatccttaacccaccagtcccatttggcaatatccgtaccgccgcgacggccagtcgcctcgacgaaacgctgatactgcgctccggtcacttccatgcgtcccatccagtagccggccagccggacgcagcacggtggctgttcgccggagaatgcctgcgccgtcgaggtgagcgaccacggattgccttggcgccacacttcgacgtccgcatccgaggtgcccagagtaaactcgccgggtggaacgtacaccaacgccatgccgtccctgggattcacccagacatccccctcctcagggttcgagggcggacttggcgtgcgccaaatgaccgcatggggattgcactggggaggtggtaataccggttcggtcgagcggtttgctgccgctgcggtgaggcggatggggactaggcagagaacagcgagcacgagaatgctagggtaactgtgcttcttcctggccatcgcaccctccttcgacggctcgcactgaaggatgcttccgcgtggaaaccggcgtccctgctcggaaatgtgccggcggtggtctgccgtcgctgccgcttgtcatcaaccgtgacctgagtgcttacgccgcagcactgcaggagccacacactctccgatcgggcatcctgctcaaggtcgcgttccgcacgctgcaaccagaggagcaagatgcgaaggtaaggatctgcgcgagcaagtgccagataagccggcgaaccgccctcctcggtagggaaagcggttcgcctgtgcgtgcggcggactggttggtggaacgcgattacttcgcctgctcctcgaacacctccatcatccgcaccagcagcttggagagggtcatctcctgtgccgccgccagcgctcgcagccgctgggccggctctcctcgcagcgcgacggtcgccatcggccccgcagcgcgccccgtttgcgcgacgttgcgctcagggcgcttggtttgcccatcggcggcctgtgccggcggctgctcgccttgcgccgccgcttcggcatcgagcatcttccgcgtctccgccaccagcgtggcctcgtgcttcttcagcgcggtctgtttggcggtcacctcggctagctgctcctcgcgcttgtgccgtcgcgtctccgcgcccttcttcgccgcttcgttgcgcgcggccagtcgctgctgagtccgcttctccaccgctcggttctgctctgccttggtcatcctgtcttcctccggtgagtcatattgtgccggcaatcaagccgaccgacataccccctcactcggacccaccggattatgctgcgcgagtgattatgtagcggtcggccacgtgccaccttgtattcacgctcgattcgacgagaaagtcgaggcctttacacaacataatcctgcgctccatgatggactggggc

SEQ ID NO: 988 - DNA, 114753 bp, Artificial Sequence
  Synthetic Oligonucleotide
  misc_feature (1)..(94207): n is a, c, g, or t
nnnnnnnnnnnnnnnnnnnnnnnnnnnnnnnnnnnnnnnnnnnnnnnnnnnnnnnnnnnnnnnnnnnnnnnnnnnnnnnnnnnnnnnnnnnnnnnnnnnnnnnnnnnnnnnnnnnnnnnnnnnnnnnnnnnnnnnnnnnnnnnnnnnnnnnnnnnnnnnnnnnnnnnnnnnnnnnnnnnnnnnnnnnnnnnnnnnnnnnnnnnnnnnnnnnnnnnnnnnnnnnnnnnnnnnnnnnnnnnnnnnnnnnnnnnnnnnnnnnnnnnnnnnnnnnnnnnnnnnnnnnnnnnnnnnnnnnnnnnnnnnnnnnnnnnnnnnnnnnnnnnnnnnnnnnnnnnnnnnnnnnnnnnnnnnnnnnnnnnnnnnnnnnnnnnnnnnnnnnnnnnnnnnnnnnnnnnnnnnnnnnnnnnnnnnnnnnnnnnnnnnnnnnnnnnnnnnnnnnnnnnnnnnnnnnnnnnnnnnnnnnnnnnnnnnnnnnnnnnnnnnnnnnnnnnnnnnnnnnnnnnnnnnnnnnnnnnnnnnnnnnnnnnnnnnnnnnnnnnnnnnnnnnnnnnnnnnnnnnnnnnnnnnnnnnnnnnnnnnnnnnnnnnnnnnnnnnnnnnnnnnnnnnnnnnnnnnnnnnnnnnnnnnnnnnnnnnnnnnnnnnnnnnnnnnnnnnnnnnnnnnnnnnnnnnnnnnnnnnnnnnnnnnnnnnnnnnnnnnnnnnnnnnnnnnnnnnnnnnnnnnnnnnnnnnnnnnnnnnnnnnnnnnnnnnnnnnnnnnnnnnnnnnnnnnnnnnnnnnnnnnnnnnnnnnnnnnnnnnnnnnnnnnnnnnnnnnnnnnnnnnnnnnnnnnnnnnnnnnnnnnnnnnnnnnnnnnnnnnnnnnnnnnnnnnnnnnnnnnnnnnnnnnnnnnnnnnnnnnnnnnnnnnnnnnnnnnnnnnnnnnnnnnnnnnnnnnnnnnnnnnnnnnnnnnnnnnnnnnnnnnnnnnnnnnnnnnnnnnnnnnnnnnnnnnnnnnnnnnnnnnnnnnnnnnnnnnnnnnnnnnnnnnnnnnnnnnnnnnnnnnnnnnnnnnnnnnnnnnnnnnnnnnnnnnnnnnnnnnnnnnnnnnnnnnnnnnnnnnnnnnnnnnnnnnnnnnnnnnnnnnnnnnnnnnnnnnnnnnnnnnnnnnnnnnnnnnnnnnnnnnnnnnnnnnnnnnnnnnnnnnnnnnnnnnnnnnnnnnnnnnnnnnnnnnnnnnnnnnnnnnnnnnnnnnnnnnnnnnnnnnnnnnnnnnnnnnnnnnnnnnnnnnnnnnnnnnnnnnnnnnnnnnnnnnnnnnnnnnnnnnnnnnnnnnnnnnnnnnnnnnnnnnnnnnnnnnnnnnnnnnnnnnnnnnnnnnnnnnnnnnnnnnnnnnnnnnnnnnnnnnnnnnnnnnnnnnnnnnnnnnnnnnnnnnnnnnnnnnnnnnnnnnnnnnnnnnnnnnnnnnnnnnnnnnnnnnnnnnnnnnnnnnnnnnnnnnnnnnnnnnnnnnnnnnnnnnnnnnnnnnnnnnnnnnnnnnnnnnnnnnnnnnnnnnnnnnnnnnnnnnnnnnnnnnnnnnnnnnnnnnnnnnnnnnnnnnnnnnnnnnnnnnnnnnnnnnnnnnnnnnnnnnnnnnnnnnnnnnnnnnnnnnnnnnnnnnnnnnnnnnnnnnnnnnnnnnnnnnnnnnnnnnnnnnnnnnnnnnnnnnnnnnnnnnnnnnnnnnnnnnnnnnnnnnnnnnnnnnnnnnnnnnnnnnnnnnnnnnnnnnnnnnnnnnnnnnnnnnnnnnnnnnnnnnnnnnnnnnnnnnnnnnnnnnnnnnnnnnnnnnnnnnnnnnnnnnnnnnnnnnnnnnnnnnnnnnnnnnnnnnnnnnnnnnnnnnnnnnnnnnnnnnnnnnnnnnnnnnnnnnnnnnnnnnnnnnnnnnnnnnnnnnnnnnnnnnnnnnnnnnnnnnnnnnnnnnnnnnnnnnnnnnnnnnnnnnnnnnnnnnnnnnnnnnnnnnnnnnnnnnnnnnnnnnnnnnnnnnnnnnnnnnnnnnnnnnnnnnnnnnnnnnnnnnnnnnnnnnnnnnnnnnnnnnnnnnnnnnnnnnnnnnnnnnnnnnnnnnnnnnnnnnnnnnnnnnnnnnnnnnnnnnnnnnnnnnnnnnnnnnnnnnnnnnnnnnnnnnnnnnnnnnnnnnnnnnnnnnnnnnnnnnnnnnnnnnnnnnnnnnnnnnnnnnnnnnnnnnnnnnnnnnnnnnnnnnnnnnnnnnnnnnnnnnnnnnnnnnnnnnnnnnnnnnnnnnnnnnnnnnnnnnnnnnnnnnnnnnnnnnnnnnnnnnnnnnnnnnnnnnnnnnnnnnnnnnnnnnnnnnnnnnnnnnnnnnnnnnnnnnnnnnnnnnnnnnnnnnnnnnnnnnnnnnnnnnnnnnnnnnnnnnnnnnnnnnnnnnnnnnnnnnnnnnnnnnnnnnnnnnnnnnnnnnnnnnnnnnnnnnnnnnnnnnnnnnnnnnnnnnnnnnnnnnnnnnnnnnnnnnnnnnnnnnnnnnnnnnnnnnnnnnnnnnnnnnnnnnnnnnnnnnnnnnnnnnnnnnnnnnnnnnnnnnnnnnnnnnnnnnnnnnnnnnnnnnnnnnnnnnnnnnnnnnnnnnnnnnnnnnnnnnnnnnnnnnnnnnnnnnnnnnnnnnnnnnnnnnnnnnnnnnnnnnnnnnnnnnnnnnnnnnnnnnnnnnnnnnnnnnnnnnnnnnnnnnnnnnnnnnnnnnnnnnnnnnnnnnnnnnnnnnnnnnnnnnnnnnnnnnnnnnnnnnnnnnnnnnnnnnnnnnnnnnnnnnnnnnnnnnnnnnnnnnnnnnnnnnnnnnnnnnnnnnnnnnnnnnnnnnnnnnnnnnnnnnnnnnnnnnnnnnnnnnnnnnnnnnnnnnnnnnnnnnnnnnnnnnnnnnnnnnnnnnnnnnnnnnnnnnnnnnnnnnnnnnnnnnnnnnnnnnnnnnnnnnnnnnnnnnnnnnnnnnnnnnnnnnnnnnnnnnnnnnnnnnnnnnnnnnnnnnnnnnnnnnnnnnnnnnnnnnnnnnnnnnnnnnnnnnnnnnnnnnnnnnnnnnnnnnnnnnnnnnnnnnnnnnnnnnnnnnnnnnnnnnnnnnnnnnnnnnnnnnnnnnnnnnnnnnnnnnnnnnnnnnnnnnnnnnnnnnnnnnnnnnnnnnnnnnnnnnnnnnnnnnnnnnnnnnnnnnnnnnnnnnnnnnnnnnnnnnnnnnnnnnnnnnnnnnnnnnnnnnnnnnnnnnnnnnnnnnnnnnnnnnnnnnnnnnnnnnnnnnnnnnnnnnnnnnnnnnnnnnnnnnnnnnnnnnnnnnnnnnnnnnnnnnnnnnnnnnnnnnnnnnnnnnnnnnnnnnnnnnnnnnnnnnnnnnnnnnnnnnnnnnnnnnnnnnnnnnnnnnnnnnnnnnnnnnnnnnnnnnnnnnnnnnnnnnnnnnnnnnnnnnnnnnnnnnnnnnnnnnnnnnnnnnnnnnnnnnnnnnnnnnnnnnnnnnnnnnnnnnnnnnnnnnnnnnnnnnnnnnnnnnnnnnnnnnnnnnnnnnnnnnnnnnnnnnnnnnnnnnnnnnnnnnnnnnnnnnnnnnnnnnnnnnnnnnnnnnnnnnnnnnnnnnnnnnnnnnnnnnnnnnnnnnnnnnnnnnnnnnnnnnnnnnnnnnnnnnnnnnnnnnnnnnnnnnnnnnnnnnnnnnnnnnnnnnnnnnnnnnnnnnnnnnnnnnnnnnnnnnnnnnnnnnnnnnnnnnnnnnnnnnnnnnnnnnnnnnnnnnnnnnnnnnnnnnnnnnnnnnnnnnnnnnnnnnnnnnnnnnnnnnnnnnnnnnnnnnnnnnnnnnnnnnnnnnnnnnnnnnnnnnnnnnnnnnnnnnnnnnnnnnnnnnnnnnnnnnnnnnnnnnnnnnnnnnnnnnnnnnnnnnnnnnnnnnnnnnnnnnnnnnnnnnnnnnnnnnnnnnnnnnnnnnnnnnnnnnnnnnnnnnnnnnnnnnnnnnnnnnnnnnnnnnnnnnnnnnnnnnnnnnnnnnnnnnnnnnnnnnnnnnnnnnnnnnnnnnnnnnnnnnnnnnnnnnnnnnnnnnnnnnnnnnnnnnnnnnnnnnnnnnnnnnnnnnnnnnnnnnnnnnnnnnnnnnnnnnnnnnnnnnnnnnnnnnnnnnnnnnnnnnnnnnnnnnnnnnnnnnnnnnnnnnnnnnnnnnnnnnnnnnnnnnnnnnnnnnnnnnnnnnnnnnnnnnnnnnnnnnnnnnnnnnnnnnnnnnnnnnnnnnnnnnnnnnnnnnnnnnnnnnnnnnnnnnnnnnnnnnnnnnnnnnnnnnnnnnnnnnnnnnnnnnnnnnnnnnnnnnnnnnnnnnnnnnnnnnnnnnnnnnnnnnnnnnnnnnnnnnnnnnnnnnnnnnnnnnnnnnnnnnnnnnnnnnnnnnnnnnnnnnnnnnnnnnnnnnnnnnnnnnnnnnnnnnnnnnnnnnnnnnnnnnnnnnnnnnnnnnnnnnnnnnnnnnnnnnnnnnnnnnnnnnnnnnnnnnnnnnnnnnnnnnnnnnnnnnnnnnnnnnnnnnnnnnnnnnnnnnnnnnnnnnnnnnnnnnnnnnnnnnnnnnnnnnnnnnnnnnnnnnnnnnnnnnnnnnnnnnnnnnnnnnnnnnnnnnnnnnnnnnnnnnnnnnnnnnnnnnnnnnnnnnnnnnnnnnnnnnnnnnnnnnnnnnnnnnnnnnnnnnnnnnnnnnnnnnnnnnnnnnnnnnnnnnnnnnnnnnnnnnnnnnnnnnnnnnnnnnnnnnnnnnnnnnnnnnnnnnnnnnnnnnnnnnnnnnnnnnnnnnnnnnnnnnnnnnnnnnnnnnnnnnnnnnnnnnnnnnnnnnnnnnnnnnnnnnnnnnnnnnnnnnnnnnnnnnnnnnnnnnnnnnnnnnnnnnnnnnnnnnnnnnnnnnnnnnnnnnnnnnnnnnnnnnnnnnnnnnnnnnnnnnnnnnnnnnnnnnnnnnnnnnnnnnnnnnnnnnnnnnnnnnnnnnnnnnnnnnnnnnnnnnnnnnnnnnnnnnnnnnnnnnnnnnnnnnnnnnnnnnnnnnnnnnnnnnnnnnnnnnnnnnnnnnnnnnnnnnnnnnnnnnnnnnnnnnnnnnnnnnnnnnnnnnnnnnnnnnnnnnnnnnnnnnnnnnnnnnnnnnnnnnnnnnnnnnnnnnnnnnnnnnnnnnnnnnnnnnnnnnnnnnnnnnnnnnnnnnnnnnnnnnnnnnnnnnnnnnnnnnnnnnnnnnnnnnnnnnnnnnnnnnnnnnnnnnnnnnnnnnnnnnnnnnnnnnnnnnnnnnnnnnnnnnnnnnnnnnnnnnnnnnnnnnnnnnnnnnnnnnnnnnnnnnnnnnnnnnnnnnnnnnnnnnnnnnnnnnnnnnnnnnnnnnnnnnnnnnnnnnnnnnnnnnnnnnnnnnnnnnnnnnnnnnnnnnnnnnnnnnnnnnnnnnnnnnnnnnnnnnnnnnnnnnnnnnnnnnnnnnnnnnnnnnnnnnnnnnnnnnnnnnnnnnnnnnnnnnnnnnnnnnnnnnnnnnnnnnnnnnnnnnnnnnnnnnnnnnnnnnnnnnnnnnnnnnnnnnnnnnnnnnnnnnnnnnnnnnnnnnnnnnnnnnnnnnnnnnnnnnnnnnnnnnnnnnnnnnnnnnnnnnnnnnnnnnnnnnnnnnnnnnnnnnnnnnnnnnnnnnnnnnnnnnnnnnnnnnnnnnnnnnnnnnnnnnnnnnnnnnnnnnnnnnnnnnnnnnnnnnnnnnnnnnnnnnnnnnnnnnnnnnnnnnnnnnnnnnnnnnnnnnnnnnnnnnnnnnnnnnnnnnnnnnnnnnnnnnnnnnnnnnnnnnnnnnnnnnnnnnnnnnnnnnnnnnnnnnnnnnnnnnnnnnnnnnnnnnnnnnnnnnnnnnnnnnnnnnnnnnnnnnnnnnnnnnnnnnnnnnnnnnnnnnnnnnnnnnnnnnnnnnnnnnnnnnnnnnnnnnnnnnnnnnnnnnnnnnnnnnnnnnnnnnnnnnnnnnnnnnnnnnnnnnnnnnnnnnnnnnnnnnnnnnnnnnnnnnnnnnnnnnnnnnnnnnnnnnnnnnnnnnnnnnnnnnnnnnnnnnnnnnnnnnnnnnnnnnnnnnnnnnnnnnnnnnnnnnnnnnnnnnnnnnnnnnnnnnnnnnnnnnnnnnnnnnnnnnnnnnnnnnnnnnnnnnnnnnnnnnnnnnnnnnnnnnnnnnnnnnnnnnnnnnnnnnnnnnnnnnnnnnnnnnnnnnnnnnnnnnnnnnnnnnnnnnnnnnnnnnnnnnnnnnnnnnnnnnnnnnnnnnnnnnnnnnnnnnnnnnnnnnnnnnnnnnnnnnnnnnnnnnnnnnnnnnnnnnnnnnnnnnnnnnnnnnnnnnnnnnnnnnnnnnnnnnnnnnnnnnnnnnnnnnnnnnnnnnnnnnnnnnnnnnnnnnnnnnnnnnnnnnnnnnnnnnnnnnnnnnnnnnnnnnnnnnnnnnnnnnnnnnnnnnnnnnnnnnnnnnnnnnnnnnnnnnnnnnnnnnnnnnnnnnnnnnnnnnnnnnnnnnnnnnnnnnnnnnnnnnnnnnnnnnnnnnnnnnnnnnnnnnnnnnnnnnnnnnnnnnnnnnnnnnnnnnnnnnnnnnnnnnnnnnnnnnnnnnnnnnnnnnnnnnnnnnnnnnnnnnnnnnnnnnnnnnnnnnnnnnnnnnnnnnnnnnnnnnnnnnnnnnnnnnnnnnnnnnnnnnnnnnnnnnnnnnnnnnnnnnnnnnnnnnnnnnnnnnnnnnnnnnnnnnnnnnnnnnnnnnnnnnnnnnnnnnnnnnnnnnnnnnnnnnnnnnnnnnnnnnnnnnnnnnnnnnnnnnnnnnnnnnnnnnnnnnnnnnnnnnnnnnnnnnnnnnnnnnnnnnnnnnnnnnnnnnnnnnnnnnnnnnnnnnnnnnnnnnnnnnnnnnnnnnnnnnnnnnnnnnnnnnnnnnnnnnnnnnnnnnnnnnnnnnnnnnnnnnnnnnnnnnnnnnnnnnnnnnnnnnnnnnnnnnnnnnnnnnnnnnnnnnnnnnnnnnnnnnnnnnnnnnnnnnnnnnnnnnnnnnnnnnnnnnnnnnnnnnnnnnnnnnnnnnnnnnnnnnnnnnnnnnnnnnnnnnnnnnnnnnnnnnnnnnnnnnnnnnnnnnnnnnnnnnnnnnnnnnnnnnnnnnnnnnnnnnnnnnnnnnnnnnnnnnnnnnnnnnnnnnnnnnnnnnnnnnnnnnnnnnnnnnnnnnnnnnnnnnnnnnnnnnnnnnnnnnnnnnnnnnnnnnnnnnnnnnnnnnnnnnnnnnnnnnnnnnnnnnnnnnnnnnnnnnnnnnnnnnnnnnnnnnnnnnnnnnnnnnnnnnnnnnnnnnnnnnnnnnnnnnnnnnnnnnnnnnnnnnnnnnnnnnnnnnnnnnnnnnnnnnnnnnnnnnnnnnnnnnnnnnnnnnnnnnnnnnnnnnnnnnnnnnnnnnnnnnnnnnnnnnnnnnnnnnnnnnnnnnnnnnnnnnnnnnnnnnnnnnnnnnnnnnnnnnnnnnnnnnnnnnnnnnnnnnnnnnnnnnnnnnnnnnnnnnnnnnnnnnnnnnnnnnnnnnnnnnnnnnnnnnnnnnnnnnnnnnnnnnnnnnnnnnnnnnnnnnnnnnnnnnnnnnnnnnnnnnnnnnnnnnnnnnnnnnnnnnnnnnnnnnnnnnnnnnnnnnnnnnnnnnnnnnnnnnnnnnnnnnnnnnnnnnnnnnnnnnnnnnnnnnnnnnnnnnnnnnnnnnnnnnnnnnnnnnnnnnnnnnnnnnnnnnnnnnnnnnnnnnnnnnnnnnnnnnnnnnnnnnnnnnnnnnnnnnnnnnnnnnnnnnnnnnnnnnnnnnnnnnnnnnnnnnnnnnnnnnnnnnnnnnnnnnnnnnnnnnnnnnnnnnnnnnnnnnnnnnnnnnnnnnnnnnnnnnnnnnnnnnnnnnnnnnnnnnnnnnnnnnnnnnnnnnnnnnnnnnnnnnnnnnnnnnnnnnnnnnnnnnnnnnnnnnnnnnnnnnnnnnnnnnnnnnnnnnnnnnnnnnnnnnnnnnnnnnnnnnnnnnnnnnnnnnnnnnnnnnnnnnnnnnnnnnnnnnnnnnnnnnnnnnnnnnnnnnnnnnnnnnnnnnnnnnnnnnnnnnnnnnnnnnnnnnnnnnnnnnnnnnnnnnnnnnnnnnnnnnnnnnnnnnnnnnnnnnnnnnnnnnnnnnnnnnnnnnnnnnnnnnnnnnnnnnnnnnnnnnnnnnnnnnnnnnnnnnnnnnnnnnnnnnnnnnnnnnnnnnnnnnnnnnnnnnnnnnnnnnnnnnnnnnnnnnnnnnnnnnnnnnnnnnnnnnnnnnnnnnnnnnnnnnnnnnnnnnnnnnnnnnnnnnnnnnnnnnnnnnnnnnnnnnnnnnnnnnnnnnnnnnnnnnnnnnnnnnnnnnnnnnnnnnnnnnnnnnnnnnnnnnnnnnnnnnnnnnnnnnnnnnnnnnnnnnnnnnnnnnnnnnnnnnnnnnnnnnnnnnnnnnnnnnnnnnnnnnnnnnnnnnnnnnnnnnnnnnnnnnnnnnnnnnnnnnnnnnnnnnnnnnnnnnnnnnnnnnnnnnnnnnnnnnnnnnnnnnnnnnnnnnnnnnnnnnnnnnnnnnnnnnnnnnnnnnnnnnnnnnnnnnnnnnnnnnnnnnnnnnnnnnnnnnnnnnnnnnnnnnnnnnnnnnnnnnnnnnnnnnnnnnnnnnnnnnnnnnnnnnnnnnnnnnnnnnnnnnnnnnnnnnnnnnnnnnnnnnnnnnnnnnnnnnnnnnnnnnnnnnnnnnnnnnnnnnnnnnnnnnnnnnnnnnnnnnnnnnnnnnnnnnnnnnnnnnnnnnnnnnnnnnnnnnnnnnnnnnnnnnnnnnnnnnnnnnnnnnnnnnnnnnnnnnnnnnnnnnnnnnnnnnnnnnnnnnnnnnnnnnnnnnnnnnnnnnnnnnnnnnnnnnnnnnnnnnnnnnnnnnnnnnnnnnnnnnnnnnnnnnnnnnnnnnnnnnnnnnnnnnnnnnnnnnnnnnnnnnnnnnnnnnnnnnnnnnnnnnnnnnnnnnnnnnnnnnnnnnnnnnnnnnnnnnnnnnnnnnnnnnnnnnnnnnnnnnnnnnnnnnnnnnnnnnnnnnnnnnnnnnnnnnnnnnnnnnnnnnnnnnnnnnnnnnnnnnnnnnnnnnnnnnnnnnnnnnnnnnnnnnnnnnnnnnnnnnnnnnnnnnnnnnnnnnnnnnnnnnnnnnnnnnnnnnnnnnnnnnnnnnnnnnnnnnnnnnnnnnnnnnnnnnnnnnnnnnnnnnnnnnnnnnnnnnnnnnnnnnnnnnnnnnnnnnnnnnnnnnnnnnnnnnnnnnnnnnnnnnnnnnnnnnnnnnnnnnnnnnnnnnnnnnnnnnnnnnnnnnnnnnnnnnnnnnnnnnnnnnnnnnnnnnnnnnnnnnnnnnnnnnnnnnnnnnnnnnnnnnnnnnnnnnnnnnnnnnnnnnnnnnnnnnnnnnnnnnnnnnnnnnnnnnnnnnnnnnnnnnnnnnnnnnnnnnnnnnnnnnnnnnnnnnnnnnnnnnnnnnnnnnnnnnnnnnnnnnnnnnnnnnnnnnnnnnnnnnnnnnnnnnnnnnnnnnnnnnnnnnnnnnnnnnnnnnnnnnnnnnnnnnnnnnnnnnnnnnnnnnnnnnnnnnnnnnnnnnnnnnnnnnnnnnnnnnnnnnnnnnnnnnnnnnnnnnnnnnnnnnnnnnnnnnnnnnnnnnnnnnnnnnnnnnnnnnnnnnnnnnnnnnnnnnnnnnnnnnnnnnnnnnnnnnnnnnnnnnnnnnnnnnnnnnnnnnnnnnnnnnnnnnnnnnnnnnnnnnnnnnnnnnnnnnnnnnnnnnnnnnnnnnnnnnnnnnnnnnnnnnnnnnnnnnnnnnnnnnnnnnnnnnnnnnnnnnnnnnnnnnnnnnnnnnnnnnnnnnnnnnnnnnnnnnnnnnnnnnnnnnnnnnnnnnnnnnnnnnnnnnnnnnnnnnnnnnnnnnnnnnnnnnnnnnnnnnnnnnnnnnnnnnnnnnnnnnnnnnnnnnnnnnnnnnnnnnnnnnnnnnnnnnnnnnnnnnnnnnnnnnnnnnnnnnnnnnnnnnnnnnnnnnnnnnnnnnnnnnnnnnnnnnnnnnnnnnnnnnnnnnnnnnnnnnnnnnnnnnnnnnnnnnnnnnnnnnnnnnnnnnnnnnnnnnnnnnnnnnnnnnnnnnnnnnnnnnnnnnnnnnnnnnnnnnnnnnnnnnnnnnnnnnnnnnnnnnnnnnnnnnnnnnnnnnnnnnnnnnnnnnnnnnnnnnnnnnnnnnnnnnnnnnnnnnnnnnnnnnnnnnnnnnnnnnnnnnnnnnnnnnnnnnnnnnnnnnnnnnnnnnnnnnnnnnnnnnnnnnnnnnnnnnnnnnnnnnnnnnnnnnnnnnnnnnnnnnnnnnnnnnnnnnnnnnnnnnnnnnnnnnnnnnnnnnnnnnnnnnnnnnnnnnnnnnnnnnnnnnnnnnnnnnnnnnnnnnnnnnnnnnnnnnnnnnnnnnnnnnnnnnnnnnnnnnnnnnnnnnnnnnnnnnnnnnnnnnnnnnnnnnnnnnnnnnnnnnnnnnnnnnnnnnnnnnnnnnnnnnnnnnnnnnnnnnnnnnnnnnnnnnnnnnnnnnnnnnnnnnnnnnnnnnnnnnnnnnnnnnnnnnnnnnnnnnnnnnnnnnnnnnnnnnnnnnnnnnnnnnnnnnnnnnnnnnnnnnnnnnnnnnnnnnnnnnnnnnnnnnnnnnnnnnnnnnnnnnnnnnnnnnnnnnnnnnnnnnnnnnnnnnnnnnnnnnnnnnnnnnnnnnnnnnnnnnnnnnnnnnnnnnnnnnnnnnnnnnnnnnnnnnnnnnnnnnnnnnnnnnnnnnnnnnnnnnnnnnnnnnnnnnnnnnnnnnnnnnnnnnnnnnnnnnnnnnnnnnnnnnnnnnnnnnnnnnnnnnnnnnnnnnnnnnnnnnnnnnnnnnnnnnnnnnnnnnnnnnnnnnnnnnnnnnnnnnnnnnnnnnnnnnnnnnnnnnnnnnnnnnnnnnnnnnnnnnnnnnnnnnnnnnnnnnnnnnnnnnnnnnnnnnnnnnnnnnnnnnnnnnnnnnnnnnnnnnnnnnnnnnnnnnnnnnnnnnnnnnnnnnnnnnnnnnnnnnnnnnnnnnnnnnnnnnnnnnnnnnnnnnnnnnnnnnnnnnnnnnnnnnnnnnnnnnnnnnnnnnnnnnnnnnnnnnnnnnnnnnnnnnnnnnnnnnnnnnnnnnnnnnnnnnnnnnnnnnnnnnnnnnnnnnnnnnnnnnnnnnnnnnnnnnnnnnnnnnnnnnnnnnnnnnnnnnnnnnnnnnnnnnnnnnnnnnnnnnnnnnnnnnnnnnnnnnnnnnnnnnnnnnnnnnnnnnnnnnnnnnnnnnnnnnnnnnnnnnnnnnnnnnnnnnnnnnnnnnnnnnnnnnnnnnnnnnnnnnnnnnnnnnnnnnnnnnnnnnnnnnnnnnnnnnnnnnnnnnnnnnnnnnnnnnnnnnnnnnnnnnnnnnnnnnnnnnnnnnnnnnnnnnnnnnnnnnnnnnnnnnnnnnnnnnnnnnnnnnnnnnnnnnnnnnnnnnnnnnnnnnnnnnnnnnnnnnnnnnnnnnnnnnnnnnnnnnnnnnnnnnnnnnnnnnnnnnnnnnnnnnnnnnnnnnnnnnnnnnnnnnnnnnnnnnnnnnnnnnnnnnnnnnnnnnnnnnnnnnnnnnnnnnnnnnnnnnnnnnnnnnnnnnnnnnnnnnnnnnnnnnnnnnnnnnnnnnnnnnnnnnnnnnnnnnnnnnnnnnnnnnnnnnnnnnnnnnnnnnnnnnnnnnnnnnnnnnnnnnnnnnnnnnnnnnnnnnnnnnnnnnnnnnnnnnnnnnnnnnnnnnnnnnnnnnnnnnnnnnnnnnnnnnnnnnnnnnnnnnnnnnnnnnnnnnnnnnnnnnnnnnnnnnnnnnnnnnnnnnnnnnnnnnnnnnnnnnnnnnnnnnnnnnnnnnnnnnnnnnnnnnnnnnnnnnnnnnnnnnnnnnnnnnnnnnnnnnnnnnnnnnnnnnnnnnnnnnnnnnnnnnnnnnnnnnnnnnnnnnnnnnnnnnnnnnnnnnnnnnnnnnnnnnnnnnnnnnnnnnnnnnnnnnnnnnnnnnnnnnnnnnnnnnnnnnnnnnnnnnnnnnnnnnnnnnnnnnnnnnnnnnnnnnnnnnnnnnnnnnnnnnnnnnnnnnnnnnnnnnnnnnnnnnnnnnnnnnnnnnnnnnnnnnnnnnnnnnnnnnnnnnnnnnnnnnnnnnnnnnnnnnnnnnnnnnnnnnnnnnnnnnnnnnnnnnnnnnnnnnnnnnnnnnnnnnnnnnnnnnnnnnnnnnnnnnnnnnnnnnnnnnnnnnnnnnnnnnnnnnnnnnnnnnnnnnnnnnnnnnnnnnnnnnnnnnnnnnnnnnnnnnnnnnnnnnnnnnnnnnnnnnnnnnnnnnnnnnnnnnnnnnnnnnnnnnnnnnnnnnnnnnnnnnnnnnnnnnnnnnnnnnnnnnnnnnnnnnnnnnnnnnnnnnnnnnnnnnnnnnnnnnnnnnnnnnnnnnnnnnnnnnnnnnnnnnnnnnnnnnnnnnnnnnnnnnnnnnnnnnnnnnnnnnnnnnnnnnnnnnnnnnnnnnnnnnnnnnnnnnnnnnnnnnnnnnnnnnnnnnnnnnnnnnnnnnnnnnnnnnnnnnnnnnnnnnnnnnnnnnnnnnnnnnnnnnnnnnnnnnnnnnnnnnnnnnnnnnnnnnnnnnnnnnnnnnnnnnnnnnnnnnnnnnnnnnnnnnnnnnnnnnnnnnnnnnnnnnnnnnnnnnnnnnnnnnnnnnnnnnnnnnnnnnnnnnnnnnnnnnnnnnnnnnnnnnnnnnnnnnnnnnnnnnnnnnnnnnnnnnnnnnnnnnnnnnnnnnnnnnnnnnnnnnnnnnnnnnnnnnnnnnnnnnnnnnnnnnnnnnnnnnnnnnnnnnnnnnnnnnnnnnnnnnnnnnnnnnnnnnnnnnnnnnnnnnnnnnnnnnnnnnnnnnnnnnnnnnnnnnnnnnnnnnnnnnnnnnnnnnnnnnnnnnnnnnnnnnnnnnnnnnnnnnnnnnnnnnnnnnnnnnnnnnnnnnnnnnnnnnnnnnnnnnnnnnnnnnnnnnnnnnnnnnnnnnnnnnnnnnnnnnnnnnnnnnnnnnnnnnnnnnnnnnnnnnnnnnnnnnnnnnnnnnnnnnnnnnnnnnnnnnnnnnnnnnnnnnnnnnnnnnnnnnnnnnnnnnnnnnnnnnnnnnnnnnnnnnnnnnnnnnnnnnnnnnnnnnnnnnnnnnnnnnnnnnnnnnnnnnnnnnnnnnnnnnnnnnnnnnnnnnnnnnnnnnnnnnnnnnnnnnnnnnnnnnnnnnnnnnnnnnnnnnnnnnnnnnnnnnnnnnnnnnnnnnnnnnnnnnnnnnnnnnnnnnnnnnnnnnnnnnnnnnnnnnnnnnnnnnnnnnnnnnnnnnnnnnnnnnnnnnnnnnnnnnnnnnnnnnnnnnnnnnnnnnnnnnnnnnnnnnnnnnnnnnnnnnnnnnnnnnnnnnnnnnnnnnnnnnnnnnnnnnnnnnnnnnnnnnnnnnnnnnnnnnnnnnnnnnnnnnnnnnnnnnnnnnnnnnnnnnnnnnnnnnnnnnnnnnnnnnnnnnnnnnnnnnnnnnnnnnnnnnnnnnnnnnnnnnnnnnnnnnnnnnnnnnnnnnnnnnnnnnnnnnnnnnnnnnnnnnnnnnnnnnnnnnnnnnnnnnnnnnnnnnnnnnnnnnnnnnnnnnnnnnnnnnnnnnnnnnnnnnnnnnnnnnnnnnnnnnnnnnnnnnnnnnnnnnnnnnnnnnnnnnnnnnnnnnnnnnnnnnnnnnnnnnnnnnnnnnnnnnnnnnnnnnnnnnnnnnnnnnnnnnnnnnnnnnnnnnnnnnnnnnnnnnnnnnnnnnnnnnnnnnnnnnnnnnnnnnnnnnnnnnnnnnnnnnnnnnnnnnnnnnnnnnnnnnnnnnnnnnnnnnnnnnnnnnnnnnnnnnnnnnnnnnnnnnnnnnnnnnnnnnnnnnnnnnnnnnnnnnnnnnnnnnnnnnnnnnnnnnnnnnnnnnnnnnnnnnnnnnnnnnnnnnnnnnnnnnnnnnnnnnnnnnnnnnnnnnnnnnnnnnnnnnnnnnnnnnnnnnnnnnnnnnnnnnnnnnnnnnnnnnnnnnnnnnnnnnnnnnnnnnnnnnnnnnnnnnnnnnnnnnnnnnnnnnnnnnnnnnnnnnnnnnnnnnnnnnnnnnnnnnnnnnnnnnnnnnnnnnnnnnnnnnnnnnnnnnnnnnnnnnnnnnnnnnnnnnnnnnnnnnnnnnnnnnnnnnnnnnnnnnnnnnnnnnnnnnnnnnnnnnnnnnnnnnnnnnnnnnnnnnnnnnnnnnnnnnnnnnnnnnnnnnnnnnnnnnnnnnnnnnnnnnnnnnnnnnnnnnnnnnnnnnnnnnnnnnnnnnnnnnnnnnnnnnnnnnnnnnnnnnnnnnnnnnnnnnnnnnnnnnnnnnnnnnnnnnnnnnnnnnnnnnnnnnnnnnnnnnnnnnnnnnnnnnnnnnnnnnnnnnnnnnnnnnnnnnnnnnnnnnnnnnnnnnnnnnnnnnnnnnnnnnnnnnnnnnnnnnnnnnnnnnnnnnnnnnnnnnnnnnnnnnnnnnnnnnnnnnnnnnnnnnnnnnnnnnnnnnnnnnnnnnnnnnnnnnnnnnnnnnnnnnnnnnnnnnnnnnnnnnnnnnnnnnnnnnnnnnnnnnnnnnnnnnnnnnnnnnnnnnnnnnnnnnnnnnnnnnnnnnnnnnnnnnnnnnnnnnnnnnnnnnnnnnnnnnnnnnnnnnnnnnnnnnnnnnnnnnnnnnnnnnnnnnnnnnnnnnnnnnnnnnnnnnnnnnnnnnnnnnnnnnnnnnnnnnnnnnnnnnnnnnnnnnnnnnnnnnnnnnnnnnnnnnnnnnnnnnnnnnnnnnnnnnnnnnnnnnnnnnnnnnnnnnnnnnnnnnnnnnnnnnnnnnnnnnnnnnnnnnnnnnnnnnnnnnnnnnnnnnnnnnnnnnnnnnnnnnnnnnnnnnnnnnnnnnnnnnnnnnnnnnnnnnnnnnnnnnnnnnnnnnnnnnnnnnnnnnnnnnnnnnnnnnnnnnnnnnnnnnnnnnnnnnnnnnnnnnnnnnnnnnnnnnnnnnnnnnnnnnnnnnnnnnnnnnnnnnnnnnnnnnnnnnnnnnnnnnnnnnnnnnnnnnnnnnnnnnnnnnnnnnnnnnnnnnnnnnnnnnnnnnnnnnnnnnnnnnnnnnnnnnnnnnnnnnnnnnnnnnnnnnnnnnnnnnnnnnnnnnnnnnnnnnnnnnnnnnnnnnnnnnnnnnnnnnnnnnnnnnnnnnnnnnnnnnnnnnnnnnnnnnnnnnnnnnnnnnnnnnnnnnnnnnnnnnnnnnnnnnnnnnnnnnnnnnnnnnnnnnnnnnnnnnnnnnnnnnnnnnnnnnnnnnnnnnnnnnnnnnnnnnnnnnnnnnnnnnnnnnnnnnnnnnnnnnnnnnnnnnnnnnnnnnnnnnnnnnnnnnnnnnnnnnnnnnnnnnnnnnnnnnnnnnnnnnnnnnnnnnnnnnnnnnnnnnnnnnnnnnnnnnnnnnnnnnnnnnnnnnnnnnnnnnnnnnnnnnnnnnnnnnnnnnnnnnnnnnnnnnnnnnnnnnnnnnnnnnnnnnnnnnnnnnnnnnnnnnnnnnnnnnnnnnnnnnnnnnnnnnnnnnnnnnnnnnnnnnnnnnnnnnnnnnnnnnnnnnnnnnnnnnnnnnnnnnnnnnnnnnnnnnnnnnnnnnnnnnnnnnnnnnnnnnnnnnnnnnnnnnnnnnnnnnnnnnnnnnnnnnnnnnnnnnnnnnnnnnnnnnnnnnnnnnnnnnnnnnnnnnnnnnnnnnnnnnnnnnnnnnnnnnnnnnnnnnnnnnnnnnnnnnnnnnnnnnnnnnnnnnnnnnnnnnnnnnnnnnnnnnnnnnnnnnnnnnnnnnnnnnnnnnnnnnnnnnnnnnnnnnnnnnnnnnnnnnnnnnnnnnnnnnnnnnnnnnnnnnnnnnnnnnnnnnnnnnnnnnnnnnnnnnnnnnnnnnnnnnnnnnnnnnnnnnnnnnnnnnnnnnnnnnnnnnnnnnnnnnnnnnnnnnnnnnnnnnnnnnnnnnnnnnnnnnnnnnnnnnnnnnnnnnnnnnnnnnnnnnnnnnnnnnnnnnnnnnnnnnnnnnnnnnnnnnnnnnnnnnnnnnnnnnnnnnnnnnnnnnnnnnnnnnnnnnnnnnnnnnnnnnnnnnnnnnnnnnnnnnnnnnnnnnnnnnnnnnnnnnnnnnnnnnnnnnnnnnnnnnnnnnnnnnnnnnnnnnnnnnnnnnnnnnnnnnnnnnnnnnnnnnnnnnnnnnnnnnnnnnnnnnnnnnnnnnnnnnnnnnnnnnnnnnnnnnnnnnnnnnnnnnnnnnnnnnnnnnnnnnnnnnnnnnnnnnnnnnnnnnnnnnnnnnnnnnnnnnnnnnnnnnnnnnnnnnnnnnnnnnnnnnnnnnnnnnnnnnnnnnnnnnnnnnnnnnnnnnnnnnnnnnnnnnnnnnnnnnnnnnnnnnnnnnnnnnnnnnnnnnnnnnnnnnnnnnnnnnnnnnnnnnnnnnnnnnnnnnnnnnnnnnnnnnnnnnnnnnnnnnnnnnnnnnnnnnnnnnnnnnnnnnnnnnnnnnnnnnnnnnnnnnnnnnnnnnnnnnnnnnnnnnnnnnnnnnnnnnnnnnnnnnnnnnnnnnnnnnnnnnnnnnnnnnnnnnnnnnnnnnnnnnnnnnnnnnnnnnnnnnnnnnnnnnnnnnnnnnnnnnnnnnnnnnnnnnnnnnnnnnnnnnnnnnnnnnnnnnnnnnnnnnnnnnnnnnnnnnnnnnnnnnnnnnnnnnnnnnnnnnnnnnnnnnnnnnnnnnnnnnnnnnnnnnnnnnnnnnnnnnnnnnnnnnnnnnnnnnnnnnnnnnnnnnnnnnnnnnnnnnnnnnnnnnnnnnnnnnnnnnnnnnnnnnnnnnnnnnnnnnnnnnnnnnnnnnnnnnnnnnnnnnnnnnnnnnnnnnnnnnnnnnnnnnnnnnnnnnnnnnnnnnnnnnnnnnnnnnnnnnnnnnnnnnnnnnnnnnnnnnnnnnnnnnnnnnnnnnnnnnnnnnnnnnnnnnnnnnnnnnnnnnnnnnnnnnnnnnnnnnnnnnnnnnnnnnnnnnnnnnnnnnnnnnnnnnnnnnnnnnnnnnnnnnnnnnnnnnnnnnnnnnnnnnnnnnnnnnnnnnnnnnnnnnnnnnnnnnnnnnnnnnnnnnnnnnnnnnnnnnnnnnnnnnnnnnnnnnnnnnnnnnnnnnnnnnnnnnnnnnnnnnnnnnnnnnnnnnnnnnnnnnnnnnnnnnnnnnnnnnnnnnnnnnnnnnnnnnnnnnnnnnnnnnnnnnnnnnnnnnnnnnnnnnnnnnnnnnnnnnnnnnnnnnnnnnnnnnnnnnnnnnnnnnnnnnnnnnnnnnnnnnnnnnnnnnnnnnnnnnnnnnnnnnnnnnnnnnnnnnnnnnnnnnnnnnnnnnnnnnnnnnnnnnnnnnnnnnnnnnnnnnnnnnnnnnnnnnnnnnnnnnnnnnnnnnnnnnnnnnnnnnnnnnnnnnnnnnnnnnnnnnnnnnnnnnnnnnnnnnnnnnnnnnnnnnnnnnnnnnnnnnnnnnnnnnnnnnnnnnnnnnnnnnnnnnnnnnnnnnnnnnnnnnnnnnnnnnnnnnnnnnnnnnnnnnnnnnnnnnnnnnnnnnnnnnnnnnnnnnnnnnnnnnnnnnnnnnnnnnnnnnnnnnnnnnnnnnnnnnnnnnnnnnnnnnnnnnnnnnnnnnnnnnnnnnnnnnnnnnnnnnnnnnnnnnnnnnnnnnnnnnnnnnnnnnnnnnnnnnnnnnnnnnnnnnnnnnnnnnnnnnnnnnnnnnnnnnnnnnnnnnnnnnnnnnnnnnnnnnnnnnnnnnnnnnnnnnnnnnnnnnnnnnnnnnnnnnnnnnnnnnnnnnnnnnnnnnnnnnnnnnnnnnnnnnnnnnnnnnnnnnnnnnnnnnnnnnnnnnnnnnnnnnnnnnnnnnnnnnnnnnnnnnnnnnnnnnnnnnnnnnnnnnnnnnnnnnnnnnnnnnnnnnnnnnnnnnnnnnnnnnnnnnnnnnnnnnnnnnnnnnnnnnnnnnnnnnnnnnnnnnnnnnnnnnnnnnnnnnnnnnnnnnnnnnnnnnnnnnnnnnnnnnnnnnnnnnnnnnnnnnnnnnnnnnnnnnnnnnnnnnnnnnnnnnnnnnnnnnnnnnnnnnnnnnnnnnnnnnnnnnnnnnnnnnnnnnnnnnnnnnnnnnnnnnnnnnnnnnnnnnnnnnnnnnnnnnnnnnnnnnnnnnnnnnnnnnnnnnnnnnnnnnnnnnnnnnnnnnnnnnnnnnnnnnnnnnnnnnnnnnnnnnnnnnnnnnnnnnnnnnnnnnnnnnnnnnnnnnnnnnnnnnnnnnnnnnnnnnnnnnnnnnnnnnnnnnnnnnnnnnnnnnnnnnnnnnnnnnnnnnnnnnnnnnnnnnnnnnnnnnnnnnnnnnnnnnnnnnnnnnnnnnnnnnnnnnnnnnnnnnnnnnnnnnnnnnnnnnnnnnnnnnnnnnnnnnnnnnnnnnnnnnnnnnnnnnnnnnnnnnnnnnnnnnnnnnnnnnnnnnnnnnnnnnnnnnnnnnnnnnnnnnnnnnnnnnnnnnnnnnnnnnnnnnnnnnnnnnnnnnnnnnnnnnnnnnnnnnnnnnnnnnnnnnnnnnnnnnnnnnnnnnnnnnnnnnnnnnnnnnnnnnnnnnnnnnnnnnnnnnnnnnnnnnnnnnnnnnnnnnnnnnnnnnnnnnnnnnnnnnnnnnnnnnnnnnnnnnnnnnnnnnnnnnnnnnnnnnnnnnnnnnnnnnnnnnnnnnnnnnnnnnnnnnnnnnnnnnnnnnnnnnnnnnnnnnnnnnnnnnnnnnnnnnnnnnnnnnnnnnnnnnnnnnnnnnnnnnnnnnnnnnnnnnnnnnnnnnnnnnnnnnnnnnnnnnnnnnnnnnnnnnnnnnnnnnnnnnnnnnnnnnnnnnnnnnnnnnnnnnnnnnnnnnnnnnnnnnnnnnnnnnnnnnnnnnnnnnnnnnnnnnnnnnnnnnnnnnnnnnnnnnnnnnnnnnnnnnnnnnnnnnnnnnnnnnnnnnnnnnnnnnnnnnnnnnnnnnnnnnnnnnnnnnnnnnnnnnnnnnnnnnnnnnnnnnnnnnnnnnnnnnnnnnnnnnnnnnnnnnnnnnnnnnnnnnnnnnnnnnnnnnnnnnnnnnnnnnnnnnnnnnnnnnnnnnnnnnnnnnnnnnnnnnnnnnnnnnnnnnnnnnnnnnnnnnnnnnnnnnnnnnnnnnnnnnnnnnnnnnnnnnnnnnnnnnnnnnnnnnnnnnnnnnnnnnnnnnnnnnnnnnnnnnnnnnnnnnnnnnnnnnnnnnnnnnnnnnnnnnnnnnnnnnnnnnnnnnnnnnnnnnnnnnnnnnnnnnnnnnnnnnnnnnnnnnnnnnnnnnnnnnnnnnnnnnnnnnnnnnnnnnnnnnnnnnnnnnnnnnnnnnnnnnnnnnnnnnnnnnnnnnnnnnnnnnnnnnnnnnnnnnnnnnnnnnnnnnnnnnnnnnnnnnnnnnnnnnnnnnnnnnnnnnnnnnnnnnnnnnnnnnnnnnnnnnnnnnnnnnnnnnnnnnnnnnnnnnnnnnnnnnnnnnnnnnnnnnnnnnnnnnnnnnnnnnnnnnnnnnnnnnnnnnnnnnnnnnnnnnnnnnnnnnnnnnnnnnnnnnnnnnnnnnnnnnnnnnnnnnnnnnnnnnnnnnnnnnnnnnnnnnnnnnnnnnnnnnnnnnnnnnnnnnnnnnnnnnnnnnnnnnnnnnnnnnnnnnnnnnnnnnnnnnnnnnnnnnnnnnnnnnnnnnnnnnnnnnnnnnnnnnnnnnnnnnnnnnnnnnnnnnnnnnnnnnnnnnnnnnnnnnnnnnnnnnnnnnnnnnnnnnnnnnnnnnnnnnnnnnnnnnnnnnnnnnnnnnnnnnnnnnnnnnnnnnnnnnnnnnnnnnnnnnnnnnnnnnnnnnnnnnnnnnnnnnnnnnnnnnnnnnnnnnnnnnnnnnnnnnnnnnnnnnnnnnnnnnnnnnnnnnnnnnnnnnnnnnnnnnnnnnnnnnnnnnnnnnnnnnnnnnnnnnnnnnnnnnnnnnnnnnnnnnnnnnnnnnnnnnnnnnnnnnnnnnnnnnnnnnnnnnnnnnnnnnnnnnnnnnnnnnnnnnnnnnnnnnnnnnnnnnnnnnnnnnnnnnnnnnnnnnnnnnnnnnnnnnnnnnnnnnnnnnnnnnnnnnnnnnnnnnnnnnnnnnnnnnnnnnnnnnnnnnnnnnnnnnnnnnnnnnnnnnnnnnnnnnnnnnnnnnnnnnnnnnnnnnnnnnnnnnnnnnnnnnnnnnnnnnnnnnnnnnnnnnnnnnnnnnnnnnnnnnnnnnnnnnnnnnnnnnnnnnnnnnnnnnnnnnnnnnnnnnnnnnnnnnnnnnnnnnnnnnnnnnnnnnnnnnnnnnnnnnnnnnnnnnnnnnnnnnnnnnnnnnnnnnnnnnnnnnnnnnnnnnnnnnnnnnnnnnnnnnnnnnnnnnnnnnnnnnnnnnnnnnnnnnnnnnnnnnnnnnnnnnnnnnnnnnnnnnnnnnnnnnnnnnnnnnnnnnnnnnnnnnnnnnnnnnnnnnnnnnnnnnnnnnnnnnnnnnnnnnnnnnnnnnnnnnnnnnnnnnnnnnnnnnnnnnnnnnnnnnnnnnnnnnnnnnnnnnnnnnnnnnnnnnnnnnnnnnnnnnnnnnnnnnnnnnnnnnnnnnnnnnnnnnnnnnnnnnnnnnnnnnnnnnnnnnnnnnnnnnnnnnnnnnnnnnnnnnnnnnnnnnnnnnnnnnnnnnnnnnnnnnnnnnnnnnnnnnnnnnnnnnnnnnnnnnnnnnnnnnnnnnnnnnnnnnnnnnnnnnnnnnnnnnnnnnnnnnnnnnnnnnnnnnnnnnnnnnnnnnnnnnnnnnnnnnnnnnnnnnnnnnnnnnnnnnnnnnnnnnnnnnnnnnnnnnnnnnnnnnnnnnnnnnnnnnnnnnnnnnnnnnnnnnnnnnnnnnnnnnnnnnnnnnnnnnnnnnnnnnnnnnnnnnnnnnnnnnnnnnnnnnnnnnnnnnnnnnnnnnnnnnnnnnnnnnnnnnnnnnnnnnnnnnnnnnnnnnnnnnnnnnnnnnnnnnnnnnnnnnnnnnnnnnnnnnnnnnnnnnnnnnnnnnnnnnnnnnnnnnnnnnnnnnnnnnnnnnnnnnnnnnnnnnnnnnnnnnnnnnnnnnnnnnnnnnnnnnnnnnnnnnnnnnnnnnnnnnnnnnnnnnnnnnnnnnnnnnnnnnnnnnnnnnnnnnnnnnnnnnnnnnnnnnnnnnnnnnnnnnnnnnnnnnnnnnnnnnnnnnnnnnnnnnnnnnnnnnnnnnnnnnnnnnnnnnnnnnnnnnnnnnnnnnnnnnnnnnnnnnnnnnnnnnnnnnnnnnnnnnnnnnnnnnnnnnnnnnnnnnnnnnnnnnnnnnnnnnnnnnnnnnnnnnnnnnnnnnnnnnnnnnnnnnnnnnnnnnnnnnnnnnnnnnnnnnnnnnnnnnnnnnnnnnnnnnnnnnnnnnnnnnnnnnnnnnnnnnnnnnnnnnnnnnnnnnnnnnnnnnnnnnnnnnnnnnnnnnnnnnnnnnnnnnnnnnnnnnnnnnnnnnnnnnnnnnnnnnnnnnnnnnnnnnnnnnnnnnnnnnnnnnnnnnnnnnnnnnnnnnnnnnnnnnnnnnnnnnnnnnnnnnnnnnnnnnnnnnnnnnnnnnnnnnnnnnnnnnnnnnnnnnnnnnnnnnnnnnnnnnnnnnnnnnnnnnnnnnnnnnnnnnnnnnnnnnnnnnnnnnnnnnnnnnnnnnnnnnnnnnnnnnnnnnnnnnnnnnnnnnnnnnnnnnnnnnnnnnnnnnnnnnnnnnnnnnnnnnnnnnnnnnnnnnnnnnnnnnnnnnnnnnnnnnnnnnnnnnnnnnnnnnnnnnnnnnnnnnnnnnnnnnnnnnnnnnnnnnnnnnnnnnnnnnnnnnnnnnnnnnnnnnnnnnnnnnnnnnnnnnnnnnnnnnnnnnnnnnnnnnnnnnnnnnnnnnnnnnnnnnnnnnnnnnnnnnnnnnnnnnnnnnnnnnnnnnnnnnnnnnnnnnnnnnnnnnnnnnnnnnnnnnnnnnnnnnnnnnnnnnnnnnnnnnnnnnnnnnnnnnnnnnnnnnnnnnnnnnnnnnnnnnnnnnnnnnnnnnnnnnnnnnnnnnnnnnnnnnnnnnnnnnnnnnnnnnnnnnnnnnnnnnnnnnnnnnnnnnnnnnnnnnnnnnnnnnnnnnnnnnnnnnnnnnnnnnnnnnnnnnnnnnnnnnnnnnnnnnnnnnnnnnnnnnnnnnnnnnnnnnnnnnnnnnnnnnnnnnnnnnnnnnnnnnnnnnnnnnnnnnnnnnnnnnnnnnnnnnnnnnnnnnnnnnnnnnnnnnnnnnnnnnnnnnnnnnnnnnnnnnnnnnnnnnnnnnnnnnnnnnnnnnnnnnnnnnnnnnnnnnnnnnnnnnnnnnnnnnnnnnnnnnnnnnnnnnnnnnnnnnnnnnnnnnnnnnnnnnnnnnnnnnnnnnnnnnnnnnnnnnnnnnnnnnnnnnnnnnnnnnnnnnnnnnnnnnnnnnnnnnnnnnnnnnnnnnnnnnnnnnnnnnnnnnnnnnnnnnnnnnnnnnnnnnnnnnnnnnnnnnnnnnnnnnnnnnnnnnnnnnnnnnnnnnnnnnnnnnnnnnnnnnnnnnnnnnnnnnnnnnnnnnnnnnnnnnnnnnnnnnnnnnnnnnnnnnnnnnnnnnnnnnnnnnnnnnnnnnnnnnnnnnnnnnnnnnnnnnnnnnnnnnnnnnnnnnnnnnnnnnnnnnnnnnnnnnnnnnnnnnnnnnnnnnnnnnnnnnnnnnnnnnnnnnnnnnnnnnnnnnnnnnnnnnnnnnnnnnnnnnnnnnnnnnnnnnnnnnnnnnnnnnnnnnnnnnnnnnnnnnnnnnnnnnnnnnnnnnnnnnnnnnnnnnnnnnnnnnnnnnnnnnnnnnnnnnnnnnnnnnnnnnnnnnnnnnnnnnnnnnnnnnnnnnnnnnnnnnnnnnnnnnnnnnnnnnnnnnnnnnnnnnnnnnnnnnnnnnnnnnnnnnnnnnnnnnnnnnnnnnnnnnnnnnnnnnnnnnnnnnnnnnnnnnnnnnnnnnnnnnnnnnnnnnnnnnnnnnnnnnnnnnnnnnnnnnnnnnnnnnnnnnnnnnnnnnnnnnnnnnnnnnnnnnnnnnnnnnnnnnnnnnnnnnnnnnnnnnnnnnnnnnnnnnnnnnnnnnnnnnnnnnnnnnnnnnnnnnnnnnnnnnnnnnnnnnnnnnnnnnnnnnnnnnnnnnnnnnnnnnnnnnnnnnnnnnnnnnnnnnnnnnnnnnnnnnnnnnnnnnnnnnnnnnnnnnnnnnnnnnnnnnnnnnnnnnnnnnnnnnnnnnnnnnnnnnnnnnnnnnnnnnnnnnnnnnnnnnnnnnnnnnnnnnnnnnnnnnnnnnnnnnnnnnnnnnnnnnnnnnnnnnnnnnnnnnnnnnnnnnnnnnnnnnnnnnnnnnnnnnnnnnnnnnnnnnnnnnnnnnnnnnnnnnnnnnnnnnnnnnnnnnnnnnnnnnnnnnnnnnnnnnnnnnnnnnnnnnnnnnnnnnnnnnnnnnnnnnnnnnnnnnnnnnnnnnnnnnnnnnnnnnnnnnnnnnnnnnnnnnnnnnnnnnnnnnnnnnnnnnnnnnnnnnnnnnnnnnnnnnnnnnnnnnnnnnnnnnnnnnnnnnnnnnnnnnnnnnnnnnnnnnnnnnnnnnnnnnnnnnnnnnnnnnnnnnnnnnnnnnnnnnnnnnnnnnnnnnnnnnnnnnnnnnnnnnnnnnnnnnnnnnnnnnnnnnnnnnnnnnnnnnnnnnnnnnnnnnnnnnnnnnnnnnnnnnnnnnnnnnnnnnnnnnnnnnnnnnnnnnnnnnnnnnnnnnnnnnnnnnnnnnnnnnnnnnnnnnnnnnnnnnnnnnnnnnnnnnnnnnnnnnnnnnnnnnnnnnnnnnnnnnnnnnnnnnnnnnnnnnnnnnnnnnnnnnnnnnnnnnnnnnnnnnnnnnnnnnnnnnnnnnnnnnnnnnnnnnnnnnnnnnnnnnnnnnnnnnnnnnnnnnnnnnnnnnnnnnnnnnnnnnnnnnnnnnnnnnnnnnnnnnnnnnnnnnnnnnnnnnnnnnnnnnnnnnnnnnnnnnnnnnnnnnnnnnnnnnnnnnnnnnnnnnnnnnnnnnnnnnnnnnnnnnnnnnnnnnnnnnnnnnnnnnnnnnnnnnnnnnnnnnnnnnnnnnnnnnnnnnnnnnnnnnnnnnnnnnnnnnnnnnnnnnnnnnnnnnnnnnnnnnnnnnnnnnnnnnnnnnnnnnnnnnnnnnnnnnnnnnnnnnnnnnnnnnnnnnnnnnnnnnnnnnnnnnnnnnnnnnnnnnnnnnnnnnnnnnnnnnnnnnnnnnnnnnnnnnnnnnnnnnnnnnnnnnnnnnnnnnnnnnnnnnnnnnnnnnnnnnnnnnnnnnnnnnnnnnnnnnnnnnnnnnnnnnnnnnnnnnnnnnnnnnnnnnnnnnnnnnnnnnnnnnnnnnnnnnnnnnnnnnnnnnnnnnnnnnnnnnnnnnnnnnnnnnnnnnnnnnnnnnnnnnnnnnnnnnnnnnnnnnnnnnnnnnnnnnnnnnnnnnnnnnnnnnnnnnnnnnnnnnnnnnnnnnnnnnnnnnnnnnnnnnnnnnnnnnnnnnnnnnnnnnnnnnnnnnnnnnnnnnnnnnnnnnnnnnnnnnnnnnnnnnnnnnnnnnnnnnnnnnnnnnnnnnnnnnnnnnnnnnnnnnnnnnnnnnnnnnnnnnnnnnnnnnnnnnnnnnnnnnnnnnnnnnnnnnnnnnnnnnnnnnnnnnnnnnnnnnnnnnnnnnnnnnnnnnnnnnnnnnnnnnnnnnnnnnnnnnnnnnnnnnnnnnnnnnnnnnnnnnnnnnnnnnnnnnnnnnnnnnnnnnnnnnnnnnnnnnnnnnnnnnnnnnnnnnnnnnnnnnnnnnnnnnnnnnnnnnnnnnnnnnnnnnnnnnnnnnnnnnnnnnnnnnnnnnnnnnnnnnnnnnnnnnnnnnnnnnnnnnnnnnnnnnnnnnnnnnnnnnnnnnnnnnnnnnnnnnnnnnnnnnnnnnnnnnnnnnnnnnnnnnnnnnnnnnnnnnnnnnnnnnnnnnnnnnnnnnnnnnnnnnnnnnnnnnnnnnnnnnnnnnnnnnnnnnnnnnnnnnnnnnnnnnnnnnnnnnnnnnnnnnnnnnnnnnnnnnnnnnnnnnnnnnnnnnnnnnnnnnnnnnnnnnnnnnnnnnnnnnnnnnnnnnnnnnnnnnnnnnnnnnnnnnnnnnnnnnnnnnnnnnnnnnnnnnnnnnnnnnnnnnnnnnnnnnnnnnnnnnnnnnnnnnnnnnnnnnnnnnnnnnnnnnnnnnnnnnnnnnnnnnnnnnnnnnnnnnnnnnnnnnnnnnnnnnnnnnnnnnnnnnnnnnnnnnnnnnnnnnnnnnnnnnnnnnnnnnnnnnnnnnnnnnnnnnnnnnnnnnnnnnnnnnnnnnnnnnnnnnnnnnnnnnnnnnnnnnnnnnnnnnnnnnnnnnnnnnnnnnnnnnnnnnnnnnnnnnnnnnnnnnnnnnnnnnnnnnnnnnnnnnnnnnnnnnnnnnnnnnnnnnnnnnnnnnnnnnnnnnnnnnnnnnnnnnnnnnnnnnnnnnnnnnnnnnnnnnnnnnnnnnnnnnnnnnnnnnnnnnnnnnnnnnnnnnnnnnnnnnnnnnnnnnnnnnnnnnnnnnnnnnnnnnnnnnnnnnnnnnnnnnnnnnnnnnnnnnnnnnnnnnnnnnnnnnnnnnnnnnnnnnnnnnnnnnnnnnnnnnnnnnnnnnnnnnnnnnnnnnnnnnnnnnnnnnnnnnnnnnnnnnnnnnnnnnnnnnnnnnnnnnnnnnnnnnnnnnnnnnnnnnnnnnnnnnnnnnnnnnnnnnnnnnnnnnnnnnnnnnnnnnnnnnnnnnnnnnnnnnnnnnnnnnnnnnnnnnnnnnnnnnnnnnnnnnnnnnnnnnnnnnnnnnnnnnnnnnnnnnnnnnnnnnnnnnnnnnnnnnnnnnnnnnnnnnnnnnnnnnnnnnnnnnnnnnnnnnnnnnnnnnnnnnnnnnnnnnnnnnnnnnnnnnnnnnnnnnnnnnnnnnnnnnnnnnnnnnnnnnnnnnnnnnnnnnnnnnnnnnnnnnnnnnnnnnnnnnnnnnnnnnnnnnnnnnnnnnnnnnnnnnnnnnnnnnnnnnnnnnnnnnnnnnnnnnnnnnnnnnnnnnnnnnnnnnnnnnnnnnnnnnnnnnnnnnnnnnnnnnnnnnnnnnnnnnnnnnnnnnnnnnnnnnnnnnnnnnnnnnnnnnnnnnnnnnnnnnnnnnnnnnnnnnnnnnnnnnnnnnnnnnnnnnnnnnnnnnnnnnnnnnnnnnnnnnnnnnnnnnnnnnnnnnnnnnnnnnnnnnnnnnnnnnnnnnnnnnnnnnnnnnnnnnnnnnnnnnnnnnnnnnnnnnnnnnnnnnnnnnnnnnnnnnnnnnnnnnnnnnnnnnnnnnnnnnnnnnnnnnnnnnnnnnnnnnnnnnnnnnnnnnnnnnnnnnnnnnnnnnnnnnnnnnnnnnnnnnnnnnnnnnnnnnnnnnnnnnnnnnnnnnnnnnnnnnnnnnnnnnnnnnnnnnnnnnnnnnnnnnnnnnnnnnnnnnnnnnnnnnnnnnnnnnnnnnnnnnnnnnnnnnnnnnnnnnnnnnnnnnnnnnnnnnnnnnnnnnnnnnnnnnnnnnnnnnnnnnnnnnnnnnnnnnnnnnnnnnnnnnnnnnnnnnnnnnnnnnnnnnnnnnnnnnnnnnnnnnnnnnnnnnnnnnnnnnnnnnnnnnnnnnnnnnnnnnnnnnnnnnnnnnnnnnnnnnnnnnnnnnnnnnnnnnnnnnnnnnnnnnnnnnnnnnnnnnnnnnnnnnnnnnnnnnnnnnnnnnnnnnnnnnnnnnnnnnnnnnnnnnnnnnnnnnnnnnnnnnnnnnnnnnnnnnnnnnnnnnnnnnnnnnnnnnnnnnnnnnnnnnnnnnnnnnnnnnnnnnnnnnnnnnnnnnnnnnnnnnnnnnnnnnnnnnnnnnnnnnnnnnnnnnnnnnnnnnnnnnnnnnnnnnnnnnnnnnnnnnnnnnnnnnnnnnnnnnnnnnnnnnnnnnnnnnnnnnnnnnnnnnnnnnnnnnnnnnnnnnnnnnnnnnnnnnnnnnnnnnnnnnnnnnnnnnnnnnnnnnnnnnnnnnnnnnnnnnnnnnnnnnnnnnnnnnnnnnnnnnnnnnnnnnnnnnnnnnnnnnnnnnnnnnnnnnnnnnnnnnnnnnnnnnnnnnnnnnnnnnnnnnnnnnnnnnnnnnnnnnnnnnnnnnnnnnnnnnnnnnnnnnnnnnnnnnnnnnnnnnnnnnnnnnnnnnnnnnnnnnnnnnnnnnnnnnnnnnnnnnnnnnnnnnnnnnnnnnnnnnnnnnnnnnnnnnnnnnnnnnnnnnnnnnnnnnnnnnnnnnnnnnnnnnnnnnnnnnnnnnnnnnnnnnnnnnnnnnnnnnnnnnnnnnnnnnnnnnnnnnnnnnnnnnnnnnnnnnnnnnnnnnnnnnnnnnnnnnnnnnnnnnnnnnnnnnnnnnnnnnnnnnnnnnnnnnnnnnnnnnnnnnnnnnnnnnnnnnnnnnnnnnnnnnnnnnnnnnnnnnnnnnnnnnnnnnnnnnnnnnnnnnnnnnnnnnnnnnnnnnnnnnnnnnnnnnnnnnnnnnnnnnnnnnnnnnnnnnnnnnnnnnnnnnnnnnnnnnnnnnnnnnnnnnnnnnnnnnnnnnnnnnnnnnnnnnnnnnnnnnnnnnnnnnnnnnnnnnnnnnnnnnnnnnnnnnnnnnnnnnnnnnnnnnnnnnnnnnnnnnnnnnnnnnnnnnnnnnnnnnnnnnnnnnnnnnnnnnnnnnnnnnnnnnnnnnnnnnnnnnnnnnnnnnnnnnnnnnnnnnnnnnnnnnnnnnnnnnnnnnnnnnnnnnnnnnnnnnnnnnnnnnnnnnnnnnnnnnnnnnnnnnnnnnnnnnnnnnnnnnnnnnnnnnnnnnnnnnnnnnnnnnnnnnnnnnnnnnnnnnnnnnnnnnnnnnnnnnnnnnnnnnnnnnnnnnnnnnnnnnnnnnnnnnnnnnnnnnnnnnnnnnnnnnnnnnnnnnnnnnnnnnnnnnnnnnnnnnnnnnnnnnnnnnnnnnnnnnnnnnnnnnnnnnnnnnnnnnnnnnnnnnnnnnnnnnnnnnnnnnnnnnnnnnnnnnnnnnnnnnnnnnnnnnnnnnnnnnnnnnnnnnnnnnnnnnnnnnnnnnnnnnnnnnnnnnnnnnnnnnnnnnnnnnnnnnnnnnnnnnnnnnnnnnnnnnnnnnnnnnnnnnnnnnnnnnnnnnnnnnnnnnnnnnnnnnnnnnnnnnnnnnnnnnnnnnnnnnnnnnnnnnnnnnnnnnnnnnnnnnnnnnnnnnnnnnnnnnnnnnnnnnnnnnnnnnnnnnnnnnnnnnnnnnnnnnnnnnnnnnnnnnnnnnnnnnnnnnnnnnnnnnnnnnnnnnnnnnnnnnnnnnnnnnnnnnnnnnnnnnnnnnnnnnnnnnnnnnnnnnnnnnnnnnnnnnnnnnnnnnnnnnnnnnnnnnnnnnnnnnnnnnnnnnnnnnnnnnnnnnnnnnnnnnnnnnnnnnnnnnnnnnnnnnnnnnnnnnnnnnnnnnnnnnnnnnnnnnnnnnnnnnnnnnnnnnnnnnnnnnnnnnnnnnnnnnnnnnnnnnnnnnnnnnnnnnnnnnnnnnnnnnnnnnnnnnnnnnnnnnnnnnnnnnnnnnnnnnnnnnnnnnnnnnnnnnnnnnnnnnnnnnnnnnnnnnnnnnnnnnnnnnnnnnnnnnnnnnnnnnnnnnnnnnnnnnnnnnnnnnnnnnnnnnnnnnnnnnnnnnnnnnnnnnnnnnnnnnnnnnnnnnnnnnnnnnnnnnnnnnnnnnnnnnnnnnnnnnnnnnnnnnnnnnnnnnnnnnnnnnnnnnnnnnnnnnnnnnnnnnnnnnnnnnnnnnnnnnnnnnnnnnnnnnnnnnnnnnnnnnnnnnnnnnnnnnnnnnnnnnnnnnnnnnnnnnnnnnnnnnnnnnnnnnnnnnnnnnnnnnnnnnnnnnnnnnnnnnnnnnnnnnnnnnnnnnnnnnnnnnnnnnnnnnnnnnnnnnnnnnnnnnnnnnnnnnnnnnnnnnnnnnnnnnnnnnnnnnnnnnnnnnnnnnnnnnnnnnnnnnnnnnnnnnnnnnnnnnnnnnnnnnnnnnnnnnnnnnnnnnnnnnnnnnnnnnnnnnnnnnnnnnnnnnnnnnnnnnnnnnnnnnnnnnnnnnnnnnnnnnnnnnnnnnnnnnnnnnnnnnnnnnnnnnnnnnnnnnnnnnnnnnnnnnnnnnnnnnnnnnnnnnnnnnnnnnnnnnnnnnnnnnnnnnnnnnnnnnnnnnnnnnnnnnnnnnnnnnnnnnnnnnnnnnnnnnnnnnnnnnnnnnnnnnnnnnnnnnnnnnnnnnnnnnnnnnnnnnnnnnnnnnnnnnnnnnnnnnnnnnnnnnnnnnnnnnnnnnnnnnnnnnnnnnnnnnnnnnnnnnnnnnnnnnnnnnnnnnnnnnnnnnnnnnnnnnnnnnnnnnnnnnnnnnnnnnnnnnnnnnnnnnnnnnnnnnnnnnnnnnnnnnnnnnnnnnnnnnnnnnnnnnnnnnnnnnnnnnnnnnnnnnnnnnnnnnnnnnnnnnnnnnnnnnnnnnnnnnnnnnnnnnnnnnnnnnnnnnnnnnnnnnnnnnnnnnnnnnnnnnnnnnnnnnnnnnnnnnnnnnnnnnnnnnnnnnnnnnnnnnnnnnnnnnnnnnnnnnnnnnnnnnnnnnnnnnnnnnnnnnnnnnnnnnnnnnnnnnnnnnnnnnnnnnnnnnnnnnnnnnnnnnnnnnnnnnnnnnnnnnnnnnnnnnnnnnnnnnnnnnnnnnnnnnnnnnnnnnnnnnnnnnnnnnnnnnnnnnnnnnnnnnnnnnnnnnnnnnnnnnnnnnnnnnnnnnnnnnnnnnnnnnnnnnnnnnnnnnnnnnnnnnnnnnnnnnnnnnnnnnnnnnnnnnnnnnnnnnnnnnnnnnnnnnnnnnnnnnnnnnnnnnnnnnnnnnnnnnnnnnnnnnnnnnnnnnnnnnnnnnnnnnnnnnnnnnnnnnnnnnnnnnnnnnnnnnnnnnnnnnnnnnnnnnnnnnnnnnnnnnnnnnnnnnnnnnnnnnnnnnnnnnnnnnnnnnnnnnnnnnnnnnnnnnnnnnnnnnnnnnnnnnnnnnnnnnnnnnnnnnnnnnnnnnnnnnnnnnnnnnnnnnnnnnnnnnnnnnnnnnnnnnnnnnnnnnnnnnnnnnnnnnnnnnnnnnnnnnnnnnnnnnnnnnnnnnnnnnnnnnnnnnnnnnnnnnnnnnnnnnnnnnnnnnnnnnnnnnnnnnnnnnnnnnnnnnnnnnnnnnnnnnnnnnnnnnnnnnnnnnnnnnnnnnnnnnnnnnnnnnnnnnnnnnnnnnnnnnnnnnnnnnnnnnnnnnnnnnnnnnnnnnnnnnnnnnnnnnnnnnnnnnnnnnnnnnnnnnnnnnnnnnnnnnnnnnnnnnnnnnnnnnnnnnnnnnnnnnnnnnnnnnnnnnnnnnnnnnnnnnnnnnnnnnnnnnnnnnnnnnnnnnnnnnnnnnnnnnnnnnnnnnnnnnnnnnnnnnnnnnnnnnnnnnnnnnnnnnnnnnnnnnnnnnnnnnnnnnnnnnnnnnnnnnnnnnnnnnnnnnnnnnnnnnnnnnnnnnnnnnnnnnnnnnnnnnnnnnnnnnnnnnnnnnnnnnnnnnnnnnnnnnnnnnnnnnnnnnnnnnnnnnnnnnnnnnnnnnnnnnnnnnnnnnnnnnnnnnnnnnnnnnnnnnnnnnnnnnnnnnnnnnnnnnnnnnnnnnnnnnnnnnnnnnnnnnnnnnnnnnnnnnnnnnnnnnnnnnnnnnnnnnnnnnnnnnnnnnnnnnnnnnnnnnnnnnnnnnnnnnnnnnnnnnnnnnnnnnnnnnnnnnnnnnnnnnnnnnnnnnnnnnnnnnnnnnnnnnnnnnnnnnnnnnnnnnnnnnnnnnnnnnnnnnnnnnnnnnnnnnnnnnnnnnnnnnnnnnnnnnnnnnnnnnnnnnnnnnnnnnnnnnnnnnnnnnnnnnnnnnnnnnnnnnnnnnnnnnnnnnnnnnnnnnnnnnnnnnnnnnnnnnnnnnnnnnnnnnnnnnnnnnnnnnnnnnnnnnnnnnnnnnnnnnnnnnnnnnnnnnnnnnnnnnnnnnnnnnnnnnnnnnnnnnnnnnnnnnnnnnnnnnnnnnnnnnnnnnnnnnnnnnnnnnnnnnnnnnnnnnnnnnnnnnnnnnnnnnnnnnnnnnnnnnnnnnnnnnnnnnnnnnnnnnnnnnnnnnnnnnnnnnnnnnnnnnnnnnnnnnnnnnnnnnnnnnnnnnnnnnnnnnnnnnnnnnnnnnnnnnnnnnnnnnnnnnnnnnnnnnnnnnnnnnnnnnnnnnnnnnnnnnnnnnnnnnnnnnnnnnnnnnnnnnnnnnnnnnnnnnnnnnnnnnnnnnnnnnnnnnnnnnnnnnnnnnnnnnnnnnnnnnnnnnnnnnnnnnnnnnnnnnnnnnnnnnnnnnnnnnnnnnnnnnnnnnnnnnnnnnnnnnnnnnnnnnnnnnnnnnnnnnnnnnnnnnnnnnnnnnnnnnnnnnnnnnnnnnnnnnnnnnnnnnnnnnnnnnnnnnnnnnnnnnnnnnnnnnnnnnnnnnnnnnnnnnnnnnnnnnnnnnnnnnnnnnnnnnnnnnnnnnnnnnnnnnnnnnnnnnnnnnnnnnnnnnnnnnnnnnnnnnnnnnnnnnnnnnnnnnnnnnnnnnnnnnnnnnnnnnnnnnnnnnnnnnnnnnnnnnnnnnnnnnnnnnnnnnnnnnnnnnnnnnnnnnnnnnnnnnnnnnnnnnnnnnnnnnnnnnnnnnnnnnnnnnnnnnnnnnnnnnnnnnnnnnnnnnnnnnnnnnnnnnnnnnnnnnnnnnnnnnnnnnnnnnnnnnnnnnnnnnnnnnnnnnnnnnnnnnnnnnnnnnnnnnnnnnnnnnnnnnnnnnnnnnnnnnnnnnnnnnnnnnnnnnnnnnnnnnnnnnnnnnnnnnnnnnnnnnnnnnnnnnnnnnnnnnnnnnnnnnnnnnnnnnnnnnnnnnnnnnnnnnnnnnnnnnnnnnnnnnnnnnnnnnnnnnnnnnnnnnnnnnnnnnnnnnnnnnnnnnnnnnnnnnnnnnnnnnnnnnnnnnnnnnnnnnnnnnnnnnnnnnnnnnnnnnnnnnnnnnnnnnnnnnnnnnnnnnnnnnnnnnnnnnnnnnnnnnnnnnnnnnnnnnnnnnnnnnnnnnnnnnnnnnnnnnnnnnnnnnnnnnnnnnnnnnnnnnnnnnnnnnnnnnnnnnnnnnnnnnnnnnnnnnnnnnnnnnnnnnnnnnnnnnnnnnnnnnnnnnnnnnnnnnnnnnnnnnnnnnnnnnnnnnnnnnnnnnnnnnnnnnnnnnnnnnnnnnnnnnnnnnnnnnnnnnnnnnnnnnnnnnnnnnnnnnnnnnnnnnnnnnnnnnnnnnnnnnnnnnnnnnnnnnnnnnnnnnnnnnnnnnnnnnnnnnnnnnnnnnnnnnnnnnnnnnnnnnnnnnnnnnnnnnnnnnnnnnnnnnnnnnnnnnnnnnnnnnnnnnnnnnnnnnnnnnnnnnnnnnnnnnnnnnnnnnnnnnnnnnnnnnnnnnnnnnnnnnnnnnnnnnnnnnnnnnnnnnnnnnnnnnnnnnnnnnnnnnnnnnnnnnnnnnnnnnnnnnnnnnnnnnnnnnnnnnnnnnnnnnnnnnnnnnnnnnnnnnnnnnnnnnnnnnnnnnnnnnnnnnnnnnnnnnnnnnnnnnnnnnnnnnnnnnnnnnnnnnnnnnnnnnnnnnnnnnnnnnnnnnnnnnnnnnnnnnnnnnnnnnnnnnnnnnnnnnnnnnnnnnnnnnnnnnnnnnnnnnnnnnnnnnnnnnnnnnnnnnnnnnnnnnnnnnnnnnnnnnnnnnnnnnnnnnnnnnnnnnnnnnnnnnnnnnnnnnnnnnnnnnnnnnnnnnnnnnnnnnnnnnnnnnnnnnnnnnnnnnnnnnnnnnnnnnnnnnnnnnnnnnnnnnnnnnnnnnnnnnnnnnnnnnnnnnnnnnnnnnnnnnnnnnnnnnnnnnnnnnnnnnnnnnnnnnnnnnnnnnnnnnnnnnnnnnnnnnnnnnnnnnnnnnnnnnnnnnnnnnnnnnnnnnnnnnnnnnnnnnnnnnnnnnnnnnnnnnnnnnnnnnnnnnnnnnnnnnnnnnnnnnnnnnnnnnnnnnnnnnnnnnnnnnnnnnnnnnnnnnnnnnnnnnnnnnnnnnnnnnnnnnnnnnnnnnnnnnnnnnnnnnnnnnnnnnnnnnnnnnnnnnnnnnnnnnnnnnnnnnnnnnnnnnnnnnnnnnnnnnnnnnnnnnnnnnnnnnnnnnnnnnnnnnnnnnnnnnnnnnnnnnnnnnnnnnnnnnnnnnnnnnnnnnnnnnnnnnnnnnnnnnnnnnnnnnnnnnnnnnnnnnnnnnnnnnnnnnnnnnnnnnnnnnnnnnnnnnnnnnnnnnnnnnnnnnnnnnnnnnnnnnnnnnnnnnnnnnnnnnnnnnnnnnnnnnnnnnnnnnnnnnnnnnnnnnnnnnnnnnnnnnnnnnnnnnnnnnnnnnnnnnnnnnnnnnnnnnnnnnnnnnnnnnnnnnnnnnnnnnnnnnnnnnnnnnnnnnnnnnnnnnnnnnnnnnnnnnnnnnnnnnnnnnnnnnnnnnnnnnnnnnnnnnnnnnnnnnnnnnnnnnnnnnnnnnnnnnnnnnnnnnnnnnnnnnnnnnnnnnnnnnnnnnnnnnnnnnnnnnnnnnnnnnnnnnnnnnnnnnnnnnnnnnnnnnnnnnnnnnnnnnnnnnnnnnnnnnnnnnnnnnnnnnnnnnnnnnnnnnnnnnnnnnnnnnnnnnnnnnnnnnnnnnnnnnnnnnnnnnnnnnnnnnnnnnnnnnnnnnnnnnnnnnnnnnnnnnnnnnnnnnnnnnnnnnnnnnnnnnnnnnnnnnnnnnnnnnnnnnnnnnnnnnnnnnnnnnnnnnnnnnnnnnnnnnnnnnnnnnnnnnnnnnnnnnnnnnnnnnnnnnnnnnnnnnnnnnnnnnnnnnnnnnnnnnnnnnnnnnnnnnnnnnnnnnnnnnnnnnnnnnnnnnnnnnnnnnnnnnnnnnnnnnnnnnnnnnnnnnnnnnnnnnnnnnnnnnnnnnnnnnnnnnnnnnnnnnnnnnnnnnnnnnnnnnnnnnnnnnnnnnnnnnnnnnnnnnnnnnnnnnnnnnnnnnnnnnnnnnnnnnnnnnnnnnnnnnnnnnnnnnnnnnnnnnnnnnnnnnnnnnnnnnnnnnnnnnnnnnnnnnnnnnnnnnnnnnnnnnnnnnnnnnnnnnnnnnnnnnnnnnnnnnnnnnnnnnnnnnnnnnnnnnnnnnnnnnnnnnnnnnnnnnnnnnnnnnnnnnnnnnnnnnnnnnnnnnnnnnnnnnnnnnnnnnnnnnnnnnnnnnnnnnnnnnnnnnnnnnnnnnnnnnnnnnnnnnnnnnnnnnnnnnnnnnnnnnnnnnnnnnnnnnnnnnnnnnnnnnnnnnnnnnnnnnnnnnnnnnnnnnnnnnnnnnnnnnnnnnnnnnnnnnnnnnnnnnnnnnnnnnnnnnnnnnnnnnnnnnnnnnnnnnnnnnnnnnnnnnnnnnnnnnnnnnnnnnnnnnnnnnnnnnnnnnnnnnnnnnnnnnnnnnnnnnnnnnnnnnnnnnnnnnnnnnnnnnnnnnnnnnnnnnnnnnnnnnnnnnnnnnnnnnnnnnnnnnnnnnnnnnnnnnnnnnnnnnnnnnnnnnnnnnnnnnnnnnnnnnnnnnnnnnnnnnnnnnnnnnnnnnnnnnnnnnnnnnnnnnnnnnnnnnnnnnnnnnnnnnnnnnnnnnnnnnnnnnnnnnnnnnnnnnnnnnnnnnnnnnnnnnnnnnnnnnnnnnnnnnnnnnnnnnnnnnnnnnnnnnnnnnnnnnnnnnnnnnnnnnnnnnnnnnnnnnnnnnnnnnnnnnnnnnnnnnnnnnnnnnnnnnnnnnnnnnnnnnnnnnnnnnnnnnnnnnnnnnnnnnnnnnnnnnnnnnnnnnnnnnnnnnnnnnnnnnnnnnnnnnnnnnnnnnnnnnnnnnnnnnnnnnnnnnnnnnnnnnnnnnnnnnnnnnnnnnnnnnnnnnnnnnnnnnnnnnnnnnnnnnnnnnnnnnnnnnnnnnnnnnnnnnnnnnnnnnnnnnnnnnnnnnnnnnnnnnnnnnnnnnnnnnnnnnnnnnnnnnnnnnnnnnnnnnnnnnnnnnnnnnnnnnnnnnnnnnnnnnnnnnnnnnnnnnnnnnnnnnnnnnnnnnnnnnnnnnnnnnnnnnnnnnnnnnnnnnnnnnnnnnnnnnnnnnnnnnnnnnnnnnnnnnnnnnnnnnnnnnnnnnnnnnnnnnnnnnnnnnnnnnnnnnnnnnnnnnnnnnnnnnnnnnnnnnnnnnnnnnnnnnnnnnnnnnnnnnnnnnnnnnnnnnnnnnnnnnnnnnnnnnnnnnnnnnnnnnnnnnnnnnnnnnnnnnnnnnnnnnnnnnnnnnnnnnnnnnnnnnnnnnnnnnnnnnnnnnnnnnnnnnnnnnnnnnnnnnnnnnnnnnnnnnnnnnnnnnnnnnnnnnnnnnnnnnnnnnnnnnnnnnnnnnnnnnnnnnnnnnnnnnnnnnnnnnnnnnnnnnnnnnnnnnnnnnnnnnnnnnnnnnnnnnnnnnnnnnnnnnnnnnnnnnnnnnnnnnnnnnnnnnnnnnnnnnnnnnnnnnnnnnnnnnnnnnnnnnnnnnnnnnnnnnnnnnnnnnnnnnnnnnnnnnnnnnnnnnnnnnnnnnnnnnnnnnnnnnnnnnnnnnnnnnnnnnnnnnnnnnnnnnnnnnnnnnnnnnnnnnnnnnnnnnnnnnnnnnnnnnnnnnnnnnnnnnnnnnnnnnnnnnnnnnnnnnnnnnnnnnnnnnnnnnnnnnnnnnnnnnnnnnnnnnnnnnnnnnnnnnnnnnnnnnnnnnnnnnnnnnnnnnnnnnnnnnnnnnnnnnnnnnnnnnnnnnnnnnnnnnnnnnnnnnnnnnnnnnnnnnnnnnnnnnnnnnnnnnnnnnnnnnnnnnnnnnnnnnnnnnnnnnnnnnnnnnnnnnnnnnnnnnnnnnnnnnnnnnnnnnnnnnnnnnnnnnnnnnnnnnnnnnnnnnnnnnnnnnnnnnnnnnnnnnnnnnnnnnnnnnnnnnnnnnnnnnnnnnnnnnnnnnnnnnnnnnnnnnnnnnnnnnnnnnnnnnnnnnnnnnnnnnnnnnnnnnnnnnnnnnnnnnnnnnnnnnnnnnnnnnnnnnnnnnnnnnnnnnnnnnnnnnnnnnnnnnnnnnnnnnnnnnnnnnnnnnnnnnnnnnnnnnnnnnnnnnnnnnnnnnnnnnnnnnnnnnnnnnnnnnnnnnnnnnnnnnnnnnnnnnnnnnnnnnnnnnnnnnnnnnnnnnnnnnnnnnnnnnnnnnnnnnnnnnnnnnnnnnnnnnnnnnnnnnnnnnnnnnnnnnnnnnnnnnnnnnnnnnnnnnnnnnnnnnnnnnnnnnnnnnnnnnnnnnnnnnnnnnnnnnnnnnnnnnnnnnnnnnnnnnnnnnnnnnnnnnnnnnnnnnnnnnnnnnnnnnnnnnnnnnnnnnnnnnnnnnnnnnnnnnnnnnnnnnnnnnnnnnnnnnnnnnnnnnnnnnnnnnnnnnnnnnnnnnnnnnnnnnnnnnnnnnnnnnnnnnnnnnnnnnnnnnnnnnnnnnnnnnnnnnnnnnnnnnnnnnnnnnnnnnnnnnnnnnnnnnnnnnnnnnnnnnnnnnnnnnnnnnnnnnnnnnnnnnnnnnnnnnnnnnnnnnnnnnnnnnnnnnnnnnnnnnnnnnnnnnnnnnnnnnnnnnnnnnnnnnnnnnnnnnnnnnnnnnnnnnnnnnnnnnnnnnnnnnnnnnnnnnnnnnnnnnnnnnnnnnnnnnnnnnnnnnnnnnnnnnnnnnnnnnnnnnnnnnnnnnnnnnnnnnnnnnnnnnnnnnnnnnnnnnnnnnnnnnnnnnnnnnnnnnnnnnnnnnnnnnnnnnnnnnnnnnnnnnnnnnnnnnnnnnnnnnnnnnnnnnnnnnnnnnnnnnnnnnnnnnnnnnnnnnnnnnnnnnnnnnnnnnnnnnnnnnnnnnnnnnnnnnnnnnnnnnnnnnnnnnnnnnnnnnnnnnnnnnnnnnnnnnnnnnnnnnnnnnnnnnnnnnnnnnnnnnnnnnnnnnnnnnnnnnnnnnnnnnnnnnnnnnnnnnnnnnnnnnnnnnnnnnnnnnnnnnnnnnnnnnnnnnnnnnnnnnnnnnnnnnnnnnnnnnnnnnnnnnnnnnnnnnnnnnnnnnnnnnnnnnnnnnnnnnnnnnnnnnnnnnnnnnnnnnnnnnnnnnnnnnnnnnnnnnnnnnnnnnnnnnnnnnnnnnnnnnnnnnnnnnnnnnnnnnnnnnnnnnnnnnnnnnnnnnnnnnnnnnnnnnnnnnnnnnnnnnnnnnnnnnnnnnnnnnnnnnnnnnnnnnnnnnnnnnnnnnnnnnnnnnnnnnnnnnnnnnnnnnnnnnnnnnnnnnnnnnnnnnnnnnnnnnnnnnnnnnnnnnnnnnnnnnnnnnnnnnnnnnnnnnnnnnnnnnnnnnnnnnnnnnnnnnnnnnnnnnnnnnnnnnnnnnnnnnnnnnnnnnnnnnnnnnnnnnnnnnnnnnnnnnnnnnnnnnnnnnnnnnnnnnnnnnnnnnnnnnnnnnnnnnnnnnnnnnnnnnnnnnnnnnnnnnnnnnnnnnnnnnnnnnnnnnnnnnnnnnnnnnnnnnnnnnnnnnnnnnnnnnnnnnnnnnnnnnnnnnnnnnnnnnnnnnnnnnnnnnnnnnnnnnnnnnnnnnnnnnnnnnnnnnnnnnnnnnnnnnnnnnnnnnnnnnnnnnnnnnnnnnnnnnnnnnnnnnnnnnnnnnnnnnnnnnnnnnnnnnnnnnnnnnnnnnnnnnnnnnnnnnnnnnnnnnnnnnnnnnnnnnnnnnnnnnnnnnnnnnnnnnnnnnnnnnnnnnnnnnnnnnnnnnnnnnnnnnnnnnnnnnnnnnnnnnnnnnnnnnnnnnnnnnnnnnnnnnnnnnnnnnnnnnnnnnnnnnnnnnnnnnnnnnnnnnnnnnnnnnnnnnnnnnnnnnnnnnnnnnnnnnnnnnnnnnnnnnnnnnnnnnnnnnnnnnnnnnnnnnnnnnnnnnnnnnnnnnnnnnnnnnnnnnnnnnnnnnnnnnnnnnnnnnnnnnnnnnnnnnnnnnnnnnnnnnnnnnnnnnnnnnnnnnnnnnnnnnnnnnnnnnnnnnnnnnnnnnnnnnnnnnnnnnnnnnnnnnnnnnnnnnnnnnnnnnnnnnnnnnnnnnnnnnnnnnnnnnnnnnnnnnnnnnnnnnnnnnnnnnnnnnnnnnnnnnnnnnnnnnnnnnnnnnnnnnnnnnnnnnnnnnnnnnnnnnnnnnnnnnnnnnnnnnnnnnnnnnnnnnnnnnnnnnnnnnnnnnnnnnnnnnnnnnnnnnnnnnnnnnnnnnnnnnnnnnnnnnnnnnnnnnnnnnnnnnnnnnnnnnnnnnnnnnnnnnnnnnnnnnnnnnnnnnnnnnnnnnnnnnnnnnnnnnnnnnnnnnnnnnnnnnnnnnnnnnnnnnnnnnnnnnnnnnnnnnnnnnnnnnnnnnnnnnnnnnnnnnnnnnnnnnnnnnnnnnnnnnnnnnnnnnnnnnnnnnnnnnnnnnnnnnnnnnnnnnnnnnnnnnnnnnnnnnnnnnnnnnnnnnnnnnnnnnnnnnnnnnnnnnnnnnnnnnnnnnnnnnnnnnnnnnnnnnnnnnnnnnnnnnnnnnnnnnnnnnnnnnnnnnnnnnnnnnnnnnnnnnnnnnnnnnnnnnnnnnnnnnnnnnnnnnnnnnnnnnnnnnnnnnnnnnnnnnnnnnnnnnnnnnnnnnnnnnnnnnnnnnnnnnnnnnnnnnnnnnnnnnnnnnnnnnnnnnnnnnnnnnnnnnnnnnnnnnnnnnnnnnnnnnnnnnnnnnnnnnnnnnnnnnnnnnnnnnnnnnnnnnnnnnnnnnnnnnnnnnnnnnnnnnnnnnnnnnnnnnnnnnnnnnnnnnnnnnnnnnnnnnnnnnnnnnnnnnnnnnnnnnnnnnnnnnnnnnnnnnnnnnnnnnnnnnnnnnnnnnnnnnnnnnnnnnnnnnnnnnnnnnnnnnnnnnnnnnnnnnnnnnnnnnnnnnnnnnnnnnnnnnnnnnnnnnnnnnnnnnnnnnnnnnnnnnnnnnnnnnnnnnnnnnnnnnnnnnnnnnnnnnnnnnnnnnnnnnnnnnnnnnnnnnnnnnnnnnnnnnnnnnnnnnnnnnnnnnnnnnnnnnnnnnnnnnnnnnnnnnnnnnnnnnnnnnnnnnnnnnnnnnnnnnnnnnnnnnnnnnnnnnnnnnnnnnnnnnnnnnnnnnnnnnnnnnnnnnnnnnnnnnnnnnnnnnnnnnnnnnnnnnnnnnnnnnnnnnnnnnnnnnnnnnnnnnnnnnnnnnnnnnnnnnnnnnnnnnnnnnnnnnnnnnnnnnnnnnnnnnnnnnnnnnnnnnnnnnnnnnnnnnnnnnnnnnnnnnnnnnnnnnnnnnnnnnnnnnnnnnnnnnnnnnnnnnnnnnnnnnnnnnnnnnnnnnnnnnnnnnnnnnnnnnnnnnnnnnnnnnnnnnnnnnnnnnnnnnnnnnnnnnnnnnnnnnnnnnnnnnnnnnnnnnnnnnnnnnnnnnnnnnnnnnnnnnnnnnnnnnnnnnnnnnnnnnnnnnnnnnnnnnnnnnnnnnnnnnnnnnnnnnnnnnnnnnnnnnnnnnnnnnnnnnnnnnnnnnnnnnnnnnnnnnnnnnnnnnnnnnnnnnnnnnnnnnnnnnnnnnnnnnnnnnnnnnnnnnnnnnnnnnnnnnnnnnnnnnnnnnnnnnnnnnnnnnnnnnnnnnnnnnnnnnnnnnnnnnnnnnnnnnnnnnnnnnnnnnnnnnnnnnnnnnnnnnnnnnnnnnnnnnnnnnnnnnnnnnnnnnnnnnnnnnnnnnnnnnnnnnnnnnnnnnnnnnnnnnnnnnnnnnnnnnnnnnnnnnnnnnnnnnnnnnnnnnnnnnnnnnnnnnnnnnnnnnnnnnnnnnnnnnnnnnnnnnnnnnnnnnnnnnnnnnnnnnnnnnnnnnnnnnnnnnnnnnnnnnnnnnnnnnnnnnnnnnnnnnnnnnnnnnnnnnnnnnnnnnnnnnnnnnnnnnnnnnnnnnnnnnnnnnnnnnnnnnnnnnnnnnnnnnnnnnnnnnnnnnnnnnnnnnnnnnnnnnnnnnnnnnnnnnnnnnnnnnnnnnnnnnnnnnnnnnnnnnnnnnnnnnnnnnnnnnnnnnnnnnnnnnnnnnnnnnnnnnnnnnnnnnnnnnnnnnnnnnnnnnnnnnnnnnnnnnnnnnnnnnnnnnnnnnnnnnnnnnnnnnnnnnnnnnnnnnnnnnnnnnnnnnnnnnnnnnnnnnnnnnnnnnnnnnnnnnnnnnnnnnnnnnnnnnnnnnnnnnnnnnnnnnnnnnnnnnnnnnnnnnnnnnnnnnnnnnnnnnnnnnnnnnnnnnnnnnnnnnnnnnnnnnnnnnnnnnnnnnnnnnnnnnnnnnnnnnnnnnnnnnnnnnnnnnnnnnnnnnnnnnnnnnnnnnnnnnnnnnnnnnnnnnnnnnnnnnnnnnnnnnnnnnnnnnnnnnnnnnnnnnnnnnnnnnnnnnnnnnnnnnnnnnnnnnnnnnnnnnnnnnnnnnnnnnnnnnnnnnnnnnnnnnnnnnnnnnnnnnnnnnnnnnnnnnnnnnnnnnnnnnnnnnnnnnnnnnnnnnnnnnnnnnnnnnnnnnnnnnnnnnnnnnnnnnnnnnnnnnnnnnnnnnnnnnnnnnnnnnnnnnnnnnnnnnnnnnnnnnnnnnnnnnnnnnnnnnnnnnnnnnnnnnnnnnnnnnnnnnnnnnnnnnnnnnnnnnnnnnnnnnnnnnnnnnnnnnnnnnnnnnnnnnnnnnnnnnnnnnnnnnnnnnnnnnnnnnnnnnnnnnnnnnnnnnnnnnnnnnnnnnnnnnnnnnnnnnnnnnnnnnnnnnnnnnnnnnnnnnnnnnnnnnnnnnnnnnnnnnnnnnnnnnnnnnnnnnnnnnnnnnnnnnnnnnnnnnnnnnnnnnnnnnnnnnnnnnnnnnnnnnnnnnnnnnnnnnnnnnnnnnnnnnnnnnnnnnnnnnnnnnnnnnnnnnnnnnnnnnnnnnnnnnnnnnnnnnnnnnnnnnnnnnnnnnnnnnnnnnnnnnnnnnnnnnnnnnnnnnnnnnnnnnnnnnnnnnnnnnnnnnnnnnnnnnnnnnnnnnnnnnnnnnnnnnnnnnnnnnnnnnnnnnnnnnnnnnnnnnnnnnnnnnnnnnnnnnnnnnnnnnnnnnnnnnnnnnnnnnnnnnnnnnnnnnnnnnnnnnnnnnnnnnnnnnnnnnnnnnnnnnnnnnnnnnnnnnnnnnnnnnnnnnnnnnnnnnnnnnnnnnnnnnnnnnnnnnnnnnnnnnnnnnnnnnnnnnnnnnnnnnnnnnnnnnnnnnnnnnnnnnnnnnnnnnnnnnnnnnnnnnnnnnnnnnnnnnnnnnnnnnnnnnnnnnnnnnnnnnnnnnnnnnnnnnnnnnnnnnnnnnnnnnnnnnnnnnnnnnnnnnnnnnnnnnnnnnnnnnnnnnnnnnnnnnnnnnnnnnnnnnnnnnnnnnnnnnnnnnnnnnnnnnnnnnnnnnnnnnnnnnnnnnnnnnnnnnnnnnnnnnnnnnnnnnnnnnnnnnnnnnnnnnnnnnnnnnnnnnnnnnnnnnnnnnnnnnnnnnnnnnnnnnnnnnnnnnnnnnnnnnnnnnnnnnnnnnnnnnnnnnnnnnnnnnnnnnnnnnnnnnnnnnnnnnnnnnnnnnnnnnnnnnnnnnnnnnnnnnnnnnnnnnnnnnnnnnnnnnnnnnnnnnnnnnnnnnnnnnnnnnnnnnnnnnnnnnnnnnnnnnnnnnnnnnnnnnnnnnnnnnnnnnnnnnnnnnnnnnnnnnnnnnnnnnnnnnnnnnnnnnnnnnnnnnnnnnnnnnnnnnnnnnnnnnnnnnnnnnnnnnnnnnnnnnnnnnnnnnnnnnnnnnnnnnnnnnnnnnnnnnnnnnnnnnnnnnnnnnnnnnnnnnnnnnnnnnnnnnnnnnnnnnnnnnnnnnnnnnnnnnnnnnnnnnnnnnnnnnnnnnnnnnnnnnnnnnnnnnnnnnnnnnnnnnnnnnnnnnnnnnnnnnnnnnnnnnnnnnnnnnnnnnnnnnnnnnnnnnnnnnnnnnnnnnnnnnnnnnnnnnnnnnnnnnnnnnnnnnnnnnnnnnnnnnnnnnnnnnnnnnnnnnnnnnnnnnnnnnnnnnnnnnnnnnnnnnnnnnnnnnnnnnnnnnnnnnnnnnnnnnnnnnnnnnnnnnnnnnnnnnnnnnnnnnnnnnnnnnnnnnnnnnnnnnnnnnnnnnnnnnnnnnnnnnnnnnnnnnnnnnnnnnnnnnnnnnnnnnnnnnnnnnnnnnnnnnnnnnnnnnnnnnnnnnnnnnnnnnnnnnnnnnnnnnnnnnnnnnnnnnnnnnnnnnnnnnnnnnnnnnnnnnnnnnnnnnnnnnnnnnnnnnnnnnnnnnnnnnnnnnnnnnnnnnnnnnnnnnnnnnnnnnnnnnnnnnnnnnnnnnnnnnnnnnnnnnnnnnnnnnnnnnnnnnnnnnnnnnnnnnnnnnnnnnnnnnnnnnnnnnnnnnnnnnnnnnnnnnnnnnnnnnnnnnnnnnnnnnnnnnnnnnnnnnnnnnnnnnnnnnnnnnnnnnnnnnnnnnnnnnnnnnnnnnnnnnnnnnnnnnnnnnnnnnnnnnnnnnnnnnnnnnnnnnnnnnnnnnnnnnnnnnnnnnnnnnnnnnnnnnnnnnnnnnnnnnnnnnnnnnnnnnnnnnnnnnnnnnnnnnnnnnnnnnnnnnnnnnnnnnnnnnnnnnnnnnnnnnnnnnnnnnnnnnnnnnnnnnnnnnnnnnnnnnnnnnnnnnnnnnnnnnnnnnnnnnnnnnnnnnnnnnnnnnnnnnnnnnnnnnnnnnnnnnnnnnnnnnnnnnnnnnnnnnnnnnnnnnnnnnnnnnnnnnnnnnnnnnnnnnnnnnnnnnnnnnnnnnnnnnnnnnnnnnnnnnnnnnnnnnnnnnnnnnnnnnnnnnnnnnnnnnnnnnnnnnnnnnnnnnnnnnnnnnnnnnnnnnnnnnnnnnnnnnnnnnnnnnnnnnnnnnnnnnnnnnnnnnnnnnnnnnnnnnnnnnnnnnnnnnnnnnnnnnnnnnnnnnnnnnnnnnnnnnnnnnnnnnnnnnnnnnnnnnnnnnnnnnnnnnnnnnnnnnnnnnnnnnnnnnnnnnnnnnnnnnnnnnnnnnnnnnnnnnnnnnnnnnnnnnnnnnnnnnnnnnnnnnnnnnnnnnnnnnnnnnnnnnnnnnnnnnnnnnnnnnnnnnnnnnnnnnnnnnnnnnnnnnnnnnnnnnnnnnnnnnnnnnnnnnnnnnnnnnnnnnnnnnnnnnnnnnnnnnnnnnnnnnnnnnnnnnnnnnnnnnnnnnnnnnnnnnnnnnnnnnnnnnnnnnnnnnnnnnnnnnnnnnnnnnnnnnnnnnnnnnnnnnnnnnnnnnnnnnnnnnnnnnnnnnnnnnnnnnnnnnnnnnnnnnnnnnnnnnnnnnnnnnnnnnnnnnnnnnnnnnnnnnnnnnnnnnnnnnnnnnnnnnnnnnnnnnnnnnnnnnnnnnnnnnnnnnnnnnnnnnnnnnnnnnnnnnnnnnnnnnnnnnnnnnnnnnnnnnnnnnnnnnnnnnnnnnnnnnnnnnnnnnnnnnnnnnnnnnnnnnnnnnnnnnnnnnnnnnnnnnnnnnnnnnnnnnnnnnnnnnnnnnnnnnnnnnnnnnnnnnnnnnnnnnnnnnnnnnnnnnnnnnnnnnnnnnnnnnnnnnnnnnnnnnnnnnnnnnnnnnnnnnnnnnnnnnnnnnnnnnnnnnnnnnnnnnnnnnnnnnnnnnnnnnnnnnnnnnnnnnnnnnnnnnnnnnnnnnnnnnnnnnnnnnnnnnnnnnnnnnnnnnnnnnnnnnnnnnnnnnnnnnnnnnnnnnnnnnnnnnnnnnnnnnnnnnnnnnnnnnnnnnnnnnnnnnnnnnnnnnnnnnnnnnnnnnnnnnnnnnnnnnnnnnnnnnnnnnnnnnnnnnnnnnnnnnnnnnnnnnnnnnnnnnnnnnnnnnnnnnnnnnnnnnnnnnnnnnnnnnnnnnnnnnnnnnnnnnnnnnnnnnnnnnnnnnnnnnnnnnnnnnnnnnnnnnnnnnnnnnnnnnnnnnnnnnnnnnnnnnnnnnnnnnnnnnnnnnnnnnnnnnnnnnnnnnnnnnnnnnnnnnnnnnnnnnnnnnnnnnnnnnnnnnnnnnnnnnnnnnnnnnnnnnnnnnnnnnnnnnnnnnnnnnnnnnnnnnnnnnnnnnnnnnnnnnnnnnnnnnnnnnnnnnnnnnnnnnnnnnnnnnnnnnnnnnnnnnnnnnnnnnnnnnnnnnnnnnnnnnnnnnnnnnnnnnnnnnnnnnnnnnnnnnnnnnnnnnnnnnnnnnnnnnnnnnnnnnnnnnnnnnnnnnnnnnnnnnnnnnnnnnnnnnnnnnnnnnnnnnnnnnnnnnnnnnnnnnnnnnnnnnnnnnnnnnnnnnnnnnnnnnnnnnnnnnnnnnnnnnnnnnnnnnnnnnnnnnnnnnnnnnnnnnnnnnnnnnnnnnnnnnnnnnnnnnnnnnnnnnnnnnnnnnnnnnnnnnnnnnnnnnnnnnnnnnnnnnnnnnnnnnnnnnnnnnnnnnnnnnnnnnnnnnnnnnnnnnnnnnnnnnnnnnnnnnnnnnnnnnnnnnnnnnnnnnnnnnnnnnnnnnnnnnnnnnnnnnnnnnnnnnnnnnnnnnnnnnnnnnnnnnnnnnnnnnnnnnnnnnnnnnnnnnnnnnnnnnnnnnnnnnnnnnnnnnnnnnnnnnnnnnnnnnnnnnnnnnnnnnnnnnnnnnnnnnnnnnnnnnnnnnnnnnnnnnnnnnnnnnnnnnnnnnnnnnnnnnnnnnnnnnnnnnnnnnnnnnnnnnnnnnnnnnnnnnnnnnnnnnnnnnnnnnnnnnnnnnnnnnnnnnnnnnnnnnnnnnnnnnnnnnnnnnnnnnnnnnnnnnnnnnnnnnnnnnnnnnnnnnnnnnnnnnnnnnnnnnnnnnnnnnnnnnnnnnnnnnnnnnnnnnnnnnnnnnnnnnnnnnnnnnnnnnnnnnnnnnnnnnnnnnnnnnnnnnnnnnnnnnnnnnnnnnnnnnnnnnnnnnnnnnnnnnnnnnnnnnnnnnnnnnnnnnnnnnnnnnnnnnnnnnnnnnnnnnnnnnnnnnnnnnnnnnnnnnnnnnnnnnnnnnnnnnnnnnnnnnnnnnnnnnnnnnnnnnnnnnnnnnnnnnnnnnnnnnnnnnnnnnnnnnnnnnnnnnnnnnnnnnnnnnnnnnnnnnnnnnnnnnnnnnnnnnnnnnnnnnnnnnnnnnnnnnnnnnnnnnnnnnnnnnnnnnnnnnnnnnnnnnnnnnnnnnnnnnnnnnnnnnnnnnnnnnnnnnnnnnnnnnnnnnnnnnnnnnnnnnnnnnnnnnnnnnnnnnnnnnnnnnnnnnnnnnnnnnnnnnnnnnnnnnnnnnnnnnnnnnnnnnnnnnnnnnnnnnnnnnnnnnnnnnnnnnnnnnnnnnnnnnnnnnnnnnnnnnnnnnnnnnnnnnnnnnnnnnnnnnnnnnnnnnnnnnnnnnnnnnnnnnnnnnnnnnnnnnnnnnnnnnnnnnnnnnnnnnnnnnnnnnnnnnnnnnnnnnnnnnnnnnnnnnnnnnnnnnnnnnnnnnnnnnnnnnnnnnnnnnnnnnnnnnnnnnnnnnnnnnnnnnnnnnnnnnnnnnnnnnnnnnnnnnnnnnnnnnnnnnnnnnnnnnnnnnnnnnnnnnnnnnnnnnnnnnnnnnnnnnnnnnnnnnnnnnnnnnnnnnnnnnnnnnnnnnnnnnnnnnnnnnnnnnnnnnnnnnnnnnnnnnnnnnnnnnnnnnnnnnnnnnnnnnnnnnnnnnnnnnnnnnnnnnnnnnnnnnnnnnnnnnnnnnnnnnnnnnnnnnnnnnnnnnnnnnnnnnnnnnnnnnnnnnnnnnnnnnnnnnnnnnnnnnnnnnnnnnnnnnnnnnnnnnnnnnnnnnnnnnnnnnnnnnnnnnnnnnnnnnnnnnnnnnnnnnnnnnnnnnnnnnnnnnnnnnnnnnnnnnnnnnnnnnnnnnnnnnnnnnnnnnnnnnnnnnnnnnnnnnnnnnnnnnnnnnnnnnnnnnnnnnnnnnnnnnnnnnnnnnnnnnnnnnnnnnnnnnnnnnnnnnnnnnnnnnnnnnnnnnnnnnnnnnnnnnnnnnnnnnnnnnnnnnnnnnnnnnnnnnnnnnnnnnnnnnnnnnnnnnnnnnnnnnnnnnnnnnnnnnnnnnnnnnnnnnnnnnnnnnnnnnnnnnnnnnnnnnnnnnnnnnnnnnnnnnnnnnnnnnnnnnnnnnnnnnnnnnnnnnnnnnnnnnnnnnnnnnnnnnnnnnnnnnnnnnnnnnnnnnnnnnnnnnnnnnnnnnnnnnnnnnnnnnnnnnnnnnnnnnnnnnnnnnnnnnnnnnnnnnnnnnnnnnnnnnnnnnnnnnnnnnnnnnnnnnnnnnnnnnnnnnnnnnnnnnnnnnnnnnnnnnnnnnnnnnnnnnnnnnnnnnnnnnnnnnnnnnnnnnnnnnnnnnnnnnnnnnnnnnnnnnnnnnnnnnnnnnnnnnnnnnnnnnnnnnnnnnnnnnnnnnnnnnnnnnnnnnnnnnnnnnnnnnnnnnnnnnnnnnnnnnnnnnnnnnnnnnnnnnnnnnnnnnnnnnnnnnnnnnnnnnnnnnnnnnnnnnnnnnnnnnnnnnnnnnnnnnnnnnnnnnnnnnnnnnnnnnnnnnnnnnnnnnnnnnnnnnnnnnnnnnnnnnnnnnnnnnnnnnnnnnnnnnnnnnnnnnnnnnnnnnnnnnnnnnnnnnnnnnnnnnnnnnnnnnnnnnnnnnnnnnnnnnnnnnnnnnnnnnnnnnnnnnnnnnnnnnnnnnnnnnnnnnnnnnnnnnnnnnnnnnnnnnnnnnnnnnnnnnnnnnnnnnnnnnnnnnnnnnnnnnnnnnnnnnnnnnnnnnnnnnnnnnnnnnnnnnnnnnnnnnnnnnnnnnnnnnnnnnnnnnnnnnnnnnnnnnnnnnnnnnnnnnnnnnnnnnnnnnnnnnnnnnnnnnnnnnnnnnnnnnnnnnnnnnnnnnnnnnnnnnnnnnnnnnnnnnnnnnnnnnnnnnnnnnnnnnnnnnnnnnnnnnnnnnnnnnnnnnnnnnnnnnnnnnnnnnnnnnnnnnnnnnnnnnnnnnnnnnnnnnnnnnnnnnnnnnnnnnnnnnnnnnnnnnnnnnnnnnnnnnnnnnnnnnnnnnnnnnnnnnnnnnnnnnnnnnnnnnnnnnnnnnnnnnnnnnnnnnnnnnnnnnnnnnnnnnnnnnnnnnnnnnnnnnnnnnnnnnnnnnnnnnnnnnnnnnnnnnnnnnnnnnnnnnnnnnnnnnnnnnnnnnnnnnnnnnnnnnnnnnnnnnnnnnnnnnnnnnnnnnnnnnnnnnnnnnnnnnnnnnnnnnnnnnnnnnnnnnnnnnnnnnnnnnnnnnnnnnnnnnnnnnnnnnnnnnnnnnnnnnnnnnnnnnnnnnnnnnnnnnnnnnnnnnnnnnnnnnnnnnnnnnnnnnnnnnnnnnnnnnnnnnnnnnnnnnnnnnnnnnnnnnnnnnnnnnnnnnnnnnnnnnnnnnnnnnnnnnnnnnnnnnnnnnnnnnnnnnnnnnnnnnnnnnnnnnnnnnnnnnnnnnnnnnnnnnnnnnnnnnnnnnnnnnnnnnnnnnnnnnnnnnnnnnnnnnnnnnnnnnnnnnnnnnnnnnnnnnnnnnnnnnnnnnnnnnnnnnnnnnnnnnnnnnnnnnnnnnnnnnnnnnnnnnnnnnnnnnnnnnnnnnnnnnnnnnnnnnnnnnnnnnnnnnnnnnnnnnnnnnnnnnnnnnnnnnnnnnnnnnnnnnnnnnnnnnnnnnnnnnnnnnnnnnnnnnnnnnnnnnnnnnnnnnnnnnnnnnnnnnnnnnnnnnnnnnnnnnnnnnnnnnnnnnnnnnnnnnnnnnnnnnnnnnnnnnnnnnnnnnnnnnnnnnnnnnnnnnnnnnnnnnnnnnnnnnnnnnnnnnnnnnnnnnnnnnnnnnnnnnnnnnnnnnnnnnnnnnnnnnnnnnnnnnnnnnnnnnnnnnnnnnnnnnnnnnnnnnnnnnnnnnnnnnnnnnnnnnnnnnnnnnnnnnnnnnnnnnnnnnnnnnnnnnnnnnnnnnnnnnnnnnnnnnnnnnnnnnnnnnnnnnnnnnnnnnnnnnnnnnnnnnnnnnnnnnnnnnnnnnnnnnnnnnnnnnnnnnnnnnnnnnnnnnnnnnnnnnnnnnnnnnnnnnnnnnnnnnnnnnnnnnnnnnnnnnnnnnnnnnnnnnnnnnnnnnnnnnnnnnnnnnnnnnnnnnnnnnnnnnnnnnnnnnnnnnnnnnnnnnnnnnnnnnnnnnnnnnnnnnnnnnnnnnnnnnnnnnnnnnnnnnnnnnnnnnnnnnnnnnnnnnnnnnnnnnnnnnnnnnnnnnnnnnnnnnnnnnnnnnnnnnnnnnnnnnnnnnnnnnnnnnnnnnnnnnnnnnnnnnnnnnnnnnnnnnnnnnnnnnnnnnnnnnnnnnnnnnnnnnnnnnnnnnnnnnnnnnnnnnnnnnnnnnnnnnnnnnnnnnnnnnnnnnnnnnnnnnnnnnnnnnnnnnnnnnnnnnnnnnnnnnnnnnnnnnnnnnnnnnnnnnnnnnnnnnnnnnnnnnnnnnnnnnnnnnnnnnnnnnnnnnnnnnnnnnnnnnnnnnnnnnnnnnnnnnnnnnnnnnnnnnnnnnnnnnnnnnnnnnnnnnnnnnnnnnnnnnnnnnnnnnnnnnnnnnnnnnnnnnnnnnnnnnnnnnnnnnnnnnnnnnnnnnnnnnnnnnnnnnnnnnnnnnnnnnnnnnnnnnnnnnnnnnnnnnnnnnnnnnnnnnnnnnnnnnnnnnnnnnnnnnnnnnnnnnnnnnnnnnnnnnnnnnnnnnnnnnnnnnnnnnnnnnnnnnnnnnnnnnnnnnnnnnnnnnnnnnnnnnnnnnnnnnnnnnnnnnnnnnnnnnnnnnnnnnnnnnnnnnnnnnnnnnnnnnnnnnnnnnnnnnnnnnnnnnnnnnnnnnnnnnnnnnnnnnnnnnnnnnnnnnnnnnnnnnnnnnnnnnnnnnnnnnnnnnnnnnnnnnnnnnnnnnnnnnnnnnnnnnnnnnnnnnnnnnnnnnnnnnnnnnnnnnnnnnnnnnnnnnnnnnnnnnnnnnnnnnnnnnnnnnnnnnnnnnnnnnnnnnnnnnnnnnnnnnnnnnnnnnnnnnnnnnnnnnnnnnnnnnnnnnnnnnnnnnnnnnnnnnnnnnnnnnnnnnnnnnnnnnnnnnnnnnnnnnnnnnnnnnnnnnnnnnnnnnnnnnnnnnnnnnnnnnnnnnnnnnnnnnnnnnnnnnnnnnnnnnnnnnnnnnnnnnnnnnnnnnnnnnnnnnnnnnnnnnnnnnnnnnnnnnnnnnnnnnnnnnnnnnnnnnnnnnnnnnnnnnnnnnnnnnnnnnnnnnnnnnnnnnnnnnnnnnnnnnnnnnnnnnnnnnnnnnnnnnnnnnnnnnnnnnnnnnnnnnnnnnnnnnnnnnnnnnnnnnnnnnnnnnnnnnnnnnnnnnnnnnnnnnnnnnnnnnnnnnnnnnnnnnnnnnnnnnnnnnnnnnnnnnnnnnnnnnnnnnnnnnnnnnnnnnnnnnnnnnnnnnnnnnnnnnnnnnnnnnnnnnnnnnnnnnnnnnnnnnnnnnnnnnnnnnnnnnnnnnnnnnnnnnnnnnnnnnnnnnnnnnnnnnnnnnnnnnnnnnnnnnnnnnnnnnnnnnnnnnnnnnnnnnnnnnnnnnnnnnnnnnnnnnnnnnnnnnnnnnnnnnnnnnnnnnnnnnnnnnnnnnnnnnnnnnnnnnnnnnnnnnnnnnnnnnnnnnnnnnnnnnnnnnnnnnnnnnnnnnnnnnnnnnnnnnnnnnnnnnnnnnnnnnnnnnnnnnnnnnnnnnnnnnnnnnnnnnnnnnnnnnnnnnnnnnnnnnnnnnnnnnnnnnnnnnnnnnnnnnnnnnnnnnnnnnnnnnnnnnnnnnnnnnnnnnnnnnnnnnnnnnnnnnnnnnnnnnnnnnnnnnnnnnnnnnnnnnnnnnnnnnnnnnnnnnnnnnnnnnnnnnnnnnnnnnnnnnnnnnnnnnnnnnnnnnnnnnnnnnnnnnnnnnnnnnnnnnnnnnnnnnnnnnnnnnnnnnnnnnnnnnnnnnnnnnnnnnnnnnnnnnnnnnnnnnnnnnnnnnnnnnnnnnnnnnnnnnnnnnnnnnnnnnnnnnnnnnnnnnnnnnnnnnnnnnnnnnnnnnnnnnnnnnnnnnnnnnnnnnnnnnnnnnnnnnnnnnnnnnnnnnnnnnnnnnnnnnnnnnnnnnnnnnnnnnnnnnnnnnnnnnnnnnnnnnnnnnnnnnnnnnnnnnnnnnnnnnnnnnnnnnnnnnnnnnnnnnnnnnnnnnnnnnnnnnnnnnnnnnnnnnnnnnnnnnnnnnnnnnnnnnnnnnnnnnnnnnnnnnnnnnnnnnnnnnnnnnnnnnnnnnnnnnnnnnnnnnnnnnnnnnnnnnnnnnnnnnnnnnnnnnnnnnnnnnnnnnnnnnnnnnnnnnnnnnnnnnnnnnnnnnnnnnnnnnnnnnnnnnnnnnnnnnnnnnnnnnnnnnnnnnnnnnnnnnnnnnnnnnnnnnnnnnnnnnnnnnnnnnnnnnnnnnnnnnnnnnnnnnnnnnnnnnnnnnnnnnnnnnnnnnnnnnnnnnnnnnnnnnnnnnnnnnnnnnnnnnnnnnnnnnnnnnnnnnnnnnnnnnnnnnnnnnnnnnnnnnnnnnnnnnnnnnnnnnnnnnnnnnnnnnnnnnnnnnnnnnnnnnnnnnnnnnnnnnnnnnnnnnnnnnnnnnnnnnnnnnnnnnnnnnnnnnnnnnnnnnnnnnnnnnnnnnnnnnnnnnnnnnnnnnnnnnnnnnnnnnnnnnnnnnnnnnnnnnnnnnnnnnnnnnnnnnnnnnnnnnnnnnnnnnnnnnnnnnnnnnnnnnnnnnnnnnnnnnnnnnnnnnnnnnnnnnnnnnnnnnnnnnnnnnnnnnnnnnnnnnnnnnnnnnnnnnnnnnnnnnnnnnnnnnnnnnnnnnnnnnnnnnnnnnnnnnnnnnnnnnnnnnnnnnnnnnnnnnnnnnnnnnnnnnnnnnnnnnnnnnnnnnnnnnnnnnnnnnnnnnnnnnnnnnnnnnnnnnnnnnnnnnnnnnnnnnnnnnnnnnnnnnnnnnnnnnnnnnnnnnnnnnnnnnnnnnnnnnnnnnnnnnnnnnnnnnnnnnnnnnnnnnnnnnnnnnnnnnnnnnnnnnnnnnnnnnnnnnnnnnnnnnnnnnnnnnnnnnnnnnnnnnnnnnnnnnnnnnnnnnnnnnnnnnnnnnnnnnnnnnnnnnnnnnnnnnnnnnnnnnnnnnnnnnnnnnnnnnnnnnnnnnnnnnnnnnnnnnnnnnnnnnnnnnnnnnnnnnnnnnnnnnnnnnnnnnnnnnnnnnnnnnnnnnnnnnnnnnnnnnnnnnnnnnnnnnnnnnnnnnnnnnnnnnnnnnnnnnnnnnnnnnnnnnnnnnnnnnnnnnnnnnnnnnnnnnnnnnnnnnnnnnnnnnnnnnnnnnnnnnnnnnnnnnnnnnnnnnnnnnnnnnnnnnnnnnnnnnnnnnnnnnnnnnnnnnnnnnnnnnnnnnnnnnnnnnnnnnnnnnnnnnnnnnnnnnnnnnnnnnnnnnnnnnnnnnnnnnnnnnnnnnnnnnnnnnnnnnnnnnnnnnnnnnnnnnnnnnnnnnnnnnnnnnnnnnnnnnnnnnnnnnnnnnnnnnnnnnnnnnnnnnnnnnnnnnnnnnnnnnnnnnnnnnnnnnnnnnnnnnnnnnnnnnnnnnnnnnnnnnnnnnnnnnnnnnnnnnnnnnnnnnnnnnnnnnnnnnnnnnnnnnnnnnnnnnnnnnnnnnnnnnnnnnnnnnnnnnnnnnnnnnnnnnnnnnnnnnnnnnnnnnnnnnnnnnnnnnnnnnnnnnnnnnnnnnnnnnnnnnnnnnnnnnnnnnnnnnnnnnnnnnnnnnnnnnnnnnnnnnnnnnnnnnnnnnnnnnnnnnnnnnnnnnnnnnnnnnnnnnnnnnnnnnnnnnnnnnnnnnnnnnnnnnnnnnnnnnnnnnnnnnnnnnnnnnnnnnnnnnnnnnnnnnnnnnnnnnnnnnnnnnnnnnnnnnnnnnnnnnnnnnnnnnnnnnnnnnnnnnnnnnnnnnnnnnnnnnnnnnnnnnnnnnnnnnnnnnnnnnnnnnnnnnnnnnnnnnnnnnnnnnnnnnnnnnnnnnnnnnnnnnnnnnnnnnnnnnnnnnnnnnnnnnnnnnnnnnnnnnnnnnnnnnnnnnnnnnnnnnnnnnnnnnnnnnnnnnnnnnnnnnnnnnnnnnnnnnnnnnnnnnnnnnnnnnnnnnnnnnnnnnnnnnnnnnnnnnnnnnnnnnnnnnnnnnnnnnnnnnnnnnnnnnnnnnnnnnnnnnnnnnnnnnnnnnnnnnnnnnnnnnnnnnnnnnnnnnnnnnnnnnnnnnnnnnnnnnnnnnnnnnnnnnnnnnnnnnnnnnnnnnnnnnnnnnnnnnnnnnnnnnnnnnnnnnnnnnnnnnnnnnnnnnnnnnnnnnnnnnnnnnnnnnnnnnnnnnnnnnnnnnnnnnnnnnnnnnnnnnnnnnnnnnnnnnnnnnnnnnnnnnnnnnnnnnnnnnnnnnnnnnnnnnnnnnnnnnnnnnnnnnnnnnnnnnnnnnnnnnnnnnnnnnnnnnnnnnnnnnnnnnnnnnnnnnnnnnnnnnnnnnnnnnnnnnnnnnnnnnnnnnnnnnnnnnnnnnnnnnnnnnnnnnnnnnnnnnnnnnnnnnnnnnnnnnnnnnnnnnnnnnnnnnnnnnnnnnnnnnnnnnnnnnnnnnnnnnnnnnnnnnnnnnnnnnnnnnnnnnnnnnnnnnnnnnnnnnnnnnnnnnnnnnnnnnnnnnnnnnnnnnnnnnnnnnnnnnnnnnnnnnnnnnnnnnnnnnnnnnnnnnnnnnnnnnnnnnnnnnnnnnnnnnnnnnnnnnnnnnnnnnnnnnnnnnnnnnnnnnnnnnnnnnnnnnnnnnnnnnnnnnnnnnnnnnnnnnnnnnnnnnnnnnnnnnnnnnnnnnnnnnnnnnnnnnnnnnnnnnnnnnnnnnnnnnnnnnnnnnnnnnnnnnnnnnnnnnnnnnnnnnnnnnnnnnnnnnnnnnnnnnnnnnnnnnnnnnnnnnnnnnnnnnnnnnnnnnnnnnnnnnnnnnnnnnnnnnnnnnnnnnnnnnnnnnnnnnnnnnnnnnnnnnnnnnnnnnnnnnnnnnnnnnnnnnnnnnnnnnnnnnnnnnnnnnnnnnnnnnnnnnnnnnnnnnnnnnnnnnnnnnnnnnnnnnnnnnnnnnnnnnnnnnnnnnnnnnnnnnnnnnnnnnnnnnnnnnnnnnnnnnnnnnnnnnnnnnnnnnnnnnnnnnnnnnnnnnnnnnnnnnnnnnnnnnnnnnnnnnnnnnnnnnnnnnnnnnnnnnnnnnnnnnnnnnnnnnnnnnnnnnnnnnnnnnnnnnnnnnnnnnnnnnnnnnnnnnnnnnnnnnnnnnnnnnnnnnnnnnnnnnnnnnnnnnnnnnnnnnnnnnnnnnnnnnnnnnnnnnnnnnnnnnnnnnnnnnnnnnnnnnnnnnnnnnnnnnnnnnnnnnnnnnnnnnnnnnnnnnnnnnnnnnnnnnnnnnnnnnnnnnnnnnnnnnnnnnnnnnnnnnnnnnnnnnnnnnnnnnnnnnnnnnnnnnnnnnnnnnnnnnnnnnnnnnnnnnnnnnnnnnnnnnnnnnnnnnnnnnnnnnnnnnnnnnnnnnnnnnnnnnnnnnnnnnnnnnnnnnnnnnnnnnnnnnnnnnnnnnnnnnnnnnnnnnnnnnnnnnnnnnnnnnnnnnnnnnnnnnnnnnnnnnnnnnnnnnnnnnnnnnnnnnnnnnnnnnnnnnnnnnnnnnnnnnnnnnnnnnnnnnnnnnnnnnnnnnnnnnnnnnnnnnnnnnnnnnnnnnnnnnnnnnnnnnnnnnnnnnnnnnnnnnnnnnnnnnnnnnnnnnnnnnnnnnnnnnnnnnnnnnnnnnnnnnnnnnnnnnnnnnnnnnnnnnnnnnnnnnnnnnnnnnnnnnnnnnnnnnnnnnnnnnnnnnnnnnnnnnnnnnnnnnnnnnnnnnnnnnnnnnnnnnnnnnnnnnnnnnnnnnnnnnnnnnnnnnnnnnnnnnnnnnnnnnnnnnnnnnnnnnnnnnnnnnnnnnnnnnnnnnnnnnnnnnnnnnnnnnnnnnnnnnnnnnnnnnnnnnnnnnnnnnnnnnnnnnnnnnnnnnnnnnnnnnnnnnnnnnnnnnnnnnnnnnnnnnnnnnnnnnnnnnnnnnnnnnnnnnnnnnnnnnnnnnnnnnnnnnnnnnnnnnnnnnnnnnnnnnnnnnnnnnnnnnnnnnnnnnnnnnnnnnnnnnnnnnnnnnnnnnnnnnnnnnnnnnnnnnnnnnnnnnnnnnnnnnnnnnnnnnnnnnnnnnnnnnnnnnnnnnnnnnnnnnnnnnnnnnnnnnnnnnnnnnnnnnnnnnnnnnnnnnnnnnnnnnnnnnnnnnnnnnnnnnnnnnnnnnnnnnnnnnnnnnnnnnnnnnnnnnnnnnnnnnnnnnnnnnnnnnnnnnnnnnnnnnnnnnnnnnnnnnnnnnnnnnnnnnnnnnnnnnnnnnnnnnnnnnnnnnnnnnnnnnnnnnnnnnnnnnnnnnnnnnnnnnnnnnnnnnnnnnnnnnnnnnnnnnnnnnnnnnnnnnnnnnnnnnnnnnnnnnnnnnnnnnnnnnnnnnnnnnnnnnnnnnnnnnnnnnnnnnnnnnnnnnnnnnnnnnnnnnnnnnnnnnnnnnnnnnnnnnnnnnnnnnnnnnnnnnnnnnnnnnnnnnnnnnnnnnnnnnnnnnnnnnnnnnnnnnnnnnnnnnnnnnnnnnnnnnnnnnnnnnnnnnnnnnnnnnnnnnnnnnnnnnnnnnnnnnnnnnnnnnnnnnnnnnnnnnnnnnnnnnnnnnnnnnnnnnnnnnnnnnnnnnnnnnnnnnnnnnnnnnnnnnnnnnnnnnnnnnnnnnnnnnnnnnnnnnnnnnnnnnnnnnnnnnnnnnnnnnnnnnnnnnnnnnnnnnnnnnnnnnnnnnnnnnnnnnnnnnnnnnnnnnnnnnnnnnnnnnnnnnnnnnnnnnnnnnnnnnnnnnnnnnnnnnnnnnnnnnnnnnnnnnnnnnnnnnnnnnnnnnnnnnnnnnnnnnnnnnnnnnnnnnnnnnnnnnnnnnnnnnnnnnnnnnnnnnnnnnnnnnnnnnnnnnnnnnnnnnnnnnnnnnnnnnnnnnnnnnnnnnnnnnnnnnnnnnnnnnnnnnnnnnnnnnnnnnnnnnnnnnnnnnnnnnnnnnnnnnnnnnnnnnnnnnnnnnnnnnnnnnnnnnnnnnnnnnnnnnnnnnnnnnnnnnnnnnnnnnnnnnnnnnnnnnnnnnnnnnnnnnnnnnnnnnnnnnnnnnnnnnnnnnnnnnnnnnnnnnnnnnnnnnnnnnnnnnnnnnnnnnnnnnnnnnnnnnnnnnnnnnnnnnnnnnnnnnnnnnnnnnnnnnnnnnnnnnnnnnnnnnnnnnnnnnnnnnnnnnnnnnnnnnnnnnnnnnnnnnnnnnnnnnnnnnnnnnnnnnnnnnnnnnnnnnnnnnnnnnnnnnnnnnnnnnnnnnnnnnnnnnnnnnnnnnnnnnnnnnnnnnnnnnnnnnnnnnnnnnnnnnnnnnnnnnnnnnnnnnnnnnnnnnnnnnnnnnnnnnnnnnnnnnnnnnnnnnnnnnnnnnnnnnnnnnnnnnnnnnnnnnnnnnnnnnnnnnnnnnnnnnnnnnnnnnnnnnnnnnnnnnnnnnnnnnnnnnnnnnnnnnnnnnnnnnnnnnnnnnnnnnnnnnnnnnnnnnnnnnnnnnnnnnnnnnnnnnnnnnnnnnnnnnnnnnnnnnnnnnnnnnnnnnnnnnnnnnnnnnnnnnnnnnnnnnnnnnnnnnnnnnnnnnnnnnnnnnnnnnnnnnnnnnnnnnnnnnnnnnnnnnnnnnnnnnnnnnnnnnnnnnnnnnnnnnnnnnnnnnnnnnnnnnnnnnnnnnnnnnnnnnnnnnnnnnnnnnnnnnnnnnnnnnnnnnnnnnnnnnnnnnnnnnnnnnnnnnnnnnnnnnnnnnnnnnnnnnnnnnnnnnnnnnnnnnnnnnnnnnnnnnnnnnnnnnnnnnnnnnnnnnnnnnnnnnnnnnnnnnnnnnnnnnnnnnnnnnnnnnnnnnnnnnnnnnnnnnnnnnnnnnnnnnnnnnnnnnnnnnnnnnnnnnnnnnnnnnnnnnnnnnnnnnnnnnnnnnnnnnnnnnnnnnnnnnnnnnnnnnnnnnnnnnnnnnnnnnnnnnnnnnnnnnnnnnnnnnnnnnnnnnnnnnnnnnnnnnnnnnnnnnnnnnnnnnnnnnnnnnnnnnnnnnnnnnnnnnnnnnnnnnnnnnnnnnnnnnnnnnnnnnnnnnnnnnnnnnnnnnnnnnnnnnnnnnnnnnnnnnnnnnnnnnnnnnnnnnnnnnnnnnnnnnnnnnnnnnnnnnnnnnnnnnnnnnnnnnnnnnnnnnnnnnnnnnnnnnnnnnnnnnnnnnnnnnnnnnnnnnnnnnnnnnnnnnnnnnnnnnnnnnnnnnnnnnnnnnnnnnnnnnnnnnnnnnnnnnnnnnnnnnnnnnnnnnnnnnnnnnnnnnnnnnnnnnnnnnnnnnnnnnnnnnnnnnnnnnnnnnnnnnnnnnnnnnnnnnnnnnnnnnnnnnnnnnnnnnnnnnnnnnnnnnnnnnnnnnnnnnnnnnnnnnnnnnnnnnnnnnnnnnnnnnnnnnnnnnnnnnnnnnnnnnnnnnnnnnnnnnnnnnnnnnnnnnnnnnnnnnnnnnnnnnnnnnnnnnnnnnnnnnnnnnnnnnnnnnnnnnnnnnnnnnnnnnnnnnnnnnnnnnnnnnnnnnnnnnnnnnnnnnnnnnnnnnnnnnnnnnnnnnnnnnnnnnnnnnnnnnnnnnnnnnnnnnnnnnnnnnnnnnnnnnnnnnnnnnnnnnnnnnnnnnnnnnnnnnnnnnnnnnnnnnnnnnnnnnnnnnnnnnnnnnnnnnnnnnnnnnnnnnnnnnnnnnnnnnnnnnnnnnnnnnnnnnnnnnnnnnnnnnnnnnnnnnnnnnnnnnnnnnnnnnnnnnnnnnnnnnnnnnnnnnnnnnnnnnnnnnnnnnnnnnnnnnnnnnnnnnnnnnnnnnnnnnnnnnnnnnnnnnnnnnnnnnnnnnnnnnnnnnnnnnnnnnnnnnnnnnnnnnnnnnnnnnnnnnnnnnnnnnnnnnnnnnnnnnnnnnnnnnnnnnnnnnnnnnnnnnnnnnnnnnnnnnnnnnnnnnnnnnnnnnnnnnnnnnnnnnnnnnnnnnnnnnnnnnnnnnnnnnnnnnnnnnnnnnnnnnnnnnnnnnnnnnnnnnnnnnnnnnnnnnnnnnnnnnnnnnnnnnnnnnnnnnnnnnnnnnnnnnnnnnnnnnnnnnnnnnnnnnnnnnnnnnnnnnnnnnnnnnnnnnnnnnnnnnnnnnnnnnnnnnnnnnnnnnnnnnnnnnnnnnnnnnnnnnnnnnnnnnnnnnnnnnnnnnnnnnnnnnnnnnnnnnnnnnnnnnnnnnnnnnnnnnnnnnnnnnnnnnnnnnnnnnnnnnnnnnnnnnnnnnnnnnnnnnnnnnnnnnnnnnnnnnnnnnnnnnnnnnnnnnnnnnnnnnnnnnnnnnnnnnnnnnnnnnnnnnnnnnnnnnnnnnnnnnnnnnnnnnnnnnnnnnnnnnnnnnnnnnnnnnnnnnnnnnnnnnnnnnnnnnnnnnnnnnnnnnnnnnnnnnnnnnnnnnnnnnnnnnnnnnnnnnnnnnnnnnnnnnnnnnnnnnnnnnnnnnnnnnnnnnnnnnnnnnnnnnnnnnnnnnnnnnnnnnnnnnnnnnnnnnnnnnnnnnnnnnnnnnnnnnnnnnnnnnnnnnnnnnnnnnnnnnnnnnnnnnnnnnnnnnnnnnnnnnnnnnnnnnnnnnnnnnnnnnnnnnnnnnnnnnnnnnnnnnnnnnnnnnnnnnnnnnnnnnnnnnnnnnnnnnnnnnnnnnnnnnnnnnnnnnnnnnnnnnnnnnnnnnnnnnnnnnnnnnnnnnnnnnnnnnnnnnnnnnnnnnnnnnnnnnnnnnnnnnnnnnnnnnnnnnnnnnnnnnnnnnnnnnnnnnnnnnnnnnnnnnnnnnnnnnnnnnnnnnnnnnnnnnnnnnnnnnnnnnnnnnnnnnnnnnnnnnnnnnnnnnnnnnnnnnnnnnnnnnnnnnnnnnnnnnnnnnnnnnnnnnnnnnnnnnnnnnnnnnnnnnnnnnnnnnnnnnnnnnnnnnnnnnnnnnnnnnnnnnnnnnnnnnnnnnnnnnnnnnnnnnnnnnnnnnnnnnnnnnnnnnnnnnnnnnnnnnnnnnnnnnnnnnnnnnnnnnnnnnnnnnnnnnnnnnnnnnnnnnnnnnnnnnnnnnnnnnnnnnnnnnnnnnnnnnnnnnnnnnnnnnnnnnnnnnnnnnnnnnnnnnnnnnnnnnnnnnnnnnnnnnnnnnnnnnnnnnnnnnnnnnnnnnnnnnnnnnnnnnnnnnnnnnnnnnnnnnnnnnnnnnnnnnnnnnnnnnnnnnnnnnnnnnnnnnnnnnnnnnnnnnnnnnnnnnnnnnnnnnnnnnnnnnnnnnnnnnnnnnnnnnnnnnnnnnnnnnnnnnnnnnnnnnnnnnnnnnnnnnnnnnnnnnnnnnnnnnnnnnnnnnnnnnnnnnnnnnnnnnnnnnnnnnnnnnnnnnnnnnnnnnnnnnnnnnnnnnnnnnnnnnnnnnnnnnnnnnnnnnnnnnnnnnnnnnnnnnnnnnnnnnnnnnnnnnnnnnnnnnnnnnnnnnnnnnnnnnnnnnnnnnnnnnnnnnnnnnnnnnnnnnnnnnnnnnnnnnnnnnnnnnnnnnnnnnnnnnnnnnnnnnnnnnnnnnnnnnnnnnnnnnnnnnnnnnnnnnnnnnnnnnnnnnnnnnnnnnnnnnnnnnnnnnnnnnnnnnnnnnnnnnnnnnnnnnnnnnnnnnnnnnnnnnnnnnnnnnnnnnnnnnnnnnnnnnnnnnnnnnnnnnnnnnnnnnnnnnnnnnnnnnnnnnnnnnnnnnnnnnnnnnnnnnnnnnnnnnnnnnnnnnnnnnnnnnnnnnnnnnnnnnnnnnnnnnnnnnnnnnnnnnnnnnnnnnnnnnnnnnnnnnnnnnnnnnnnnnnnnnnnnnnnnnnnnnnnnnnnnnnnnnnnnnnnnnnnnnnnnnnnnnnnnnnnnnnnnnnnnnnnnnnnnnnnnnnnnnnnnnnnnnnnnnnnnnnnnnnnnnnnnnnnnnnnnnnnnnnnnnnnnnnnnnnnnnnnnnnnnnnnnnnnnnnnnnnnnnnnnnnnnnnnnnnnnnnnnnnnnnnnnnnnnnnnnnnnnnnnnnnnnnnnnnnnnnnnnnnnnnnnnnnnnnnnnnnnnnnnnnnnnnnnnnnnnnnnnnnnnnnnnnnnnnnnnnnnnnnnnnnnnnnnnnnnnnnnnnnnnnnnnnnnnnnnnnnnnnnnnnnnnnnnnnnnnnnnnnnnnnnnnnnnnnnnnnnnnnnnnnnnnnnnnnnnnnnnnnnnnnnnnnnnnnnnnnnnnnnnnnnnnnnnnnnnnnnnnnnnnnnnnnnnnnnnnnnnnnnnnnnnnnnnnnnnnnnnnnnnnnnnnnnnnnnnnnnnnnnnnnnnnnnnnnnnnnnnnnnnnnnnnnnnnnnnnnnnnnnnnnnnnnnnnnnnnnnnnnnnnnnnnnnnnnnnnnnnnnnnnnnnnnnnnnnnnnnnnnnnnnnnnnnnnnnnnnnnnnnnnnnnnnnnnnnnnnnnnnnnnnnnnnnnnnnnnnnnnnnnnnnnnnnnnnnnnnnnnnnnnnnnnnnnnnnnnnnnnnnnnnnnnnnnnnnnnnnnnnnnnnnnnnnnnnnnnnnnnnnnnnnnnnnnnnnnnnnnnnnnnnnnnnnnnnnnnnnnnnnnnnnnnnnnnnnnnnnnnnnnnnnnnnnnnnnnnnnnnnnnnnnnnnnnnnnnnnnnnnnnnnnnnnnnnnnnnnnnnnnnnnnnnnnnnnnnnnnnnnnnnnnnnnnnnnnnnnnnnnnnnnnnnnnnnnnnnnnnnnnnnnnnnnnnnnnnnnnnnnnnnnnnnnnnnnnnnnnnnnnnnnnnnnnnnnnnnnnnnnnnnnnnnnnnnnnnnnnnnnnnnnnnnnnnnnnnnnnnnnnnnnnnnnnnnnnnnnnnnnnnnnnnnnnnnnnnnnnnnnnnnnnnnnnnnnnnnnnnnnnnnnnnnnnnnnnnnnnnnnnnnnnnnnnnnnnnnnnnnnnnnnnnnnnnnnnnnnnnnnnnnnnnnnnnnnnnnnnnnnnnnnnnnnnnnnnnnnnnnnnnnnnnnnnnnnnnnnnnnnnnnnnnnnnnnnnnnnnnnnnnnnnnnnnnnnnnnnnnnnnnnnnnnnnnnnnnnnnnnnnnnnnnnnnnnnnnnnnnnnnnnnnnnnnnnnnnnnnnnnnnnnnnnnnnnnnnnnnnnnnnnnnnnnnnnnnnnnnnnnnnnnnnnnnnnnnnnnnnnnnnnnnnnnnnnnnnnnnnnnnnnnnnnnnnnnnnnnnnnnnnnnnnnnnnnnnnnnnnnnnnnnnnnnnnnnnnnnnnnnnnnnnnnnnnnnnnnnnnnnnnnnnnnnnnnnnnnnnnnnnnnnnnnnnnnnnnnnnnnnnnnnnnnnnnnnnnnnnnnnnnnnnnnnnnnnnnnnnnnnnnnnnnnnnnnnnnnnnnnnnnnnnnnnnnnnnnnnnnnnnnnnnnnnnnnnnnnnnnnnnnnnnnnnnnnnnnnnnnnnnnnnnnnnnnnnnnnnnnnnnnnnnnnnnnnnnnnnnnnnnnnnnnnnnnnnnnnnnnnnnnnnnnnnnnnnnnnnnnnnnnnnnnnnnnnnnnnnnnnnnnnnnnnnnnnnnnnnnnnnnnnnnnnnnnnnnnnnnnnnnnnnnnnnnnnnnnnnnnnnnnnnnnnnnnnnnnnnnnnnnnnnnnnnnnnnnnnnnnnnnnnnnnnnnnnnnnnnnnnnnnnnnnnnnnnnnnnnnnnnnnnnnnnnnnnnnnnnnnnnnnnnnnnnnnnnnnnnnnnnnnnnnnnnnnnnnnnnnnnnnnnnnnnnnnnnnnnnnnnnnnnnnnnnnnnnnnnnnnnnnnnnnnnnnnnnnnnnnnnnnnnnnnnnnnnnnnnnnnnnnnnnnnnnnnnnnnnnnnnnnnnnnnnnnnnnnnnnnnnnnnnnnnnnnnnnnnnnnnnnnnnnnnnnnnnnnnnnnnnnnnnnnnnnnnnnnnnnnnnnnnnnnnnnnnnnnnnnnnnnnnnnnnnnnnnnnnnnnnnnnnnnnnnnnnnnnnnnnnnnnnnnnnnnnnnnnnnnnnnnnnnnnnnnnnnnnnnnnnnnnnnnnnnnnnnnnnnnnnnnnnnnnnnnnnnnnnnnnnnnnnnnnnnnnnnnnnnnnnnnnnnnnnnnnnnnnnnnnnnnnnnnnnnnnnnnnnnnnnnnnnnnnnnnnnnnnnnnnnnnnnnnnnnnnnnnnnnnnnnnnnnnnnnnnnnnnnnnnnnnnnnnnnnnnnnnnnnnnnnnnnnnnnnnnnnnnnnnnnnnnnnnnnnnnnnnnnnnnnnnnnnnnnnnnnnnnnnnnnnnnnnnnnnnnnnnnnnnnnnnnnnnnnnnnnnnnnnnnnnnnnnnnnnnnnnnnnnnnnnnnnnnnnnnnnnnnnnnnnnnnnnnnnnnnnnnnnnnnnnnnnnnnnnnnnnnnnnnnnnnnnnnnnnnnnnnnnnnnnnnnnnnnnnnnnnnnnnnnnnnnnnnnnnnnnnnnnnnnnnnnnnnnnnnnnnnnnnnnnnnnnnnnnnnnnnnnnnnnnnnnnnnnnnnnnnnnnnnnnnnnnnnnnnnnnnnnnnnnnnnnnnnnnnnnnnnnnnnnnnnnnnnnnnnnnnnnnnnnnnnnnnnnnnnnnnnnnnnnnnnnnnnnnnnnnnnnnnnnnnnnnnnnnnnnnnnnnnnnnnnnnnnnnnnnnnnnnnnnnnnnnnnnnnnnnnnnnnnnnnnnnnnnnnnnnnnnnnnnnnnnnnnnnnnnnnnnnnnnnnnnnnnnnnnnnnnnnnnnnnnnnnnnnnnnnnnnnnnnnnnnnnnnnnnnnnnnnnnnnnnnnnnnnnnnnnnnnnnnnnnnnnnnnnnnnnnnnnnnnnnnnnnnnnnnnnnnnnnnnnnnnnnnnnnnnnnnnnnnnnnnnnnnnnnnnnnnnnnnnnnnnnnnnnnnnnnnnnnnnnnnnnnnnnnnnnnnnnnnnnnnnnnnnnnnnnnnnnnnnnnnnnnnnnnnnnnnnnnnnnnnnnnnnnnnnnnnnnnnnnnnnnnnnnnnnnnnnnnnnnnnnnnnnnnnnnnnnnnnnnnnnnnnnnnnnnnnnnnnnnnnnnnnnnnnnnnnnnnnnnnnnnnnnnnnnnnnnnnnnnnnnnnnnnnnnnnnnnnnnnnnnnnnnnnnnnnnnnnnnnnnnnnnnnnnnnnnnnnnnnnnnnnnnnnnnnnnnnnnnnnnnnnnnnnnnnnnnnnnnnnnnnnnnnnnnnnnnnnnnnnnnnnnnnnnnnnnnnnnnnnnnnnnnnnnnnnnnnnnnnnnnnnnnnnnnnnnnnnnnnnnnnnnnnnnnnnnnnnnnnnnnnnnnnnnnnnnnnnnnnnnnnnnnnnnnnnnnnnnnnnnnnnnnnnnnnnnnnnnnnnnnnnnnnnnnnnnnnnnnnnnnnnnnnnnnnnnnnnnnnnnnnnnnnnnnnnnnnnnnnnnnnnnnnnnnnnnnnnnnnnnnnnnnnnnnnnnnnnnnnnnnnnnnnnnnnnnnnnnnnnnnnnnnnnnnnnnnnnnnnnnnnnnnnnnnnnnnnnnnnnnnnnnnnnnnnnnnnnnnnnnnnnnnnnnnnnnnnnnnnnnnnnnnnnnnnnnnnnnnnnnnnnnnnnnnnnnnnnnnnnnnnnnnnnnnnnnnnnnnnnnnnnnnnnnnnnnnnnnnnnnnnnnnnnnnnnnnnnnnnnnnnnnnnnnnnnnnnnnnnnnnnnnnnnnnnnnnnnnnnnnnnnnnnnnnnnnnnnnnnnnnnnnnnnnnnnnnnnnnnnnnnnnnnnnnnnnnnnnnnnnnnnnnnnnnnnnnnnnnnnnnnnnnnnnnnnnnnnnnnnnnnnnnnnnnnnnnnnnnnnnnnnnnnnnnnnnnnnnnnnnnnnnnnnnnnnnnnnnnnnnnnnnnnnnnnnnnnnnnnnnnnnnnnnnnnnnnnnnnnnnnnnnnnnnnnnnnnnnnnnnnnnnnnnnnnnnnnnnnnnnnnnnnnnnnnnnnnnnnnnnnnnnnnnnnnnnnnnnnnnnnnnnnnnnnnnnnnnnnnnnnnnnnnnnnnnnnnnnnnnnnnnnnnnnnnnnnnnnnnnnnnnnnnnnnnnnnnnnnnnnnnnnnnnnnnnnnnnnnnnnnnnnnnnnnnnnnnnnnnnnnnnnnnnnnnnnnnnnnnnnnnnnnnnnnnnnnnnnnnnnnnnnnnnnnnnnnnnnnnnnnnnnnnnnnnnnnnnnnnnnnnnnnnnnnnnnnnnnnnnnnnnnnnnnnnnnnnnnnnnnnnnnnnnnnnnnnnnnnnnnnnnnnnnnnnnnnnnnnnnnnnnnnnnnnnnnnnnnnnnnnnnnnnnnnnnnnnnnnnnnnnnnnnnnnnnnnnnnnnnnnnnnnnnnnnnnnnnnnnnnnnnnnnnnnnnnnnnnnnnnnnnnnnnnnnnnnnnnnnnnnnnnnnnnnnnnnnnnnnnnnnnnnnnnnnnnnnnnnnnnnnnnnnnnnnnnnnnnnnnnnnnnnnnnnnnnnnnnnnnnnnnnnnnnnnnnnnnnnnnnnnnnnnnnnnnnnnnnnnnnnnnnnnnnnnnnnnnnnnnnnnnnnnnnnnnnnnnnnnnnnnnnnnnnnnnnnnnnnnnnnnnnnnnnnnnnnnnnnnnnnnnnnnnnnnnnnnnnnnnnnnnnnnnnnnnnnnnnnnnnnnnnnnnnnnnnnnnnnnnnnnnnnnnnnnnnnnnnnnnnnnnnnnnnnnnnnnnnnnnnnnnnnnnnnnnnnnnnnnnnnnnnnnnnnnnnnnnnnnnnnnnnnnnnnnnnnnnnnnnnnnnnnnnnnnnnnnnnnnnnnnnnnnnnnnnnnnnnnnnnnnnnnnnnnnnnnnnnnnnnnnnnnnnnnnnnnnnnnnnnnnnnnnnnnnnnnnnnnnnnnnnnnnnnnnnnnnnnnnnnnnnnnnnnnnnnnnnnnnnnnnnnnnnnnnnnnnnnnnnnnnnnnnnnnnnnnnnnnnnnnnnnnnnnnnnnnnnnnnnnnnnnnnnnnnnnnnnnnnnnnnnnnnnnnnnnnnnnnnnnnnnnnnnnnnnnnnnnnnnnnnnnnnnnnnnnnnnnnnnnnnnnnnnnnnnnnnnnnnnnnnnnnnnnnnnnnnnnnnnnnnnnnnnnnnnnnnnnnnnnnnnnnnnnnnnnnnnnnnnnnnnnnnnnnnnnnnnnnnnnnnnnnnnnnnnnnnnnnnnnnnnnnnnnnnnnnnnnnnnnnnnnnnnnnnnnnnnnnnnnnnnnnnnnnnnnnnnnnnnnnnnnnnnnnnnnnnnnnnnnnnnnnnnnnnnnnnnnnnnnnnnnnnnnnnnnnnnnnnnnnnnnnnnnnnnnnnnnnnnnnnnnnnnnnnnnnnnnnnnnnnnnnnnnnnnnnnnnnnnnnnnnnnnnnnnnnnnnnnnnnnnnnnnnnnnnnnnnnnnnnnnnnnnnnnnnnnnnnnnnnnnnnnnnnnnnnnnnnnnnnnnnnnnnnnnnnnnnnnnnnnnnnnnnnnnnnnnnnnnnnnnnnnnnnnnnnnnnnnnnnnnnnnnnnnnnnnnnnnnnnnnnnnnnnnnnnnnnnnnnnnnnnnnnnnnnnnnnnnnnnnnnnnnnnnnnnnnnnnnnnnnnnnnnnnnnnnnnnnnnnnnnnnnnnnnnnnnnnnnnnnnnnnnnnnnnnnnnnnnnnnnnnnnnnnnnnnnnnnnnnnnnnnnnnnnnnnnnnnnnnnnnnnnnnnnnnnnnnnnnnnnnnnnnnnnnnnnnnnnnnnnnnnnnnnnnnnnnnnnnnnnnnnnnnnnnnnnnnnnnnnnnnnnnnnnnnnnnnnnnnnnnnnnnnnnnnnnnnnnnnnnnnnnnnnnnnnnnnnnnnnnnnnnnnnnnnnnnnnnnnnnnnnnnnnnnnnnnnnnnnnnnnnnnnnnnnnnnnnnnnnnnnnnnnnnnnnnnnnnnnnnnnnnnnnnnnnnnnnnnnnnnnnnnnnnnnnnnnnnnnnnnnnnnnnnnnnnnnnnnnnnnnnnnnnnnnnnnnnnnnnnnnnnnnnnnnnnnnnnnnnnnnnnnnnnnnnnnnnnnnnnnnnnnnnnnnnnnnnnnnnnnnnnnnnnnnnnnnnnnnnnnnnnnnnnnnnnnnnnnnnnnnnnnnnnnnnnnnnnnnnnnnnnnnnnnnnnnnnnnnnnnnnnnnnnnnnnnnnnnnnnnnnnnnnnnnnnnnnnnnnnnnnnnnnnnnnnnnnnnnnnnnnnnnnnnnnnnnnnnnnnnnnnnnnnnnnnnnnnnnnnnnnnnnnnnnnnnnnnnnnnnnnnnnnnnnnnnnnnnnnnnnnnnnnnnnnnnnnnnnnnnnnnnnnnnnnnnnnnnnnnnnnnnnnnnnnnnnnnnnnnnnnnnnnnnnnnnnnnnnnnnnnnnnnnnnnnnnnnnnnnnnnnnnnnnnnnnnnnnnnnnnnnnnnnnnnnnnnnnnnnnnnnnnnnnnnnnnnnnnnnnnnnnnnnnnnnnnnnnnnnnnnnnnnnnnnnnnnnnnnnnnnnnnnnnnnnnnnnnnnnnnnnnnnnnnnnnnnnnnnnnnnnnnnnnnnnnnnnnnnnnnnnnnnnnnnnnnnnnnnnnnnnnnnnnnnnnnnnnnnnnnnnnnnnnnnnnnnnnnnnnnnnnnnnnnnnnnnnnnnnnnnnnnnnnnnnnnnnnnnnnnnnnnnnnnnnnnnnnnnnnnnnnnnnnnnnnnnnnnnnnnnnnnnnnnnnnnnnnnnnnnnnnnnnnnnnnnnnnnnnnnnnnnnnnnnnnnnnnnnnnnnnnnnnnnnnnnnnnnnnnnnnnnnnnnnnnnnnnnnnnnnnnnnnnnnnnnnnnnnnnnnnnnnnnnnnnnnnnnnnnnnnnnnnnnnnnnnnnnnnnnnnnnnnnnnnnnnnnnnnnnnnnnnnnnnnnnnnnnnnnnnnnnnnnnnnnnnnnnnnnnnnnnnnnnnnnnnnnnnnnnnnnnnnnnnnnnnnnnnnnnnnnnnnnnnnnnnnnnnnnnnnnnnnnnnnnnnnnnnnnnnnnnnnnnnnnnnnnnnnnnnnnnnnnnnnnnnnnnnnnnnnnnnnnnnnnnnnnnnnnnnnnnnnnnnnnnnnnnnnnnnnnnnnnnnnnnnnnnnnnnnnnnnnnnnnnnnnnnnnnnnnnnnnnnnnnnnnnnnnnnnnnnnnnnnnnnnnnnnnnnnnnnnnnnnnnnnnnnnnnnnnnnnnnnnnnnnnnnnnnnnnnnnnnnnnnnnnnnnnnnnnnnnnnnnnnnnnnnnnnnnnnnnnnnnnnnnnnnnnnnnnnnnnnnnnnnnnnnnnnnnnnnnnnnnnnnnnnnnnnnnnnnnnnnnnnnnnnnnnnnnnnnnnnnnnnnnnnnnnnnnnnnnnnnnnnnnnnnnnnnnnnnnnnnnnnnnnnnnnnnnnnnnnnnnnnnnnnnnnnnnnnnnnnnnnnnnnnnnnnnnnnnnnnnnnnnnnnnnnnnnnnnnnnnnnnnnnnnnnnnnnnnnnnnnnnnnnnnnnnnnnnnnnnnnnnnnnnnnnnnnnnnnnnnnnnnnnnnnnnnnnnnnnnnnnnnnnnnnnnnnnnnnnnnnnnnnnnnnnnnnnnnnnnnnnnnnnnnnnnnnnnnnnnnnnnnnnnnnnnnnnnnnnnnnnnnnnnnnnnnnnnnnnnnnnnnnnnnnnnnnnnnnnnnnnnnnnnnnnnnnnnnnnnnnnnnnnnnnnnnnnnnnnnnnnnnnnnnnnnnnnnnnnnnnnnnnnnnnnnnnnnnnnnnnnnnnnnnnnnnnnnnnnnnnnnnnnnnnnnnnnnnnnnnnnnnnnnnnnnnnnnnnnnnnnnnnnnnnnnnnnnnnnnnnnnnnnnnnnnnnnnnnnnnnnnnnnnnnnnnnnnnnnnnnnnnnnnnnnnnnnnnnnnnnnnnnnnnnnnnnnnnnnnnnnnnnnnnnnnnnnnnnnnnnnnnnnnnnnnnnnnnnnnnnnnnnnnnnnnnnnnnnnnnnnnnnnnnnnnnnnnnnnnnnnnnnnnnnnnnnnnnnnnnnnnnnnnnnnnnnnnnnnnnnnnnnnnnnnnnnnnnnnnnnnnnnnnnnnnnnnnnnnnnnnnnnnnnnnnnnnnnnnnnnnnnnnnnnnnnnnnnnnnnnnnnnnnnnnnnnnnnnnnnnnnnnnnnnnnnnnnnnnnnnnnnnnnnnnnnnnnnnnnnnnnnnnnnnnnnnnnnnnnnnnnnnnnnnnnnnnnnnnnnnnnnnnnnnnnnnnnnnnnnnnnnnnnnnnnnnnnnnnnnnnnnnnnnnnnnnnnnnnnnnnnnnnnnnnnnnnnnnnnnnnnnnnnnnnnnnnnnnnnnnnnnnnnnnnnnnnnnnnnnnnnnnnnnnnnnnnnnnnnnnnnnnnnnnnnnnnnnnnnnnnnnnnnnnnnnnnnnnnnnnnnnnnnnnnnnnnnnnnnnnnnnnnnnnnnnnnnnnnnnnnnnnnnnnnnnnnnnnnnnnnnnnnnnnnnnnnnnnnnnnnnnnnnnnnnnnnnnnnnnnnnnnnnnnnnnnnnnnnnnnnnnnnnnnnnnnnnnnnnnnnnnnnnnnnnnnnnnnnnnnnnnnnnnnnnnnnnnnnnnnnnnnnnnnnnnnnnnnnnnnnnnnnnnnnnnnnnnnnnnnnnnnnnnnnnnnnnnnnnnnnnnnnnnnnnnnnnnnnnnnnnnnnnnnnnnnnnnnnnnnnnnnnnnnnnnnnnnnnnnnnnnnnnnnnnnnnnnnnnnnnnnnnnnnnnnnnnnnnnnnnnnnnnnnnnnnnnnnnnnnnnnnnnnnnnnnnnnnnnnnnnnnnnnnnnnnnnnnnnnnnnnnnnnnnnnnnnnnnnnnnnnnnnnnnnnnnnnnnnnnnnnnnnnnnnnnnnnnnnnnnnnnnnnnnnnnnnnnnnnnnnnnnnnnnnnnnnnnnnnnnnnnnnnnnnnnnnnnnnnnnnnnnnnnnnnnnnnnnnnnnnnnnnnnnnnnnnnnnnnnnnnnnnnnnnnnnnnnnnnnnnnnnnnnnnnnnnnnnnnnnnnnnnnnnnnnnnnnnnnnnnnnnnnnnnnnnnnnnnnnnnnnnnnnnnnnnnnnnnnnnnnnnnnnnnnnnnnnnnnnnnnnnnnnnnnnnnnnnnnnnnnnnnnnnnnnnnnnnnnnnnnnnnnnnnnnnnnnnnnnnnnnnnnnnnnnnnnnnnnnnnnnnnnnnnnnnnnnnnnnnnnnnnnnnnnnnnnnnnnnnnnnnnnnnnnnnnnnnnnnnnnnnnnnnnnnnnnnnnnnnnnnnnnnnnnnnnnnnnnnnnnnnnnnnnnnnnnnnnnnnnnnnnnnnnnnnnnnnnnnnnnnnnnnnnnnnnnnnnnnnnnnnnnnnnnnnnnnnnnnnnnnnnnnnnnnnnnnnnnnnnnnnnnnnnnnnnnnnnnnnnnnnnnnnnnnnnnnnnnnnnnnnnnnnnnnnnnnnnnnnnnnnnnnnnnnnnnnnnnnnnnnnnnnnnnnnnnnnnnnnnnnnnnnnnnnnnnnnnnnnnnnnnnnnnnnnnnnnnnnnnnnnnnnnnnnnnnnnnnnnnnnnnnnnnnnnnnnnnnnnnnnnnnnnnnnnnnnnnnnnnnnnnnnnnnnnnnnnnnnnnnnnnnnnnnnnnnnnnnnnnnnnnnnnnnnnnnnnnnnnnnnnnnnnnnnnnnnnnnnnnnnnnnnnnnnnnnnnnnnnnnnnnnnnnnnnnnnnnnnnnnnnnnnnnnnnnnnnnnnnnnnnnnnnnnnnnnnnnnnnnnnnnnnnnnnnnnnnnnnnnnnnnnnnnnnnnnnnnnnnnnnnnnnnnnnnnnnnnnnnnnnnnnnnnnnnnnnnnnnnnnnnnnnnnnnnnnnnnnnnnnnnnnnnnnnnnnnnnnnnnnnnnnnnnnnnnnnnnnnnnnnnnnnnnnnnnnnnnnnnnnnnnnnnnnnnnnnnnnnnnnnnnnnnnnnnnnnnnnnnnnnnnnnnnnnnnnnnnnnnnnnnnnnnnnnnnnnnnnnnnnnnnnnnnnnnnnnnnnnnnnnnnnnnnnnnnnnnnnnnnnnnnnnnnnnnnnnnnnnnnnnnnnnnnnnnnnnnnnnnnnnnnnnnnnnnnnnnnnnnnnnnnnnnnnnnnnnnnnnnnnnnnnnnnnnnnnnnnnnnnnnnnnnnnnnnnnnnnnnnnnnnnnnnnnnnnnnnnnnnnnnnnnnnnnnnnnnnnnnnnnnnnnnnnnnnnnnnnnnnnnnnnnnnnnnnnnnnnnnnnnnnnnnnnnnnnnnnnnnnnnnnnnnnnnnnnnnnnnnnnnnnnnnnnnnnnnnnnnnnnnnnnnnnnnnnnnnnnnnnnnnnnnnnnnnnnnnnnnnnnnnnnnnnnnnnnnnnnnnnnnnnnnnnnnnnnnnnnnnnnnnnnnnnnnnnnnnnnnnnnnnnnnnnnnnnnnnnnnnnnnnnnnnnnnnnnnnnnnnnnnnnnnnnnnnnnnnnnnnnnnnnnnnnnnnnnnnnnnnnnnnnnnnnnnnnnnnnnnnnnnnnnnnnnnnnnnnnnnnnnnnnnnnnnnnnnnnnnnnnnnnnnnnnnnnnnnnnnnnnnnnnnnnnnnnnnnnnnnnnnnnnnnnnnnnnnnnnnnnnnnnnnnnnnnnnnnnnnnnnnnnnnnnnnnnnnnnnnnnnnnnnnnnnnnnnnnnnnnnnnnnnnnnnnnnnnnnnnnnnnnnnnnnnnnnnnnnnnnnnnnnnnnnnnnnnnnnnnnnnnnnnnnnnnnnnnnnnnnnnnnnnnnnnnnnnnnnnnnnnnnnnnnnnnnnnnnnnnnnnnnnnnnnnnnnnnnnnnnnnnnnnnnnnnnnnnnnnnnnnnnnnnnnnnnnnnnnnnnnnnnnnnnnnnnnnnnnnnnnnnnnnnnnnnnnnnnnnnnnnnnnnnnnnnnnnnnnnnnnnnnnnnnnnnnnnnnnnnnnnnnnnnnnnnnnnnnnnnnnnnnnnnnnnnnnnnnnnnnnnnnnnnnnnnnnnnnnnnnnnnnnnnnnnnnnnnnnnnnnnnnnnnnnnnnnnnnnnnnnnnnnnnnnnnnnnnnnnnnnnnnnnnnnnnnnnnnnnnnnnnnnnnnnnnnnnnnnnnnnnnnnnnnnnnnnnnnnnnnnnnnnnnnnnnnnnnnnnnnnnnnnnnnnnnnnnnnnnnnnnnnnnnnnnnnnnnnnnnnnnnnnnnnnnnnnnnnnnnnnnnnnnnnnnnnnnnnnnnnnnnnnnnnnnnnnnnnnnnnnnnnnnnnnnnnnnnnnnnnnnnnnnnnnnnnnnnnnnnnnnnnnnnnnnnnnnnnnnnnnnnnnnnnnnnnnnnnnnnnnnnnnnnnnnnnnnnnnnnnnnnnnnnnnnnnnnnnnnnnnnnnnnnnnnnnnnnnnnnnnnnnnnnnnnnnnnnnnnnnnnnnnnnnnnnnnnnnnnnnnnnnnnnnnnnnnnnnnnnnnnnnnnnnnnnnnnnnnnnnnnnnnnnnnnnnnnnnnnnnnnnnnnnnnnnnnnnnnnnnnnnnnnnnnnnnnnnnnnnnnnnnnnnnnnnnnnnnnnnnnnnnnnnnnnnnnnnnnnnnnnnnnnnnnnnnnnnnnnnnnnnnnnnnnnnnnnnnnnnnnnnnnnnnnnnnnnnnnnnnnnnnnnnnnnnnnnnnnnnnnnnnnnnnnnnnnnnnnnnnnnnnnnnnnnnnnnnnnnnnnnnnnnnnnnnnnnnnnnnnnnnnnnnnnnnnnnnnnnnnnnnnnnnnnnnnnnnnnnnnnnnnnnnnnnnnnnnnnnnnnnnnnnnnnnnnnnnnnnnnnnnnnnnnnnnnnnnnnnnnnnnnnnnnnnnnnnnnnnnnnnnnnnnnnnnnnnnnnnnnnnnnnnnnnnnnnnnnnnnnnnnnnnnnnnnnnnnnnnnnnnnnnnnnnnnnnnnnnnnnnnnnnnnnnnnnnnnnnnnnnnnnnnnnnnnnnnnnnnnnnnnnnnnnnnnnnnnnnnnnnnnnnnnnnnnnnnnnnnnnnnnnnnnnnnnnnnnnnnnnnnnnnnnnnnnnnnnnnnnnnnnnnnnnnnnnnnnnnnnnnnnnnnnnnnnnnnnnnnnnnnnnnnnnnnnnnnnnnnnnnnnnnnnnnnnnnnnnnnnnnnnnnnnnnnnnnnnnnnnnnnnnnnnnnnnnnnnnnnnnnnnnnnnnnnnnnnnnnnnnnnnnnnnnnnnnnnnnnnnnnnnnnnnnnnnnnnnnnnnnnnnnnnnnnnnnnnnnnnnnnnnnnnnnnnnnnnnnnnnnnnnnnnnnnnnnnnnnnnnnnnnnnnnnnnnnnnnnnnnnnnnnnnnnnnnnnnnnnnnnnnnnnnnnnnnnnnnnnnnnnnnnnnnnnnnnnnnnnnnnnnnnnnnnnnnnnnnnnnnnnnnnnnnnnnnnnnnnnnnnnnnnnnnnnnnnnnnnnnnnnnnnnnnnnnnnnnnnnnnnnnnnnnnnnnnnnnnnnnnnnnnnnnnnnnnnnnnnnnnnnnnnnnnnnnnnnnnnnnnnnnnnnnnnnnnnnnnnnnnnnnnnnnnnnnnnnnnnnnnnnnnnnnnnnnnnnnnnnnnnnnnnnnnnnnnnnnnnnnnnnnnnnnnnnnnnnnnnnnnnnnnnnnnnnnnnnnnnnnnnnnnnnnnnnnnnnnnnnnnnnnnnnnnnnnnnnnnnnnnnnnnnnnnnnnnnnnnnnnnnnnnnnnnnnnnnnnnnnnnnnnnnnnnnnnnnnnnnnnnnnnnnnnnnnnnnnnnnnnnnnnnnnnnnnnnnnnnnnnnnnnnnnnnnnnnnnnnnnnnnnnnnnnnnnnnnnnnnnnnnnnnnnnnnnnnnnnnnnnnnnnnnnnnnnnnnnnnnnnnnnnnnnnnnnnnnnnnnnnnnnnnnnnnnnnnnnnnnnnnnnnnnnnnnnnnnnnnnnnnnnnnnnnnnnnnnnnnnnnnnnnnnnnnnnnnnnnnnnnnnnnnnnnnnnnnnnnnnnnnnnnnnnnnnnnnnnnnnnnnnnnnnnnnnnnnnnnnnnnnnnnnnnnnnnnnnnnnnnnnnnnnnnnnnnnnnnnnnnnnnnnnnnnnnnnnnnnnnnnnnnnnnnnnnnnnnnnnnnnnnnnnnnnnnnnnnnnnnnnnnnnnnnnnnnnnnnnnnnnnnnnnnnnnnnnnnnnnnnnnnnnnnnnnnnnnnnnnnnnnnnnnnnnnnnnnnnnnnnnnnnnnnnnnnnnnnnnnnnnnnnnnnnnnnnnnnnnnnnnnnnnnnnnnnnnnnnnnnnnnnnnnnnnnnnnnnnnnnnnnnnnnnnnnnnnnnnnnnnnnnnnnnnnnnnnnnnnnnnnnnnnnnnnnnnnnnnnnnnnnnnnnnnnnnnnnnnnnnnnnnnnnnnnnnnnnnnnnnnnnnnnnnnnnnnnnnnnnnnnnnnnnnnnnnnnnnnnnnnnnnnnnnnnnnnnnnnnnnnnnnnnnnnnnnnnnnnnnnnnnnnnnnnnnnnnnnnnnnnnnnnnnnnnnnnnnnnnnnnnnnnnnnnnnnnnnnnnnnnnnnnnnnnnnnnnnnnnnnnnnnnnnnnnnnnnnnnnnnnnnnnnnnnnnnnnnnnnnnnnnnnnnnnnnnnnnnnnnnnnnnnnnnnnnnnnnnnnnnnnnnnnnnnnnnnnnnnnnnnnnnnnnnnnnnnnnnnnnnnnnnnnnnnnnnnnnnnnnnnnnnnnnnnnnnnnnnnnnnnnnnnnnnnnnnnnnnnnnnnnnnnnnnnnnnnnnnnnnnnnnnnnnnnnnnnnnnnnnnnnnnnnnnnnnnnnnnnnnnnnnnnnnnnnnnnnnnnnnnnnnnnnnnnnnnnnnnnnnnnnnnnnnnnnnnnnnnnnnnnnnnnnnnnnnnnnnnnnnnnnnnnnnnnnnnnnnnnnnnnnnnnnnnnnnnnnnnnnnnnnnnnnnnnnnnnnnnnnnnnnnnnnnnnnnnnnnnnnnnnnnnnnnnnnnnnnnnnnnnnnnnnnnnnnnnnnnnnnnnnnnnnnnnnnnnnnnnnnnnnnnnnnnnnnnnnnnnnnnnnnnnnnnnnnnnnnnnnnnnnnnnnnnnnnnnnnnnnnnnnnnnnnnnnnnnnnnnnnnnnnnnnnnnnnnnnnnnnnnnnnnnnnnnnnnnnnnnnnnnnnnnnnnnnnnnnnnnnnnnnnnnnnnnnnnnnnnnnnnnnnnnnnnnnnnnnnnnnnnnnnnnnnnnnnnnnnnnnnnnnnnnnnnnnnnnnnnnnnnnnnnnnnnnnnnnnnnnnnnnnnnnnnnnnnnnnnnnnnnnnnnnnnnnnnnnnnnnnnnnnnnnnnnnnnnnnnnnnnnnnnnnnnnnnnnnnnnnnnnnnnnnnnnnnnnnnnnnnnnnnnnnnnnnnnnnnnnnnnnnnnnnnnnnnnnnnnnnnnnnnnnnnnnnnnnnnnnnnnnnnnnnnnnnnnnnnnnnnnnnnnnnnnnnnnnnnnnnnnnnnnnnnnnnnnnnnnnnnnnnnnnnnnnnnnnnnnnnnnnnnnnnnnnnnnnnnnnnnnnnnnnnnnnnnnnnnnnnnnnnnnnnnnnnnnnnnnnnnnnnnnnnnnnnnnnnnnnnnnnnnnnnnnnnnnnnnnnnnnnnnnnnnnnnnnnnnnnnnnnnnnnnnnnnnnnnnnnnnnnnnnnnnnnnnnnnnnnnnnnnnnnnnnnnnnnnnnnnnnnnnnnnnnnnnnnnnnnnnnnnnnnnnnnnnnnnnnnnnnnnnnnnnnnnnnnnnnnnnnnnnnnnnnnnnnnnnnnnnnnnnnnnnnnnnnnnnnnnnnnnnnnnnnnnnnnnnnnnnnnnnnnnnnnnnnnnnnnnnnnnnnnnnnnnnnnnnnnnnnnnnnnnnnnnnnnnnnnnnnnnnnnnnnnnnnnnnnnnnnnnnnnnnnnnnnnnnnnnnnnnnnnnnnnnnnnnnnnnnnnnnnnnnnnnnnnnnnnnnnnnnnnnnnnnnnnnnnnnnnnnnnnnnnnnnnnnnnnnnnnnnnnnnnnnnnnnnnnnnnnnnnnnnnnnnnnnnnnnnnnnnnnnnnnnnnnnnnnnnnnnnnnnnnnnnnnnnnnnnnnnnnnnnnnnnnnnnnnnnnnnnnnnnnnnnnnnnnnnnnnnnnnnnnnnnnnnnnnnnnnnnnnnnnnnnnnnnnnnnnnnnnnnnnnnnnnnnnnnnnnnnnnnnnnnnnnnnnnnnnnnnnnnnnnnnnnnnnnnnnnnnnnnnnnnnnnnnnnnnnnnnnnnnnnnnnnnnnnnnnnnnnnnnnnnnnnnnnnnnnnnnnnnnnnnnnnnnnnnnnnnnnnnnnnnnnnnnnnnnnnnnnnnnnnnnnnnnnnnnnnnnnnnnnnnnnnnnnnnnnnnnnnnnnnnnnnnnnnnnnnnnnnnnnnnnnnnnnnnnnnnnnnnnnnnnnnnnnnnnnnnnnnnnnnnnnnnnnnnnnnnnnnnnnnnnnnnnnnnnnnnnnnnnnnnnnnnnnnnnnnnnnnnnnnnnnnnnnnnnnnnnnnnnnnnnnnnnnnnnnnnnnnnnnnnnnnnnnnnnnnnnnnnnnnnnnnnnnnnnnnnnnnnnnnnnnnnnnnnnnnnnnnnnnnnnnnnnnnnnnnnnnnnnnnnnnnnnnnnnnnnnnnnnnnnnnnnnnnnnnnnnnnnnnnnnnnnnnnnnnnnnnnnnnnnnnnnnnnnnnnnnnnnnnnnnnnnnnnnnnnnnnnnnnnnnnnnnnnnnnnnnnnnnnnnnnnnnnnnnnnnnnnnnnnnnnnnnnnnnnnnnnnnnnnnnnnnnnnnnnnnnnnnnnnnnnnnnnnnnnnnnnnnnnnnnnnnnnnnnnnnnnnnnnnnnnnnnnnnnnnnnnnnnnnnnnnnnnnnnnnnnnnnnnnnnnnnnnnnnnnnnnnnnnnnnnnnnnnnnnnnnnnnnnnnnnnnnnnnnnnnnnnnnnnnnnnnnnnnnnnnnnnnnnnnnnnnnnnnnnnnnnnnnnnnnnnnnnnnnnnnnnnnnnnnnnnnnnnnnnnnnnnnnnnnnnnnnnnnnnnnnnnnnnnnnnnnnnnnnnnnnnnnnnnnnnnnnnnnnnnnnnnnnnnnnnnnnnnnnnnnnnnnnnnnnnnnnnnnnnnnnnnnnnnnnnnnnnnnnnnnnnnnnnnnnnnnnnnnnnnnnnnnnnnnnnnnnnnnnnnnnnnnnnnnnnnnnnnnnnnnnnnnnnnnnnnnnnnnnnnnnnnnnnnnnnnnnnnnnnnnnnnnnnnnnnnnnnnnnnnnnnnnnnnnnnnnnnnnnnnnnnnnnnnnnnnnnnnnnnnnnnnnnnnnnnnnnnnnnnnnnnnnnnnnnnnnnnnnnnnnnnnnnnnnnnnnnnnnnnnnnnnnnnnnnnnnnnnnnnnnnnnnnnnnnnnnnnnnnnnnnnnnnnnnnnnnnnnnnnnnnnnnnnnnnnnnnnnnnnnnnnnnnnnnnnnnnnnnnnnnnnnnnnnnnnnnnnnnnnnnnnnnnnnnnnnnnnnnnnnnnnnnnnnnnnnnnnnnnnnnnnnnnnnnnnnnnnnnnnnnnnnnnnnnnnnnnnnnnnnnnnnnnnnnnnnnnnnnnnnnnnnnnnnnnnnnnnnnnnnnnnnnnnnnnnnnnnnnnnnnnnnnnnnnnnnnnnnnnnnnnnnnnnnnnnnnnnnnnnnnnnnnnnnnnnnnnnnnnnnnnnnnnnnnnnnnnnnnnnnnnnnnnnnnnnnnnnnnnnnnnnnnnnnnnnnnnnnnnnnnnnnnnnnnnnnnnnnnnnnnnnnnnnnnnnnnnnnnnnnnnnnnnnnnnnnnnnnnnnnnnnnnnnnnnnnnnnnnnnnnnnnnnnnnnnnnnnnnnnnnnnnnnnnnnnnnnnnnnnnnnnnnnnnnnnnnnnnnnnnnnnnnnnnnnnnnnnnnnnnnnnnnnnnnnnnnnnnnnnnnnnnnnnnnnnnnnnnnnnnnnnnnnnnnnnnnnnnnnnnnnnnnnnnnnnnnnnnnnnnnnnnnnnnnnnnnnnnnnnnnnnnnnnnnnnnnnnnnnnnnnnnnnnnnnnnnnnnnnnnnnnnnnnnnnnnnnnnnnnnnnnnnnnnnnnnnnnnnnnnnnnnnnnnnnnnnnnnnnnnnnnnnnnnnnnnnnnnnnnnnnnnnnnnnnnnnnnnnnnnnnnnnnnnnnnnnnnnnnnnnnnnnnnnnnnnnnnnnnnnnnnnnnnnnnnnnnnnnnnnnnnnnnnnnnnnnnnnnnnnnnnnnnnnnnnnnnnnnnnnnnnnnnnnnnnnnnnnnnnnnnnnnnnnnnnnnnnnnnnnnnnnnnnnnnnnnnnnnnnnnnnnnnnnnnnnnnnnnnnnnnnnnnnnnnnnnnnnnnnnnnnnnnnnnnnnnnnnnnnnnnnnnnnnnnnnnnnnnnnnnnnnnnnnnnnnnnnnnnnnnnnnnnnnnnnnnnnnnnnnnnnnnnnnnnnnnnnnnnnnnnnnnnnnnnnnnnnnnnnnnnnnnnnnnnnnnnnnnnnnnnnnnnnnnnnnnnnnnnnnnnnnnnnnnnnnnnnnnnnnnnnnnnnnnnnnnnnnnnnnnnnnnnnnnnnnnnnnnnnnnnnnnnnnnnnnnnnnnnnnnnnnnnnnnnnnnnnnnnnnnnnnnnnnnnnnnnnnnnnnnnnnnnnnnnnnnnnnnnnnnnnnnnnnnnnnnnnnnnnnnnnnnnnnnnnnnnnnnnnnnnnnnnnnnnnnnnnnnnnnnnnnnnnnnnnnnnnnnnnnnnnnnnnnnnnnnnnnnnnnnnnnnnnnnnnnnnnnnnnnnnnnnnnnnnnnnnnnnnnnnnnnnnnnnnnnnnnnnnnnnnnnnnnnnnnnnnnnnnnnnnnnnnnnnnnnnnnnnnnnnnnnnnnnnnnnnnnnnnnnnnnnnnnnnnnnnnnnnnnnnnnnnnnnnnnnnnnnnnnnnnnnnnnnnnnnnnnnnnnnnnnnnnnnnnnnnnnnnnnnnnnnnnnnnnnnnnnnnnnnnnnnnnnnnnnnnnnnnnnnnnnnnnnnnnnnnnnnnnnnnnnnnnnnnnnnnnnnnnnnnnnnnnnnnnnnnnnnnnnnnnnnnnnnnnnnnnnnnnnnnnnnnnnnnnnnnnnnnnnnnnnnnnnnnnnnnnnnnnnnnnnnnnnnnnnnnnnnnnnnnnnnnnnnnnnnnnnnnnnnnnnnnnnnnnnnnnnnnnnnnnnnnnnnnnnnnnnnnnnnnnnnnnnnnnnnnnnnnnnnnnnnnnnnnnnnnnnnnnnnnnnnnnnnnnnnnnnnnnnnnnnnnnnnnnnnnnnnnnnnnnnnnnnnnnnnnnnnnnnnnnnnnnnnnnnnnnnnnnnnnnnnnnnnnnnnnnnnnnnnnnnnnnnnnnnnnnnnnnnnnnnnnnnnnnnnnnnnnnnnnnnnnnnnnnnnnnnnnnnnnnnnnnnnnnnnnnnnnnnnnnnnnnnnnnnnnnnnnnnnnnnnnnnnnnnnnnnnnnnnnnnnnnnnnnnnnnnnnnnnnnnnnnnnnnnnnnnnnnnnnnnnnnnnnnnnnnnnnnnnnnnnnnnnnnnnnnnnnnnnnnnnnnnnnnnnnnnnnnnnnnnnnnnnnnnnnnnnnnnnnnnnnnnnnnnnnnnnnnnnnnnnnnnnnnnnnnnnnnnnnnnnnnnnnnnnnnnnnnnnnnnnnnnnnnnnnnnnnnnnnnnnnnnnnnnnnnnnnnnnnnnnnnnnnnnnnnnnnnnnnnnnnnnnnnnnnnnnnnnnnnnnnnnnnnnnnnnnnnnnnnnnnnnnnnnnnnnnnnnnnnnnnnnnnnnnnnnnnnnnnnnnnnnnnnnnnnnnnnnnnnnnnnnnnnnnnnnnnnnnnnnnnnnnnnnnnnnnnnnnnnnnnnnnnnnnnnnnnnnnnnnnnnnnnnnnnnnnnnnnnnnnnnnnnnnnnnnnnnnnnnnnnnnnnnnnnnnnnnnnnnnnnnnnnnnnnnnnnnnnnnnnnnnnnnnnnnnnnnnnnnnnnnnnnnnnnnnnnnnnnnnnnnnnnnnnnnnnnnnnnnnnnnnnnnnnnnnnnnnnnnnnnnnnnnnnnnnnnnnnnnnnnnnnnnnnnnnnnnnnnnnnnnnnnnnnnnnnnnnnnnnnnnnnnnnnnnnnnnnnnnnnnnnnnnnnnnnnnnnnnnnnnnnnnnnnnnnnnnnnnnnnnnnnnnnnnnnnnnnnnnnnnnnnnnnnnnnnnnnnnnnnnnnnnnnnnnnnnnnnnnnnnnnnnnnnnnnnnnnnnnnnnnnnnnnnnnnnnnnnnnnnnnnnnnnnnnnnnnnnnnnnnnnnnnnnnnnnnnnnnnnnnnnnnnnnnnnnnnnnnnnnnnnnnnnnnnnnnnnnnnnnnnnnnnnnnnnnnnnnnnnnnnnnnnnnnnnnnnnnnnnnnnnnnnnnnnnnnnnnnnnnnnnnnnnnnnnnnnnnnnnnnnnnnnnnnnnnnnnnnnnnnnnnnnnnnnnnnnnnnnnnnnnnnnnnnnnnnnnnnnnnnnnnnnnnnnnnnnnnnnnnnnnnnnnnnnnnnnnnnnnnnnnnnnnnnnnnnnnnnnnnnnnnnnnnnnnnnnnnnnnnnnnnnnnnnnnnnnnnnnnnnnnnnnnnnnnnnnnnnnnnnnnnnnnnnnnnnnnnnnnnnnnnnnnnnnnnnnnnnnnnnnnnnnnnnnnnnnnnnnnnnnnnnnnnnnnnnnnnnnnnnnnnnnnnnnnnnnnnnnnnnnnnnnnnnnnnnnnnnnnnnnnnnnnnnnnnnnnnnnnnnnnnnnnnnnnnnnnnnnnnnnnnnnnnnnnnnnnnnnnnnnnnnnnnnnnnnnnnnnnnnnnnnnnnnnnnnnnnnnnnnnnnnnnnnnnnnnnnnnnnnnnnnnnnnnnnnnnnnnnnnnnnnnnnnnnnnnnnnnnnnnnnnnnnnnnnnnnnnnnnnnnnnnnnnnnnnnnnnnnnnnnnnnnnnnnnnnnnnnnnnnnnnnnnnnnnnnnnnnnnnnnnnnnnnnnnnnnnnnnnnnnnnnnnnnnnnnnnnnnnnnnnnnnnnnnnnnnnnnnnnnnnnnnnnnnnnnnnnnnnnnnnnnnnnnnnnnnnnnnnnnnnnnnnnnnnnnnnnnnnnnnnnnnnnnnnnnnnnnnnnnnnnnnnnnnnnnnnnnnnnnnnnnnnnnnnnnnnnnnnnnnnnnnnnnnnnnnnnnnnnnnnnnnnnnnnnnnnnnnnnnnnnnnnnnnnnnnnnnnnnnnnnnnnnnnnnnnnnnnnnnnnnnnnnnnnnnnnnnnnnnnnnnnnnnnnnnnnnnnnnnnnnnnnnnnnnnnnnnnnnnnnnnnnnnnnnnnnnnnnnnnnnnnnnnnnnnnnnnnnnnnnnnnnnnnnnnnnnnnnnnnnnnnnnnnnnnnnnnnnnnnnnnnnnnnnnnnnnnnnnnnnnnnnnnnnnnnnnnnnnnnnnnnnnnnnnnnnnnnnnnnnnnnnnnnnnnnnnnnnnnnnnnnnnnnnnnnnnnnnnnnnnnnnnnnnnnnnnnnnnnnnnnnnnnnnnnnnnnnnnnnnnnnnnnnnnnnnnnnnnnnnnnnnnnnnnnnnnnnnnnnnnnnnnnnnnnnnnnnnnnnnnnnnnnnnnnnnnnnnnnnnnnnnnnnnnnnnnnnnnnnnnnnnnnnnnnnnnnnnnnnnnnnnnnnnnnnnnnnnnnnnnnnnnnnnnnnnnnnnnnnnnnnnnnnnnnnnnnnnnnnnnnnnnnnnnnnnnnnnnnnnnnnnnnnnnnnnnnnnnnnnnnnnnnnnnnnnnnnnnnnnnnnnnnnnnnnnnnnnnnnnnnnnnnnnnnnnnnnnnnnnnnnnnnnnnnnnnnnnnnnnnnnnnnnnnnnnnnnnnnnnnnnnnnnnnnnnnnnnnnnnnnnnnnnnnnnnnnnnnnnnnnnnnnnnnnnnnnnnnnnnnnnnnnnnnnnnnnnnnnnnnnnnnnnnnnnnnnnnnnnnnnnnnnnnnnnnnnnnnnnnnnnnnnnnnnnnnnnnnnnnnnnnnnnnnnnnnnnnnnnnnnnnnnnnnnnnnnnnnnnnnnnnnnnnnnnnnnnnnnnnnnnnnnnnnnnnnnnnnnnnnnnnnnnnnnnnnnnnnnnnnnnnnnnnnnnnnnnnnnnnnnnnnnnnnnnnnnnnnnnnnnnnnnnnnnnnnnnnnnnnnnnnnnnnnnnnnnnnnnnnnnnnnnnnnnnnnnnnnnnnnnnnnnnnnnnnnnnnnnnnnnnnnnnnnnnnnnnnnnnnnnnnnnnnnnnnnnnnnnnnnnnnnnnnnnnnnnnnnnnnnnnnnnnnnnnnnnnnnnnnnnnnnnnnnnnnnnnnnnnnnnnnnnnnnnnnnnnnnnnnnnnnnnnnnnnnnnnnnnnnnnnnnnnnnnnnnnnnnnnnnnnnnnnnnnnnnnnnnnnnnnnnnnnnnnnnnnnnnnnnnnnnnnnnnnnnnnnnnnnnnnnnnnnnnnnnnnnnnnnnnnnnnnnnnnnnnnnnnnnnnnnnnnnnnnnnnnnnnnnnnnnnnnnnnnnnnnnnnnnnnnnnnnnnnnnnnnnnnnnnnnnnnnnnnnnnnnnnnnnnnnnnnnnnnnnnnnnnnnnnnnnnnnnnnnnnnnnnnnnnnnnnnnnnnnnnnnnnnnnnnnnnnnnnnnnnnnnnnnnnnnnnnnnnnnnnnnnnnnnnnnnnnnnnnnnnnnnnnnnnnnnnnnnnnnnnnnnnnnnnnnnnnnnnnnnnnnnnnnnnnnnnnnnnnnnnnnnnnnnnnnnnnnnnnnnnnnnnnnnnnnnnnnnnnnnnnnnnnnnnnnnnnnnnnnnnnnnnnnnnnnnnnnnnnnnnnnnnnnnnnnnnnnnnnnnnnnnnnnnnnnnnnnnnnnnnnnnnnnnnnnnnnnnnnnnnnnnnnnnnnnnnnnnnnnnnnnnnnnnnnnnnnnnnnnnnnnnnnnnnnnnnnnnnnnnnnnnnnnnnnnnnnnnnnnnnnnnnnnnnnnnnnnnnnnnnnnnnnnnnnnnnnnnnnnnnnnnnnnnnnnnnnnnnnnnnnnnnnnnnnnnnnnnnnnnnnnnnnnnnnnnnnnnnnnnnnnnnnnnnnnnnnnnnnnnnnnnnnnnnnnnnnnnnnnnnnnnnnnnnnnnnnnnnnnnnnnnnnnnnnnnnnnnnnnnnnnnnnnnnnnnnnnnnnnnnnnnnnnnnnnnnnnnnnnnnnnnnnnnnnnnnnnnnnnnnnnnnnnnnnnnnnnnnnnnnnnnnnnnnnnnnnnnnnnnnnnnnnnnnnnnnnnnnnnnnnnnnnnnnnnnnnnnnnnnnnnnnnnnnnnnnnnnnnnnnnnnnnnnnnnnnnnnnnnnnnnnnnnnnnnnnnnnnnnnnnnnnnnnnnnnnnnnnnnnnnnnnnnnnnnnnnnnnnnnnnnnnnnnnnnnnnnnnnnnnnnnnnnnnnnnnnnnnnnnnnnnnnnnnnnnnnnnnnnnnnnnnnnnnnnnnnnnnnnnnnnnnnnnnnnnnnnnnnnnnnnnnnnnnnnnnnnnnnnnnnnnnnnnnnnnnnnnnnnnnnnnnnnnnnnnnnnnnnnnnnnnnnnnnnnnnnnnnnnnnnnnnnnnnnnnnnnnnnnnnnnnnnnnnnnnnnnnnnnnnnnnnnnnnnnnnnnnnnnnnnnnnnnnnnnnnnnnnnnnnnnnnnnnnnnnnnnnnnnnnnnnnnnnnnnnnnnnnnnnnnnnnnnnnnnnnnnnnnnnnnnnnnnnnnnnnnnnnnnnnnnnnnnnnnnnnnnnnnnnnnnnnnnnnnnnnnnnnnnnnnnnnnnnnnnnnnnnnnnnnnnnnnnnnnnnnnnnnnnnnnnnnnnnnnnnnnnnnnnnnnnnnnnnnnnnnnnnnnnnnnnnnnnnnnnnnnnnnnnnnnnnnnnnnnnnnnnnnnnnnnnnnnnnnnnnnnnnnnnnnnnnnnnnnnnnnnnnnnnnnnnnnnnnnnnnnnnnnnnnnnnnnnnnnnnnnnnnnnnnnnnnnnnnnnnnnnnnnnnnnnnnnnnnnnnnnnnnnnnnnnnnnnnnnnnnnnnnnnnnnnnnnnnnnnnnnnnnnnnnnnnnnnnnnnnnnnnnnnnnnnnnnnnnnnnnnnnnnnnnnnnnnnnnnnnnnnnnnnnnnnnnnnnnnnnnnnnnnnnnnnnnnnnnnnnnnnnnnnnnnnnnnnnnnnnnnnnnnnnnnnnnnnnnnnnnnnnnnnnnnnnnnnnnnnnnnnnnnnnnnnnnnnnnnnnnnnnnnnnnnnnnnnnnnnnnnnnnnnnnnnnnnnnnnnnnnnnnnnnnnnnnnnnnnnnnnnnnnnnnnnnnnnnnnnnnnnnnnnnnnnnnnnnnnnnnnnnnnnnnnnnnnnnnnnnnnnnnnnnnnnnnnnnnnnnnnnnnnnnnnnnnnnnnnnnnnnnnnnnnnnnnnnnnnnnnnnnnnnnnnnnnnnnnnnnnnnnnnnnnnnnnnnnnnnnnnnnnnnnnnnnnnnnnnnnnnnnnnnnnnnnnnnnnnnnnnnnnnnnnnnnnnnnnnnnnnnnnnnnnnnnnnnnnnnnnnnnnnnnnnnnnnnnnnnnnnnnnnnnnnnnnnnnnnnnnnnnnnnnnnnnnnnnnnnnnnnnnnnnnnnnnnnnnnnnnnnnnnnnnnnnnnnnnnnnnnnnnnnnnnnnnnnnnnnnnnnnnnnnnnnnnnnnnnnnnnnnnnnnnnnnnnnnnnnnnnnnnnnnnnnnnnnnnnnnnnnnnnnnnnnnnnnnnnnnnnnnnnnnnnnnnnnnnnnnnnnnnnnnnnnnnnnnnnnnnnnnnnnnnnnnnnnnnnnnnnnnnnnnnnnnnnnnnnnnnnnnnnnnnnnnnnnnnnnnnnnnnnnnnnnnnnnnnnnnnnnnnnnnnnnnnnnnnnnnnnnnnnnnnnnnnnnnnnnnnnnnnnnnnnnnnnnnnnnnnnnnnnnnnnnnnnnnnnnnnnnnnnnnnnnnnnnnnnnnnnnnnnnnnnnnnnnnnnnnnnnnnnnnnnnnnnnnnnnnnnnnnnnnnnnnnnnnnnnnnnnnnnnnnnnnnnnnnnnnnnnnnnnnnnnnnnnnnnnnnnnnnnnnnnnnnnnnnnnnnnnnnnnnnnnnnnnnnnnnnnnnnnnnnnnnnnnnnnnnnnnnnnnnnnnnnnnnnnnnnnnnnnnnnnnnnnnnnnnnnnnnnnnnnnnnnnnnnnnnnnnnnnnnnnnnnnnnnnnnnnnnnnnnnnnnnnnnnnnnnnnnnnnnnnnnnnnnnnnnnnnnnnnnnnnnnnnnnnnnnnnnnnnnnnnnnnnnnnnnnnnnnnnnnnnnnnnnnnnnnnnnnnnnnnnnnnnnnnnnnnnnnnnnnnnnnnnnnnnnnnnnnnnnnnnnnnnnnnnnnnnnnnnnnnnnnnnnnnnnnnnnnnnnnnnnnnnnnnnnnnnnnnnnnnnnnnnnnnnnnnnnnnnnnnnnnnnnnnnnnnnnnnnnnnnnnnnnnnnnnnnnnnnnnnnnnnnnnnnnnnnnnnnnnnnnnnnnnnnnnnnnnnnnnnnnnnnnnnnnnnnnnnnnnnnnnnnnnnnnnnnnnnnnnnnnnnnnnnnnnnnnnnnnnnnnnnnnnnnnnnnnnnnnnnnnnnnnnnnnnnnnnnnnnnnnnnnnnnnnnnnnnnnnnnnnnnnnnnnnnnnnnnnnnnnnnnnnnnnnnnnnnnnnnnnnnnnnnnnnnnnnnnnnnnnnnnnnnnnnnnnnnnnnnnnnnnnnnnnnnnnnnnnnnnnnnnnnnnnnnnnnnnnnnnnnnnnnnnnnnnnnnnnnnnnnnnnnnnnnnnnnnnnnnnnnnnnnnnnnnnnnnnnnnnnnnnnnnnnnnnnnnnnnnnnnnnnnnnnnnnnnnnnnnnnnnnnnnnnnnnnnnnnnnnnnnnnnnnnnnnnnnnnnnnnnnnnnnnnnnnnnnnnnnnnnnnnnnnnnnnnnnnnnnnnnnnnnnnnnnnnnnnnnnnnnnnnnnnnnnnnnnnnnnnnnnnnnnnnnnnnnnnnnnnnnnnnnnnnnnnnnnnnnnnnnnnnnnnnnnnnnnnnnnnnnnnnnnnnnnnnnnnnnnnnnnnnnnnnnnnnnnnnnnnnnnnnnnnnnnnnnnnnnnnnnnnnnnnnnnnnnnnnnnnnnnnnnnnnnnnnnnnnnnnnnnnnnnnnnnnnnnnnnnnnnnnnnnnnnnnnnnnnnnnnnnnnnnnnnnnnnnnnnnnnnnnnnnnnnnnnnnnnnnnnnnnnnnnnnnnnnnnnnnnnnnnnnnnnnnnnnnnnnnnnnnnnnnnnnnnnnnnnnnnnnnnnnnnnnnnnnnnnnnnnnnnnnnnnnnnnnnnnnnnnnnnnnnnnnnnnnnnnnnnnnnnnnnnnnnnnnnnnnnnnnnnnnnnnnnnnnnnnnnnnnnnnnnnnnnnnnnnnnnnnnnnnnnnnnnnnnnnnnnnnnnnnnnnnnnnnnnnnnnnnnnnnnnnnnnnnnnnnnnnnnnnnnnnnnnnnnnnnnnnnnnnnnnnnnnnnnnnnnnnnnnnnnnnnnnnnnnnnnnnnnnnnnnnnnnnnnnnnnnnnnnnnnnnnnnnnnnnnnnnnnnnnnnnnnnnnnnnnnnnnnnnnnnnnnnnnnnnnnnnnnnnnnnnnnnnnnnnnnnnnnnnnnnnnnnnnnnnnnnnnnnnnnnnnnnnnnnnnnnnnnnnnnnnnnnnnnnnnnnnnnnnnnnnnnnnnnnnnnnnnnnnnnnnnnnnnnnnnnnnnnnnnnnnnnnnnnnnnnnnnnnnnnnnnnnnnnnnnnnnnnnnnnnnnnnnnnnnnnnnnnnnnnnnnnnnnnnnnnnnnnnnnnnnnnnnnnnnnnnnnnnnnnnnnnnnnnnnnnnnnnnnnnnnnnnnnnnnnnnnnnnnnnnnnnnnnnnnnnnnnnnnnnnnnnnnnnnnnnnnnnnnnnnnnnnnnnnnnnnnnnnnnnnnnnnnnnnnnnnnnnnnnnnnnnnnnnnnnnnnnnnnnnnnnnnnnnnnnnnnnnnnnnnnnnnnnnnnnnnnnnnnnnnnnnnnnnnnnnnnnnnnnnnnnnnnnnnnnnnnnnnnnnnnnnnnnnnnnnnnnnnnnnnnnnnnnnnnnnnnnnnnnnnnnnnnnnnnnnnnnnnnnnnnnnnnnnnnnnnnnnnnnnnnnnnnnnnnnnnnnnnnnnnnnnnnnnnnnnnnnnnnnnnnnnnnnnnnnnnnnnnnnnnnnnnnnnnnnnnnnnnnnnnnnnnnnnnnnnnnnnnnnnnnnnnnnnnnnnnnnnnnnnnnnnnnnnnnnnnnnnnnnnnnnnnnnnnnnnnnnnnnnnnnnnnnnnnnnnnnnnnnnnnnnnnnnnnnnnnnnnnnnnnnnnnnnnnnnnnnnnnnnnnnnnnnnnnnnnnnnnnnnnnnnnnnnnnnnnnnnnnnnnnnnnnnnnnnnnnnnnnnnnnnnnnnnnnnnnnnnnnnnnnnnnnnnnnnnnnnnnnnnnnnnnnnnnnnnnnnnnnnnnnnnnnnnnnnnnnnnnnnnnnnnnnnnnnnnnnnnnnnnnnnnnnnnnnnnnnnnnnnnnnnnnnnnnnnnnnnnnnnnnnnnnnnnnnnnnnnnnnnnnnnnnnnnnnnnnnnnnnnnnnnnnnnnnnnnnnnnnnnnnnnnnnnnnnnnnnnnnnnnnnnnnnnnnnnnnnnnnnnnnnnnnnnnnnnnnnnnnnnnnnnnnnnnnnnnnnnnnnnnnnnnnnnnnnnnnnnnnnnnnnnnnnnnnnnnnnnnnnnnnnnnnnnnnnnnnnnnnnnnnnnnnnnnnnnnnnnnnnnnnnnnnnnnnnnnnnnnnnnnnnnnnnnnnnnnnnnnnnnnnnnnnnnnnnnnnnnnnnnnnnnnnnnnnnnnnnnnnnnnnnnnnnnnnnnnnnnnnnnnnnnnnnnnnnnnnnnnnnnnnnnnnnnnnnnnnnnnnnnnnnnnnnnnnnnnnnnnnnnnnnnnnnnnnnnnnnnnnnnnnnnnnnnnnnnnnnnnnnnnnnnnnnnnnnnnnnnnnnnnnnnnnnnnnnnnnnnnnnnnnnnnnnnnnnnnnnnnnnnnnnnnnnnnnnnnnnnnnnnnnnnnnnnnnnnnnnnnnnnnnnnnnnnnnnnnnnnnnnnnnnnnnnnnnnnnnnnnnnnnnnnnnnnnnnnnnnnnnnnnnnnnnnnnnnnnnnnnnnnnnnnnnnnnnnnnnnnnnnnnnnnnnnnnnnnnnnnnnnnnnnnnnnnnnnnnnnnnnnnnnnnnnnnnnnnnnnnnnnnnnnnnnnnnnnnnnnnnnnnnnnnnnnnnnnnnnnnnnnnnnnnnnnnnnnnnnnnnnnnnnnnnnnnnnnnnnnnnnnnnnnnnnnnnnnnnnnnnnnnnnnnnnnnnnnnnnnnnnnnnnnnnnnnnnnnnnnnnnnnnnnnnnnnnnnnnnnnnnnnnnnnnnnnnnnnnnnnnnnnnnnnnnnnnnnnnnnnnnnnnnnnnnnnnnnnnnnnnnnnnnnnnnnnnnnnnnnnnnnnnnnnnnnnnnnnnnnnnnnnnnnnnnnnnnnnnnnnnnnnnnnnnnnnnnnnnnnnnnnnnnnnnnnnnnnnnnnnnnnnnnnnnnnnnnnnnnnnnnnnnnnnnnnnnnnnnnnnnnnnnnnnnnnnnnnnnnnnnnnnnnnnnnnnnnnnnnnnnnnnnnnnnnnnnnnnnnnnnnnnnnnnnnnnnnnnnnnnnnnnnnnnnnnnnnnnnnnnnnnnnnnnnnnnnnnnnnnnnnnnnnnnnnnnnnnnnnnnnnnnnnnnnnnnnnnnnnnnnnnnnnnnnnnnnnnnnnnnnnnnnnnnnnnnnnnnnnnnnnnnnnnnnnnnnnnnnnnnnnnnnnnnnnnnnnnnnnnnnnnnnnnnnnnnnnnnnnnnnnnnnnnnnnnnnnnnnnnnnnnnnnnnnnnnnnnnnnnnnnnnnnnnnnnnnnnnnnnnnnnnnnnnnnnnnnnnnnnnnnnnnnnnnnnnnnnnnnnnnnnnnnnnnnnnnnnnnnnnnnnnnnnnnnnnnnnnnnnnnnnnnnnnnnnnnnnnnnnnnnnnnnnnnnnnnnnnnnnnnnnnnnnnnnnnnnnnnnnnnnnnnnnnnnnnnnnnnnnnnnnnnnnnnnnnnnnnnnnnnnnnnnnnnnnnnnnnnnnnnnnnnnnnnnnnnnnnnnnnnnnnnnnnnnnnnnnnnnnnnnnnnnnnnnnnnnnnnnnnnnnnnnnnnnnnnnnnnnnnnnnnnnnnnnnnnnnnnnnnnnnnnnnnnnnnnnnnnnnnnnnnnnnnnnnnnnnnnnnnnnnnnnnnnnnnnnnnnnnnnnnnnnnnnnnnnnnnnnnnnnnnnnnnnnnnnnnnnnnnnnnnnnnnnnnnnnnnnnnnnnnnnnnnnnnnnnnnnnnnnnnnnnnnnnnnnnnnnnnnnnnnnnnnnnnnnnnnnnnnnnnnnnnnnnnnnnnnnnnnnnnnnnnnnnnnnnnnnnnnnnnnnnnnnnnnnnnnnnnnnnnnnnnnnnnnnnnnnnnnnnnnnnnnnnnnnnnnnnnnnnnnnnnnnnnnnnnnnnnnnnnnnnnnnnnnnnnnnnnnnnnnnnnnnnnnnnnnnnnnnnnnnnnnnnnnnnnnnnnnnnnnnnnnnnnnnnnnnnnnnnnnnnnnnnnnnnnnnnnnnnnnnnnnnnnnnnnnnnnnnnnnnnnnnnnnnnnnnnnnnnnnnnnnnnnnnnnnnnnnnnnnnnnnnnnnnnnnnnnnnnnnnnnnnnnnnnnnnnnnnnnnnnnnnnnnnnnnnnnnnnnnnnnnnnnnnnnnnnnnnnnnnnnnnnnnnnnnnnnnnnnnnnnnnnnnnnnnnnnnnnnnnnnnnnnnnnnnnnnnnnnnnnnnnnnnnnnnnnnnnnnnnnnnnnnnnnnnnnnnnnnnnnnnnnnnnnnnnnnnnnnnnnnnnnnnnnnnnnnnnnnnnnnnnnnnnnnnnnnnnnnnnnnnnnnnnnnnnnnnnnnnnnnnnnnnnnnnnnnnnnnnnnnnnnnnnnnnnnnnnnnnnnnnnnnnnnnnnnnnnnnnnnnnnnnnnnnnnnnnnnnnnnnnnnnnnnnnnnnnnnnnnnnnnnnnnnnnnnnnnnnnnnnnnnnnnnnnnnnnnnnnnnnnnnnnnnnnnnnnnnnnnnnnnnnnnnnnnnnnnnnnnnnnnnnnnnnnnnnnnnnnnnnnnnnnnnnnnnnnnnnnnnnnnnnnnnnnnnnnnnnnnnnnnnnnnnnnnnnnnnnnnnnnnnnnnnnnnnnnnnnnnnnnnnnnnnnnnnnnnnnnnnnnnnnnnnnnnnnnnnnnnnnnnnnnnnnnnnnnnnnnnnnnnnnnnnnnnnnnnnnnnnnnnnnnnnnnnnnnnnnnnnnnnnnnnnnnnnnnnnnnnnnnnnnnnnnnnnnnnnnnnnnnnnnnnnnnnnnnnnnnnnnnnnnnnnnnnnnnnnnnnnnnnnnnnnnnnnnnnnnnnnnnnnnnnnnnnnnnnnnnnnnnnnnnnnnnnnnnnnnnnnnnnnnnnnnnnnnnnnnnnnnnnnnnnnnnnnnnnnnnnnnnnnnnnnnnnnnnnnnnnnnnnnnnnnnnnnnnnnnnnnnnnnnnnnnnnnnnnnnnnnnnnnnnnnnnnnnnnnnnnnnnnnnnnnnnnnnnnnnnnnnnnnnnnnnnnnnnnnnnnnnnnnnnnnnnnnnnnnnnnnnnnnnnnnnnnnnnnnnnnnnnnnnnnnnnnnnnnnnnnnnnnnnnnnnnnnnnnnnnnnnnnnnnnnnnnnnnnnnnnnnnnnnnnnnnnnnnnnnnnnnnnnnnnnnnnnnnnnnnnnnnnnnnnnnnnnnnnnnnnnnnnnnnnnnnnnnnnnnnnnnnnnnnnnnnnnnnnnnnnnnnnnnnnnnnnnnnnnnnnnnnnnnnnnnnnnnnnnnnnnnnnnnnnnnnnnnnnnnnnnnnnnnnnnnnnnnnnnnnnnnnnnnnnnnnnnnnnnnnnnnnnnnnnnnnnnnnnnnnnnnnnnnnnnnnnnnnnnnnnnnnnnnnnnnnnnnnnnnnnnnnnnnnnnnnnnnnnnnnnnnnnnnnnnnnnnnnnnnnnnnnnnnnnnnnnnnnnnnnnnnnnnnnnnnnnnnnnnnnnnnnnnnnnnnnnnnnnnnnnnnnnnnnnnnnnnnnnnnnnnnnnnnnnnnnnnnnnnnnnnnnnnnnnnnnnnnnnnnnnnnnnnnnnnnnnnnnnnnnnnnnnnnnnnnnnnnnnnnnnnnnnnnnnnnnnnnnnnnnnnnnnnnnnnnnnnnnnnnnnnnnnnnnnnnnnnnnnnnnnnnnnnnnnnnnnnnnnnnnnnnnnnnnnnnnnnnnnnnnnnnnnnnnnnnnnnnnnnnnnnnnnnnnnnnnnnnnnnnnnnnnnnnnnnnnnnnnnnnnnnnnnnnnnnnnnnnnnnnnnnnnnnnnnnnnnnnnnnnnnnnnnnnnnnnnnnnnnnnnnnnnnnnnnnnnnnnnnnnnnnnnnnnnnnnnnnnnnnnnnnnnnnnnnnnnnnnnnnnnnnnnnnnnnnnnnnnnnnnnnnnnnnnnnnnnnnnnnnnnnnnnnnnnnnnnnnnnnnnnnnnnnnnnnnnnnnnnnnnnnnnnnnnnnnnnnnnnnnnnnnnnnnnnnnnnnnnnnnnnnnnnnnnnnnnnnnnnnnnnnnnnnnnnnnnnnnnnnnnnnnnnnnnnnnnnnnnnnnnnnnnnnnnnnnnnnnnnnnnnnnnnnnnnnnnnnnnnnnnnnnnnnnnnnnnnnnnnnnnnnnnnnnnnnnnnnnnnnnnnnnnnnnnnnnnnnnnnnnnnnnnnnnnnnnnnnnnnnnnnnnnnnnnnnnnnnnnnnnnnnnnnnnnnnnnnnnnnnnnnnnnnnnnnnnnnnnnnnnnnnnnnnnnnnnnnnnnnnnnnnnnnnnnnnnnnnnnnnnnnnnnnnnnnnnnnnnnnnnnnnnnnnnnnnnnnnnnnnnnnnnnnnnnnnnnnnnnnnnnnnnnnnnnnnnnnnnnnnnnnnnnnnnnnnnnnnnnnnnnnnnnnnnnnnnnnnnnnnnnnnnnnnnnnnnnnnnnnnnnnnnnnnnnnnnnnnnnnnnnnnnnnnnnnnnnnnnnnnnnnnnnnnnnnnnnnnnnnnnnnnnnnnnnnnnnnnnnnnnnnnnnnnnnnnnnnnnnnnnnnnnnnnnnnnnnnnnnnnnnnnnnnnnnnnnnnnnnnnnnnnnnnnnnnnnnnnnnnnnnnnnnnnnnnnnnnnnnnnnnnnnnnnnnnnnnnnnnnnnnnnnnnnnnnnnnnnnnnnnnnnnnnnnnnnnnnnnnnnnnnnnnnnnnnnnnnnnnnnnnnnnnnnnnnnnnnnnnnnnnnnnnnnnnnnnnnnnnnnnnnnnnnnnnnnnnnnnnnnnnnnnnnnnnnnnnnnnnnnnnnnnnnnnnnnnnnnnnnnnnnnnnnnnnnnnnnnnnnnnnnnnnnnnnnnnnnnnnnnnnnnnnnnnnnnnnnnnnnnnnnnnnnnnnnnnnnnnnnnnnnnnnnnnnnnnnnnnnnnnnnnnnnnnnnnnnnnnnnnnnnnnnnnnnnnnnnnnnnnnnnnnnnnnnnnnnnnnnnnnnnnnnnnnnnnnnnnnnnnnnnnnnnnnnnnnnnnnnnnnnnnnnnnnnnnnnnnnnnnnnnnnnnnnnnnnnnnnnnnnnnnnnnnnnnnnnnnnnnnnnnnnnnnnnnnnnnnnnnnnnnnnnnnnnnnnnnnnnnnnnnnnnnnnnnnnnnnnnnnnnnnnnnnnnnnnnnnnnnnnnnnnnnnnnnnnnnnnnnnnnnnnnnnnnnnnnnnnnnnnnnnnnnnnnnnnnnnnnnnnnnnnnnnnnnnnnnnnnnnnnnnnnnnnnnnnnnnnnnnnnnnnnnnnnnnnnnnnnnnnnnnnnnnnnnnnnnnnnnnnnnnnnnnnnnnnnnnnnnnnnnnnnnnnnnnnnnnnnnnnnnnnnnnnnnnnnnnnnnnnnnnnnnnnnnnnnnnnnnnnnnnnnnnnnnnnnnnnnnnnnnnnnnnnnnnnnnnnnnnnnnnnnnnnnnnnnnnnnnnnnnnnnnnnnnnnnnnnnnnnnnnnnnnnnnnnnnnnnnnnnnnnnnnnnnnnnnnnnnnnnnnnnnnnnnnnnnnnnnnnnnnnnnnnnnnnnnnnnnnnnnnnnnnnnnnnnnnnnnnnnnnnnnnnnnnnnnnnnnnnnnnnnnnnnnnnnnnnnnnnnnnnnnnnnnnnnnnnnnnnnnnnnnnnnnnnnnnnnnnnnnnnnnnnnnnnnnnnnnnnnnnnnnnnnnnnnnnnnnnnnnnnnnnnnnnnnnnnnnnnnnnnnnnnnnnnnnnnnnnnnnnnnnnnnnnnnnnnnnnnnnnnnnnnnnnnnnnnnnnnnnnnnnnnnnnnnnnnnnnnnnnnnnnnnnnnnnnnnnnnnnnnnnnnnnnnnnnnnnnnnnnnnnnnnnnnnnnnnnnnnnnnnnnnnnnnnnnnnnnnnnnnnnnnnnnnnnnnnnnnnnnnnnnnnnnnnnnnnnnnnnnnnnnnnnnnnnnnnnnnnnnnnnnnnnnnnnnnnnnnnnnnnnnnnnnnnnnnnnnnnnnnnnnnnnnnnnnnnnnnnnnnnnnnnnnnnnnnnnnnnnnnnnnnnnnnnnnnnnnnnnnnnnnnnnnnnnnnnnnnnnnnnnnnnnnnnnnnnnnnnnnnnnnnnnnnnnnnnnnnnnnnnnnnnnnnnnnnnnnnnnnnnnnnnnnnnnnnnnnnnnnnnnnnnnnnnnnnnnnnnnnnnnnnnnnnnnnnnnnnnnnnnnnnnnnnnnnnnnnnnnnnnnnnnnnnnnnnnnnnnnnnnnnnnnnnnnnnnnnnnnnnnnnnnnnnnnnnnnnnnnnnnnnnnnnnnnnnnnnnnnnnnnnnnnnnnnnnnnnnnnnnnnnnnnnnnnnnnnnnnnnnnnnnnnnnnnnnnnnnnnnnnnnnnnnnnnnnnnnnnnnnnnnnnnnnnnnnnnnnnnnnnnnnnnnnnnnnnnnnnnnnnnnnnnnnnnnnnnnnnnnnnnnnnnnnnnnnnnnnnnnnnnnnnnnnnnnnnnnnnnnnnnnnnnnnnnnnnnnnnnnnnnnnnnnnnnnnnnnnnnnnnnnnnnnnnnnnnnnnnnnnnnnnnnnnnnnnnnnnnnnnnnnnnnnnnnnnnnnnnnnnnnnnnnnnnnnnnnnnnnnnnnnnnnnnnnnnnnnnnnnnnnnnnnnnnnnnnnnnnnnnnnnnnnnnnnnnnnnnnnnnnnnnnnnnnnnnnnnnnnnnnnnnnnnnnnnnnnnnnnnnnnnnnnnnnnnnnnnnnnnnnnnnnnnnnnnnnnnnnnnnnnnnnnnnnnnnnnnnnnnnnnnnnnnnnnnnnnnnnnnnnnnnnnnnnnnnnnnnnnnnnnnnnnnnnnnnnnnnnnnnnnnnnnnnnnnnnnnnnnnnnnnnnnnnnnnnnnnnnnnnnnnnnnnnnnnnnnnnnnnnnnnnnnnnnnnnnnnnnnnnnnnnnnnnnnnnnnnnnnnnnnnnnnnnnnnnnnnnnnnnnnnnnnnnnnnnnnnnnnnnnnnnnnnnnnnnnnnnnnnnnnnnnnnnnnnnnnnnnnnnnnnnnnnnnnnnnnnnnnnnnnnnnnnnnnnnnnnnnnnnnnnnnnnnnnnnnnnnnnnnnnnnnnnnnnnnnnnnnnnnnnnnnnnnnnnnnnnnnnnnnnnnnnnnnnnnnnnnnnnnnnnnnnnnnnnnnnnnnnnnnnnnnnnnnnnnnnnnnnnnnnnnnnnnnnnnnnnnnnnnnnnnnnnnnnnnnnnnnnnnnnnnnnnnnnnnnnnnnnnnnnnnnnnnnnnnnnnnnnnnnnnnnnnnnnnnnnnnnnnnnnnnnnnnnnnnnnnnnnnnnnnnnnnnnnnnnnnnnnnnnnnnnnnnnnnnnnnnnnnnnnnnnnnnnnnnnnnnnnnnnnnnnnnnnnnnnnnnnnnnnnnnnnnnnnnnnnnnnnnnnnnnnnnnnnnnnnnnnnnnnnnnnnnnnnnnnnnnnnnnnnnnnnnnnnnnnnnnnnnnnnnnnnnnnnnnnnnnnnnnnnnnnnnnnnnnnnnnnnnnnnnnnnnnnnnnnnnnnnnnnnnnnnnnnnnnnnnnnnnnnnnnnnnnnnnnnnnnnnnnnnnnnnnnnnnnnnnnnnnnnnnnnnnnnnnnnnnnnnnnnnnnnnnnnnnnnnnnnnnnnnnnnnnnnnnnnnnnnnnnnnnnnnnnnnnnnnnnnnnnnnnnnnnnnnnnnnnnnnnnnnnnnnnnnnnnnnnnnnnnnnnnnnnnnnnnnnnnnnnnnnnnnnnnnnnnnnnnnnnnnnnnnnnnnnnnnnnnnnnnnnnnnnnnnnnnnnnnnnnnnnnnnnnnnnnnnnnnnnnnnnnnnnnnnnnnnnnnnnnnnnnnnnnnnnnnnnnnnnnnnnnnnnnnnnnnnnnnnnnnnnnnnnnnnnnnnnnnnnnnnnnnnnnnnnnnnnnnnnnnnnnnnnnnnnnnnnnnnnnnnnnnnnnnnnnnnnnnnnnnnnnnnnnnnnnnnnnnnnnnnnnnnnnnnnnnnnnnnnnnnnnnnnnnnnnnnnnnnnnnnnnnnnnnnnnnnnnnnnnnnnnnnnnnnnnnnnnnnnnnnnnnnnnnnnnnnnnnnnnnnnnnnnnnnnnnnnnnnnnnnnnnnnnnnnnnnnnnnnnnnnnnnnnnnnnnnnnnnnnnnnnnnnnnnnnnnnnnnnnnnnnnnnnnnnnnnnnnnnnnnnnnnnnnnnnnnnnnnnnnnnnnnnnnnnnnnnnnnnnnnnnnnnnnnnnnnnnnnnnnnnnnnnnnnnnnnnnnnnnnnnnnnnnnnnnnnnnnnnnnnnnnnnnnnnnnnnnnnnnnnnnnnnnnnnnnnnnnnnnnnnnnnnnnnnnnnnnnnnnnnnnnnnnnnnnnnnnnnnnnnnnnnnnnnnnnnnnnnnnnnnnnnnnnnnnnnnnnnnnnnnnnnnnnnnnnnnnnnnnnnnnnnnnnnnnnnnnnnnnnnnnnnnnnnnnnnnnnnnnnnnnnnnnnnnnnnnnnnnnnnnnnnnnnnnnnnnnnnnnnnnnnnnnnnnnnnnnnnnnnnnnnnnnnnnnnnnnnnnnnnnnnnnnnnnnnnnnnnnnnnnnnnnnnnnnnnnnnnnnnnnnnnnnnnnnnnnnnnnnnnnnnnnnnnnnnnnnnnnnnnnnnnnnnnnnnnnnnnnnnnnnnnnnnnnnnnnnnnnnnnnnnnnnnnnnnnnnnnnnnnnnnnnnnnnnnnnnnnnnnnnnnnnnnnnnnnnnnnnnnnnnnnnnnnnnnnnnnnnnnnnnnnnnnnnnnnnnnnnnnnnnnnnnnnnnnnnnnnnnnnnnnnnnnnnnnnnnnnnnnnnnnnnnnnnnnnnnnnnnnnnnnnnnnnnnnnnnnnnnnnnnnnnnnnnnnnnnnnnnnnnnnnnnnnnnnnnnnnnnnnnnnnnnnnnnnnnnnnnnnnnnnnnnnnnnnnnnnnnnnnnnnnnnnnnnnnnnnnnnnnnnnnnnnnnnnnnnnnnnnnnnnnnnnnnnnnnnnnnnnnnnnnnnnnnnnnnnnnnnnnnnnnnnnnnnnnnnnnnnnnnnnnnnnnnnnnnnnnnnnnnnnnnnnnnnnnnnnnnnnnnnnnnnnnnnnnnnnnnnnnnnnnnnnnnnnnnnnnnnnnnnnnnnnnnnnnnnnnnnnnnnnnnnnnnnnnnnnnnnnnnnnnnnnnnnnnnnnnnnnnnnnnnnnnnnnnnnnnnnnnnnnnnnnnnnnnnnnnnnnnnnnnnnnnnnnngcgaagtgacgtcggcacggtccctctatcagcaccgggcccgggccggcatgcggatcggcgacgacaagaccgtcgacctgttgcggtacaccgcttggctcgcgtgggagcggcaccatcgcgatgcctacgacgctcaccgtgagcgggcccggcaacgccaggcggagcagtcgcggtccggccgggacgtcggcgagctgccggcggtggtgaatcccgagcgccgggcgcggtgcgaacgcaaccttcgcgcgttctacgaggagtacttcccgcagacgttctacctgccctggtcaccggaccacctgaaggtcatcgcgaagctggaggcggcgattctcgagggcggcctgttcgccctggccatgccccgcggcggcgggaagacctcgatgatcgaggcggcgtgcctgtgggcgttgggctacggccatcggcggttcgtgcccatcatcgggccggacgaggggcatgcggtcgatcgcattcgcaacctgcggacggagctcgagacgaacgaccgcctggcggaggattttccggagatctgctacccgatccggtgccttgaagggatcaaccagcgtcggttgctgtaccagggccgaccgatcgtcatggacttcacggccaagcgcatcgtgctgccggacatcccggacagccgggccgcgggggcggtggtcaccacggccgggatcaccggccaggtccgcgggctgaactacaaacgccgcgatggcgtgacggtgcggccggacttcgtgatcctggacgatccacagaccgatgagtcggcccacagccccagtcagtgcgactaccgcgagcgtgtcatcaacggcgccatcctcggcctggccgggcccggcgtgcggatctcggccatcatgccgtgcaccgtcatccggccggacgacctggcggaccggatcctcgaccgcgagcgcaacccgcactggcagggtgaacggacgaaactggtctactcgttcccgaccaacgaggcgctgtggaagaagtacgaggaactccgccgcgaggatctggcgcgggacgaccgaaagctgaccaccgcgacggccctgtatgccgccaatcgcgaggcgatggacgcgggggcggtggtcgcctggcccgagcggcacaacgcggacgagctctcggccgtccagcacgtgatgaacctgcggtacgagcgcggcgaggtcgccttctgggcggagtatcagaacgagcccctgccggagaatccactctccgaggacctgctgacggccgacgagatcgcggcgaaggtgaacgggcaccgaaagggcgaggtgcccctgactgtgacgcacctgaccatgttcatcgacgtgcaggccaaggtgctgttctggctggtcgtggcgtgggaggacgatttcaccgggtacgtcatcgactacggcaccgagccggaccagaaggcggcgtacttcaccctgcgtgacgtccggcacaccctggccgtcgcggcgccccgggcggggctcgaggggtcgatccgggcgggcctggtccggctgtgcgggcggatgctgggccgggagtggaagcgggaggacgggtcggcggcccggatcgagcggtgcctgatcgacgcaaactggggccagtcgacggacgtggtgtacgagttctgccggcagagcgaccacgcgagcgtcctgacccccagccacgggaaatacgtaggcgcgtcaagcattccattcgccgagtacaagcgcaaacggggtgaccgggtcgggctgaactggcggatcccgcacacgagcggccggcgggcgatccgccacgtcgtgtacgacacgaactactggaagtcctttatccaggcgaggttccggacggcccagggcgatccgggttgcctgacgctgtttggccgccagccggagcaccaccggctgctgggcgagcatttgacctcggagtacccggtccggaccgaggggcgcggccggacggtcgacgagtggaagctccgtgccagcgggctggagaaccactggctggactgcctggtcgggtctgcggtcgcggcctcgatgcagggggcggtgctcttcggaacccaagatatgggccgcccgcggccggcgggccggcgaaagctctcggagttgcagcgaggacggcgatgaggaaggaccaggtcaaaccgcccaagccggaggagccgtcgggcctcgtctgctcgaagtgcgggtgtaagcacttctacgtagtctacacccgggcccgctggggtggccggatcgttcgccgccgggaatgccggtactgcgggcggcgggtgaccacgacggagcgggtgacgggatgataggaaggcattctgccgtttcgcgcaactttctgtagattcagctgttagcagagccagcaacctcgcagctttggctgagttgctgcgttttgccggcggtgcgacacaccttgtcggtcccccgggttacaggtaggttgggaagaacaatctctctgtcgcttcgcagtccccggggctgtgcggtattgtagatgccgtaaacacctattctcagaagggacacgcttatgcaattcaaccttctggacgaggcgtggattccggttctgcgaaccaacggcacttgtgaccgtgtcggcatccgcgaggcgctgacagaggccgggagtatccggcagatcgcggcgtccaacccgatggatcgagtggcgatcgtgcggctgctccttgcggccctgtattggtgcaagggatacccgtctccgcaggaggaggaagatcgcctcagtggggacgggcgcttcccgcctgattggttcaaaaaactcgatgactgccggaagtacttcaatctgcttggagatggcccccgtttctttcagaatgagggcctcaagaaccggccaccgaagcacaccacacattacctgatgcacgaagtgccgagcggtacgaatgcgtggcacttccatcacactaccgaccaatcgggtggcttgtgcgcagcttgttgtgccacgggtttggcccggctgccggtcttcgcgacctcgggtggcaagggaaagtcgccagggatcaactcaaagccacccctctacgtcataccggtcggcacgacgcttgcgacgactctgcgattgtcctggagatatggggatgcgtcactgggcatgccagaatgggaaacaccaggatacgaactcccccgacggggtaatgtgcccctgctgccaggaatgacctggcttcctcgcaatgtatggttgggaaaccgggaaaagaacgaaacggcctgtgtctcctgtgggcgggccgagcgcgtccttcggcgatgtgtgttcgacggcaaaggcggctccaggggtgaagaccggaggtggcgtgatccacacgtggtccccgtgccgctgggaagaaacgcgaccggaccacttcagacaagcgacgctctgaaatcgaaggatgccgcggcggggcagtgggtgagggctctggcagccattctcggacaaaggacggttgaccaaggagcgggcatctgggcagtcggcttctccacagtcaagaacgacaagtacctcgaggcaactgaactcctggtcgcgccggaacggtggccgtcgccagcggaagactggatcgcgttggcggagcagtggcaacaagaaggaagagcggtcatgcgacgggcgcgttcgccaagtgcttcctccactcgacacgaagtcgaactggacatcgttctcggtgctgttcgggcacatgtcgagtcacggcttgccagccgcatcgacgggctgctgtcagacgctgaaggtgagtgggtgaaggcaacgagagagtaccagaagatgatggcggcagtggcgatgtcgcttgcgccagggtttacgacgcgcgcgatccgccgacgcaatcagattgcccgatccggtccggacatggcgcccacatcgcggtgcaggaagggagaagcaccaccacggaaaggcggcgaacgatgacgccaacagagaagtttgtccgaacgctggaatcgcttgagcctggcagccttgggcgattgcgcagcctgggtgggcgcagcctggatgagtcagtggagggtttcgaccttttcacggggatttggtggccactgagggaacagaaccagagagcccctcgccgtgaggtggcgtggctggttgccaaagtgtatgcgtaccgcccgatgcgacaatgcaaaggagcaaggcttgccatgcagctggggaatgtgaaaggcgagagcgagccagtgatgcagcgacgacaagccaagttcgacgaactcctcctgctccctctgaccctgatcgagccagcgctgtgttgggcgctggatctgattgcgaaagacagcggtgagttggactgggtgcgcctcaccgatgagttgtccgcatgggagcgtgaagaaacgcggctcaactgggcgacgcaatacctgcacttcgggcagtgacatgctcaaaaggagaatactatgctgatcgaaatccatgggattcagaaccacagcccggccaatctcaaccgtgatgatctgggtgctccaaagacatgcttcttcggcggggtgatgcgctcacgtatctccagccagtgcatcaagaggagcatccggaccagcgagcagttcaagctgctgtgtggtgggatccgcacgcgaagactgccgcaatacctggcgtcccagatcgcagaaaaagacatgctttcgctggccactgcggtggttcaggcgtgcgggcttgcgaaggacgacgcggcaaagaacgggaagaaggatgtcatcgttttcctgtcaaagagcgcgactgcgcacatggtggatatgcttcgtgcggaagaggcggaagtgacagagaagcgagtcgccaaactctcgcgagaattcgcccgcctcgttgcacaggatcgctatgcgccggacatggcattgtcaggacgcatgctggaaccagccaagccccccaagagcaaaaagggtcgcaacgcggacacggacgaacaggaggacgagaaggccgacagcagcgccaaggacaagggggtctggaagggccttgatctagacatcgaggctgcgttgcaggtggcccatgggatatcaacccacgaagctcgtccggaagtggactacttcgtagctgcagatgacataccaggtgaggatgcgggtggtgcgcacattggcgaagccatgttcgcgtcggcctgcttctataaatacttctcgatacactgggaaacattggtggacaacttgaacgggaacagggagctggccgcccacaccgtcggggccttcattcgtggagccgcgctggcgaacccgaccgggaagcagaacagcttcgctgcccacaaccctccggacggcatcctcgtagaggtaaagcaaactcgctccacgccaatcagctacgcgaacgcattcgctgcaccggtgccgagcaagggaacgcgcgatattgtgtcgcaaagcatcgcacagctcggtcagtacgtgcatgacctggacaccgggtacggcaaggagcgcgaggacaagcggttctggttctcccccaatctccggtatccgctcacctatcagcacgagaagcaggagaccccctgtgctgacgaaaacgtaggatccctcgatggcctagtggctcttgtcgtgaaggaaatcgggtttgactggtcgcgcgttcagtccgtgacggtcgagtgaggagatgcgccgatgaatgcgaatacgctcctgctccgcctcgaaggtcctcttcaatcgtggggagaccagcaatcgagattcgtcgtccgaaggacttccgaagctccgaccaaatcggggatcgccgggctgctctgcgctgcaatgggcgtgtcgcgctccgatgctcggcaacggctcatcaagttgaacgctttgatgatgggcgtccgcatcgatcgtccaggcgtgcgctggtgggactaccacacggtgggggcgggaatgcagatgcaaagcgcggagggaatcggaaagaccaaacccggcccgattctgacgcgtagggaatacctctgcgacgcgagcttcgtggttgctttgcgtggcgattcctcactgatcgtttcgttgcacaaagctgttcagcatccggtgtggccggtgtatctcggccggaagtcgtgcgcggcatcgcttccactggtgggctgccatgacgatccggatgtgggcgggtttcctgacctggaatctgcgcttcgatctgttccctggcggagccgccacgcgggagaggccgtgcccgatgtagtcgaatgcgtgatcgaatggcggggtgccgcagcgggtgaggttgctccactagacggggaagtctggtacgatgtcgcagactcgtttgatgtgccagcacactccccaagaatggttgttcgcaagaagatgggcgtcggctccggcacggacatccgagtcggtgcggcacgccagagtcgccttccggcgccgctgcgcccccgcgccgattacgcgaatgctgagtatcgccggaagcgtcagagccgcctggacgcagatgggggcctgtgtgttttctgcaagtctccggcgacgacggttcagcatgtgacgtatcgccgcgccggcggcgatgaggagcaagatgatttacgctcgctctgccggttgtgtcacgacgcggtgacgatgatcgagtacgggatgggcatggggctcgaccggatcaaccccgaagacagacaatggcgcgaccagattatcgccaagcgtgaggagatcattcggtttcgttcgctggagactcgacgtcgacggcttagcgccgaggaggtcgaatgatcatgtatcactcctatctgctcattgatactggtgacaatccggaccgcccgaggcccgggcgtctctggttacgaaatgtctatcgagtacaccagcggctttgcatggctttcccgaatgatgccagaaagcgagaggatccagagtttctcaaaccgtacgatccgaacggctttgtccacgttcacggcagccgcacaaccgaccaggcgtttctcttccggattgacgcgcatgcggggggcagcgtggtcatcgtgacacagtctgccgtaaaaccggattgggcgtatgccttccagaacgcgatgtatcttctgcatgccccgccgtcggagccgcgtgaggcacaactcacgtttccagccggcacgctgttgggattccggctgctggccaacccgacgcgccggttgcgagagagttctcgtgacgccaagggagaacctatcgaaggacgatgggcgggaaaacgggttcccgtgccgacaggcaagctggatgattggctgacacggcgatcggagcgttgtggttttgccgtcgagactttgtgggaagctcggccgggatttgtttacttcagcaagtcggcgagccggggcgagggacagtgccttagatccgttcgatatgaggggaagcttcgcgtcagcaactctgcagcatttcgcgagacgcttatccggggcatcgggccgggcaaggcgttcgggttcgggttgctgtcggtcgcgccggtgcgcgaggggggctgaatggggcatgcgtgaagggtgcggctctttggcaagtgaatagtgtggtggccaatggggaggacaggccatggacgatctgcatcggttgcccaggtttggggacagcctggggtatctgtacgtcgagaacgcccggatcgatcagcacgagatgtcggtggccgtgcatgaccaggagggcttcaccccggtcccggccgcggccctggccgttctcatgctggggccggggacgcggatcacccacgccgcggtcaaggcgctggcggacaacaactgcctgattgcctgggtcggccaggagggcgtccgcatgtatgcccacagcacgggcggaacgcggagcgcacgccttttgctgcgtcaggcggcgttggcgctggacccggaccagcgactggccgtcgtgcgccggatgtacgaaaagcggttcggcgctcgtctcgagccggggctcacgctccagcagattcgcggcaaggaaggcgtgcgcgtccgtgaggcgtacgccaaggcgagcctggcgacaaacgtgccctggcagggccgcttctaccagcgcggcaactggtccgcggccgacccggtgaaccgggcgctgtccgcgggaaatgcgtgtctctacgggctgacgcatgcggcgattctctcggcggggtactcggcgggcatcgggttcattcacacgggcaagcaactctcgttcgtgtatgacgttgcggatttctacaaggtggagttgatcgttccggcggcctttgaggtggcctcgaccgttctgacggacgtggagcggaacatgcgaatcgcctgccgcgaccggttcgcacattcccggttgctgggccgcatgatcgaggacattcaggacgtgctcaacgtggaaggtcggcccgttcggattgatgagaactttgatgaggacggggcggcgcccggggcgctgtgggacccggatgggggaggcgaggaaggggacgggctggcgggaggccggaactatggtgatcctgattcttgagcgtgtgagcccgggcctgcggggagagctgacgcggtggatgatccagcccaggacgggggtgtttgtgggccggttctcggcgttggttcgcgacaagctgtgggatcgagtgcagaagtcgatcaaggccggggcagggatcatggtgtacagcacgaacacgccgcagggctatgccgtgcggacctgcgggcggccggatcgagacctcgtggacttcgagggtctgattctggcaaaaacgcggaaaagggagtagattttcagcgtattccccacgcacgtgggggtgaaccgagcatcggggacgaatgagatggacgaggcaacgtattccccacgcacgtgggggtgaaccgcaagtgccctccgtacatgcgcagtgctacgtagtattccccacgcacgtgggggtgaaccgtttcggcggatcgtcgggccgggaccgtgcccagtattccccacgcacgtgggggtgaaccggattagcctctcacgatgatttggtcgcccacgtattccccacgcacgtgggggtgaaccgatcgccgccgccaggcgcggtcagacgtatcgggtattccccacgcacgtgggggtgaaccagctgagtctatggctggcgtctcatacgtgacgtattccccacgcacgtgggggtgaaccgccatcgcaccgaacctcacgcttcgaggcatggtattccccacgcacgtgggggtgaaccggtgtggccggtggccagcgccacgtcgcccgggtattccccacgcacgtgggggtgaaccgcaactgcttgaacagatcaaagggctgggcacgtattccccacgcacgtgggggtgaaccgccggcggacacgaccgagacgcggaacctgtacgtattccccacgcacgtgggggtgaaccgatggactgaatggaccggatggacggaatggacgtattccccacgcacgtgggggtgaaccgaagatggtgaataagcgcatcaagtcgcgcatcgtattccccacgcacgtgggggtgaaccgcggagcagcacggtctgacgtttgtgcaattcgtattccccacgcacgtgggggtgaaccgcacacctaaggatttgctagacatcacacactcgtattccccacgcacgtgggggtgaaccgcaaaaatcggacacgcctacgggtaggcgaacgtattccccacgcacgtgggggtgaaccggagtttatcatctcaggctttgagagccggctcgcacgtcggcggaaaggtgcgaacacatgattgacgaaccctccgatgcgcagatgcggtttcttgcaagcctgaagtacgacggggagctgccgcgcacaaagactgaggccagtttcctcatcgatggtcgaaaggccggtaaggactcggccaaactcgaaaaggaactggagcgacttcggcagaagacccagcgggaatggttcaaacgcgagcgtgattactgccgaatggaggttcgacaggcacgcgactcggaaggaatgatcgcgggctttcgaatccgtgttggaaggcgctgtgatgccgcgaagcagtatcatggtgcattcgtaccgattcaggttgcgatgaaacatccccaggtgctgcctccctacgagaggatctgtcaacactgggcgtgtgaatgcgaaatcgaggaagtgctggaatctgatcgccttgcaaccgacactccgatggtcatcaagccaggtcgaataacgacggttcgaaagtggcgtcggaaccgtcatccgtttttgacgttgctcgttctcgccgtgcttgcctattgcgtttaccaactgttgaagacgtgagctgaccgagaagcttaagtcactgcgttcatgcgcttcttgcatgtctaccggtgtaacaatctcgccgagaatccctgaacccgcttgaggcgcacccgcgcgaaggataagcagccgatagacaaccccaccgggccatcccggaggcgagcgggcggcggctgatcaccgtcaaaccgtcgagccagcaagtgatacgccgtgcagggctgcacacctgcacggcgttttttgttgcgccttcgccttccggatggctcggtgcggagagcatcgaagcccgaaacaccgttgaaatcggaggaacccatgtcgttcggacccgtaaccatcgccacgctcgacacggtggacatgcaggcgcccggggcgccggggctgtccgcccagcagatcctcaaccagctgggcgagttcgttctcacgccgccgaccacggacgccgacggctcgccgctgaccggtctgacctttgcccaggcggtggtcattcaggcggacgcggacgtggcggagttgttccgcaacgacttcgagggcgctatgcagttcaacggggccaaggtgttcgagatcgagttggccgagggcatgccggtgacccagccgttcgcgatcggcgagccgggcaagccgtactcggtcctggcccgggtggcggaccaccttcgtggggagtagcccggcgagcgtggtcacgctccacacgcggcggcggccggcgtggatgtggtggctgatcgggtgggcccgccggctgcacggactgaccggacgactggtcgcgtacctggaacggtgaagcgatggcagaggacctgaaagagacgattcgcgagactgcccagggccccaagcgggtgaccggcgactccggctccgtcgagcagcaggatctcggccagctcatcgaggcggaccggtatctcgcgtcgaaggacgcaggcaagaagggcctgaaggcaatccgtcgcacgaaggtcatccccccaggagcgagttgacgtgcggaagtggtggagacaacgcggacgcaaggcgacccccaagcacggctccgtgctcggccgggtcgtacggttcgtccgcggctggtacgacgcggcccggaccaccgacgagaaccgccggcactgggccgccgccgacaatctctccgcccgggcggccaacagcctggaggtccgccggaccctgcgggcccgggcccgatacgaggtcgccaacaacagctatgccaaggggatcgtgaagaccctggccaacttcgcggtagggaccggcccgcggctccagctgctgaccgacgacgagagggccaaccggctgatcgagcgggagttcatccgctgggcgaaggcggtcagcctggcccacaagcttcgcaccatgcggatggcccagtgcgagaccggcgaggtcttcgcgatccaggtcaccaatccgaacgtcgacgcaccggtcaagctcgatctcaaggtcatcgaggccgactacgtgaccacgccgtggtcggtgaagacgcggctcgatgacgagcggatggtcgacgggatcgagttcgacgcgtacggcaacccgtcgaagtattacgtgcttcggtaccacccgggcgacgggccgtcctggagcggctcgaagccggaccacgacgagctcgaggccaaggacgtgatccacctgttccgggtcgatcggccgggccaggtgcggggcatccccgagatcacgagctcggtttcgctcttcgcgatcatgcgtcggtacacgttggccgtgctcggcgcggcggagcaggcggcgctgcctggcggtgtcgtgcacacggactccacggccgacccggacgagaacgtcgagccgatggaccagatcgaactcgaccgcgggacgtggctgacgatgccgctgggctggcggatcagccaggtcaaggcggagcagccgaccacgacgtacggcgacttcaagcacgaggtgatcaacgaggcggcccgctgtatcgacatgccgtacaacatcgccgccggcaacagctcgggctacaactacgcttcgggccggttggatcaccagtcgtttttcaaggccatccggatcgaccagaaccacctcgacgacgtcgtgctcgatcgggtgttcgcctggtggctcaacgaggccgtcctgatcgaggggtacctgccgcaatgggtacgtcagcgtggggtgtacctgccgcggcagtggttctgggacgggtacgagcacgtcgacccggccaaggaggccaacgcccaggacacccacctgaacaaccatacgaccacgctcgccgccgagtacgcgaagaagggactggactgggaggaggagcttcggcagcgggcccgcgagctgaagctcatgcgagaactgggactgacgccggccgacgtgcgggcgccatcaggagcggacgacgatgccgcagacgaagacgaggaagaggacgaagagtccgagtccgccgcacgcactgcagttgcagtgtagcgcgacgatcgagtgcctggcggccgaggcgggccagccgcccaggaggccgcggttcacgatccacgcgtaccacggcggcgccatgcgcgtggccgggttctaccggccgatcgtcatcgacctggcgggcctgaagtcgaacaagcgggtgccgattctcctggaccacgacccgacgcagatcgtgggccaggcggacgacgtgtcgatcgagccccgggagatcacgctcgccggggtagtgaccggcgacgacgacgccgcgggcaaggtggtcacccacgcgaagaacgggttcgtgtggggcgcgtcggtcggtgtgagtatccacaagcttgaggccgtggacgagaagacgagcgtcaccgtcaacggccagacgttcaagggcccgatctacgtggtccgggccggatcgcttcgagaagtgtcgtttctggcaattggcgcggacgagaaggcgtccggcaagatcgcagcgggacatgccgcggaggtaattgacatggaattcaacgagtggctcaaggccaaggggtttgatccggacgcgctgaccgacgaccagcgggcgagtctccaggcgatgttcgacgccgagcaggcgaaggacagcgacgcgccgcccgagaatccgccgaagccggcaccgaagccgaaggtcgaggccgcgggttcggacgacgatgaaacgtccgttgccgacgatatccgggccgaggtggtcgcggagaagaaacggattcaggagatccaggccgcctgcaagggtcatcccgacatcgaggtgaaggcgatcgaggaggggtggacgcgcgacaaggcggagctcgaggtcctgcgagccggccggcccaaggctccggcgatccacgccgcggagaacgtgaccaacgggcacgtcctcgaggcggcctgcctgctgaccgccaagcacgccgagaccgagaagcagttcgacgagaagacgctggacaccgcgtcccggcggttccgcggcgggatcggcttgcaggagctgctgctcgaggcggcctgggcgaacggcttcaccggccggaacttccgggaccaccgggcggtcttgcgggcggcgtgtggtcgagacctgcaggctgggttctcgaccatcgatatcagcgacattctgtcgaacgtcacgaacaagttcttgctcgagggattttttagcgtggagcggacgtggcgaaacatctgcgccgtccgcaacgtcagcgatttcaagaccgtcacgagctaccggctcatcggcaaggaccagtacgagacggtcgctccgggcggcgagctcaagcacgggacgctgggcaatgagaaatacaccaaccaggccgacacgcacggtctgttgctggccatcgaccgccgggacatcatcaacgacgacctgggggcgatcaccacggtgccccgaaaactcggtcgcggctccggtctgaagatcaacgacgagttctggaagaagttcctggccaacagttcgttcttcaccaccggcaacaagaactacctgacgggtgcggacacggtgctgggcattgacgggttgaccaaggccgaggtcgcgttcatgaacctggtcgactccgacgggaagccgaccgggatcatgccggtgatcgtgctggtgccgccggcgctcagtgcgacgggcaccatgctctacaagtcgctggagatccgggacacgaccgcgagcacgaagtacccggtggccaacccgcaccagggcaagttccggacggaggtcagccggtacctctcgaacagccactacaccggccacggcgagaaggcgtggtacctgctggccgacccgaacgacgtggccgtcatcgaggtcgcgttcctgaacgggcaggagtcccccaccatcgagacggccgaggcggacttcaacgtgctgggcatccagatgcgcgggtaccacgacttcggcgtggagctgcaggagacccgggccggcgtgaagagcaagggtgaagcgtagtcgacgagcatcaggggacacgacgctcggggatgacaagacgcaatccgtaacacggagaaaccatcatgcaggcgacgtttattcaggaaggccacgcgatcgaccacacgccgggtgggccggtggcggcgggccaggtcgtggtccagggcagcctgatcggcgtggcgaagacgccgatcgaggcgaaccggctcggggccatcgcggtccgcggcattttcgacgtggtcaaggccaacgagcagatcagtctcggggcggccgtgtactgggacgccgacggcgacccgtacggcggcacccccagcaccggggccctgaccacgtccgcgggcggcaacatttttgtggggttcaccatggccgcggccgaggcgacggacccgacggtccgggtggtgtggtccggccccctggcggtgaccaacaccgtgcacaacgcgttgacggccgcgatcactgatccgggggatgccggtgcgatccccgtgacggacagcggcacgtgcccgctggtgaccactgaggttgggggcgagacccgcaccctggcggcccccacgtatgccgggcagctgctcgcgctggccatgaagacggacggcggcgactgcgtggtcgcctgcgccaccggtctcaatcagaccggcaacaacagggccacgttcaacgacgctggagacgtgctcgttctggtcggcatcgaggtcggctcgaacaagcggtggcgggtggtcagcaacgacggcgtgacgctggcgacggtgtaggacgaaccgtggtcgacctgctcgaacaaggtagccgctggctggaccggcagcgtcgcaagagcatggcccgcgaggtggtctactcccgcgggtcggcgagtgtgacgctgctggccaccatcggtcgcaccgagttcgagcagacggaccagtacggcgtggtccaccgcatcgagtcgcgggactacctggtcaccgcggaggatctggtgctggacggtcagctgacgacgccgaaggccggtgaccagattcgcgaaagcgatggggcggcgacgcgggtgtacgccgtgctggccccgggcgatgagccgccgtggcgctggtcagatccgtaccgggtcaccctgcgaatccacacgaaggccgttggagacgagtgacatgatcgggcagttcgacgcattgctgcagccggtgcttcaggccgggttcgcgggcatgaccgcggtactgctgggcacgctcatctggctggccaagcggtttttagaccagtcagacaaaactcgggaaacgcaagcagcaggtgatgcccgcatggcggagcagatgcagcggacggccgaggtgatctcccagaacacggtggcgatcaccaatttgctggaggcgaccaacgcccagaagatcgagttgcggcgcgtggttgatgaactgttgtcccggccgtgcatgttgaccgtggaaaagtgaaacgatgtcggtcctgagcgaaatcgcacaagcccttgccaatgatctgaacgcccagccgttcagccaggcgttcaccgcttgccggcactaccggccgcagttcggtctggacgaactagcggtgctgcgggtctccgtggtgccgcggtcactcacgttggcgacggcgagccgggccaggagcacgtgggaggtcgccgtcgacgtggccatccagcggcggctgctggacccgggcaacatcgtcgagatcgacacgctggtggccctggtggaagaagtgatcgcattcgtcgacggccgtcgcctggcggcgtatccgcaggcggccttcgtcggcattgagaacgatccggcatacgccctcgatcacatggacgagttgagcgtattcacgagcgtggtcaccgtgcggtaccgcgtgctgcggtaggaggtaacggtcatggaagttttcgggttggatgccaagctctattacaaagagggcggccagggcggcggcggatcgtggaacgagttggacaacgccaaggatgtcaccacgtccgtcgagaaggagatggcggacctcaccacgcggaaggccaagggctggcgtcagcaacgcggcaagctcaagaacgcaacggtcgactgggagatggtgtgggatgatgaggatcctggcttcaccgcgatcaagagtgcgtttttcggtgatgccatcatcggcctgcaggtgctctccggtccgctggccgagggtgggcaggggctccagggcgatttcgagatcacgaagttcacgcgcaacgagcccctggcggaggggctgaccgtcagcgtttcggccgtgccggcttatgccgacccgccgccggcttgggtgccgtagaaacggacgaattgcatcgggtgcaactggagaagtgacatgccgaccagtcgtttgagcattgcgggggacatcggcggggcgtcgatcgccgcgacgatcctgcgggcggcctccgggcagatcaaccacgacgtgcaactgcccgcggcgaaggcgggcaccctgaccacgcgggtcgggcccaatgaggggacgatcacgctctcgtccggccacggcatcgccagcgagcagatcgttgatctctactgggacggcggccggaaacggaacgcggtcgtcggcacggtctcgggcaacgacgtgcccgtcatcggcgatgatggcgacgcgttgcccgaccaggacacggcgatccgcgtggcgccacaactcatcatcgacaccgatttcgtcgggaacctggttgagatgatcggcgcgctgtgttcgcgtcggggtcggttgcagtttgacgaagagagcgcgcaggccctgaatgtcgacctggtggccaacgagccgtggttctgggcctccggtggcacggccacgaatccgcttgccgacaaggtcgtcgttggctgcattgcgtcccaggaccacaccgtggcgaccagcctgaaactcggagtcctgtacaacagcgatcagtgaccatgcgacacttcaccgacaacgagggccggcagtggagttttcggctggatgtgagcgtgatccgccgggtccgcacgatggccagctgcaacctgttggccatcttcgataaggcggacgacgtgctcggccgactgggtatggaccccatcctgctggccgacgtgctctacgccatctgcaagcccgaggcggacgcccgcaacgtcacggacgaggacttcggccgggccctgtacggccaggccatcgcggacgcgacggacgcgctgctggaggccctcgcggattttttcgagccccggcgggcccggctgcttcgggcgatcctgacgaagatgcagaaggtacggaacacggcccaggagatgatcgaggcaaagctggaaagcggcgcgatcgaggccgagattcagcaagcgctgcagagtgcgagcgagccctctggaaagccgccgggatcctcggcgtcgaccccggccccttcagctggggcgagctgatctacatggcggagcaacgggaccgccggagctggcggatgacttcggaggtgatggccctgctggcgaactgccatcgcgacccgaaaaagacacgggcctttcggtcgagtgatttcgacccgtacatgcggaaggcgaaagtcgtgaaagcacccatcactatcctgagagacattttcattaacgggcgagacccagaggagatcgaatcatgaactttcccagtcccatcggatggctgaccgggctgctgagctggttcggcgctgtgtttgtgttcctgtccgcgctgctggccgggggctgcgccccgcaggcgacggagctggagcgcttttcggatcgcgtgtttgtcgaggtcattggaccggccgtccagaaagccatcgccgaaacgagcactcgaacggcaacgctccagggcggcgcccaggtcatcgagccgggctactccatcgacgtggagggcttctggggcacgggtgtgaaggcatcgacggtggttcgtgtgcgcggcgtcagcgggcagttgaccggtcacgcccaggcggaccagggccagccagcgacggtgccgccgccggcgacccgcgaagagtcgaccgaattgccggggccgggcggctgaaatgccactgcgacgcggcgtgcgcccgggtcatgaaacgcggactggcgggctatcgtgggttcgggctgcacgccgcacgcttgagtcgggcggtgggaaattgggagtgaggtcgcagtacagtcatgacgtgccgaatcatcctggtcatggccttggcgatgctcgccggttgcgcttcgcaacgggcgagcgtcgccactgcccgtcagaccgccggcggcgaggccggcatgtcccagcccgccggcgattccgacgccatcgcccagagcggcttgctgaatctcgtttccgatctgcgggccgccctcgatgcctacaccgctctcgtgcagaagaaccagcaggccgggcgcgacatcgtgaccgaaaaccacggcgataagtgggtgaaccgtattctggcgctgtcctggctggtctatccgttcgtgtggcggcccatccgaaaccattttgatccgaaacgaccccggtcgccggagcaggagagttgacatgcgggaacatgagatacccgtcgcgtccggttcgggattcacaccgaccacactggaaggcgcccagaacaacaccatcccggccgacacggtggtcgtggcccggtggggcgccgcaatccagaaactcctgctggatctgcccggatacggaggcgagtgctgggttgccctggaggccgagacggtcagtgccgaggcggtccaggcgatcaaactcgatacggaccgcacgcgactcgtggtcggggccgagcggccgcacatcctgacgaagatcgcaatcaagagctcggtagagctggtgctggccggcgccggcaagaatgccacgctgctggggtggacgtgatgctcacgcgcaagcccaccagccccgtccgcaacaagctggcccccctgggctgggcgcacgccatcggcctgaatgtcgatgagggcagtggcacgactctcgcgaacgtcagcacgatccgcaccggcacggcgagccacttcgactttacggtcaatgcggccggtgcctcgtggggtgtggacgctaacgagggtccgtacgtggacctgccggatggagcagcaggctgggcgaatagcagcggtaccgataagacgtatccgcgtggcaccatcgtactccgggtgcagcttaacgatccaaccgcggctgcttcaccgatcttttcgctcgggcgaaaccccatcgcctcgtaccctgggcggatgcggttgcgataccaggccggaaccaccaacgcattcgacgtgactcacacatttgatcaagcgggcggtttcccagctgtcacccggctctcagtgccgatggcattatctgcgggaca

SEQ ID NO: 989 - DNA, 103529 bp, Artificial Sequence
  Synthetic Oligonucleotide
  misc_feature (1)..(83632): n is a, c, g, or t
nnnnnnnnnnnnnnnnnnnnnnnnnnnnnnnnnnnnnnnnnnnnnnnnnnnnnnnnnnnnnnnnnnnnnnnnnnnnnnnnnnnnnnnnnnnnnnnnnnnnnnnnnnnnnnnnnnnnnnnnnnnnnnnnnnnnnnnnnnnnnnnnnnnnnnnnnnnnnnnnnnnnnnnnnnnnnnnnnnnnnnnnnnnnnnnnnnnnnnnnnnnnnnnnnnnnnnnnnnnnnnnnnnnnnnnnnnnnnnnnnnnnnnnnnnnnnnnnnnnnnnnnnnnnnnnnnnnnnnnnnnnnnnnnnnnnnnnnnnnnnnnnnnnnnnnnnnnnnnnnnnnnnnnnnnnnnnnnnnnnnnnnnnnnnnnnnnnnnnnnnnnnnnnnnnnnnnnnnnnnnnnnnnnnnnnnnnnnnnnnnnnnnnnnnnnnnnnnnnnnnnnnnnnnnnnnnnnnnnnnnnnnnnnnnnnnnnnnnnnnnnnnnnnnnnnnnnnnnnnnnnnnnnnnnnnnnnnnnnnnnnnnnnnnnnnnnnnnnnnnnnnnnnnnnnnnnnnnnnnnnnnnnnnnnnnnnnnnnnnnnnnnnnnnnnnnnnnnnnnnnnnnnnnnnnnnnnnnnnnnnnnnnnnnnnnnnnnnnnnnnnnnnnnnnnnnnnnnnnnnnnnnnnnnnnnnnnnnnnnnnnnnnnnnnnnnnnnnnnnnnnnnnnnnnnnnnnnnnnnnnnnnnnnnnnnnnnnnnnnnnnnnnnnnnnnnnnnnnnnnnnnnnnnnnnnnnnnnnnnnnnnnnnnnnnnnnnnnnnnnnnnnnnnnnnnnnnnnnnnnnnnnnnnnnnnnnnnnnnnnnnnnnnnnnnnnnnnnnnnnnnnnnnnnnnnnnnnnnnnnnnnnnnnnnnnnnnnnnnnnnnnnnnnnnnnnnnnnnnnnnnnnnnnnnnnnnnnnnnnnnnnnnnnnnnnnnnnnnnnnnnnnnnnnnnnnnnnnnnnnnnnnnnnnnnnnnnnnnnnnnnnnnnnnnnnnnnnnnnnnnnnnnnnnnnnnnnnnnnnnnnnnnnnnnnnnnnnnnnnnnnnnnnnnnnnnnnnnnnnnnnnnnnnnnnnnnnnnnnnnnnnnnnnnnnnnnnnnnnnnnnnnnnnnnnnnnnnnnnnnnnnnnnnnnnnnnnnnnnnnnnnnnnnnnnnnnnnnnnnnnnnnnnnnnnnnnnnnnnnnnnnnnnnnnnnnnnnnnnnnnnnnnnnnnnnnnnnnnnnnnnnnnnnnnnnnnnnnnnnnnnnnnnnnnnnnnnnnnnnnnnnnnnnnnnnnnnnnnnnnnnnnnnnnnnnnnnnnnnnnnnnnnnnnnnnnnnnnnnnnnnnnnnnnnnnnnnnnnnnnnnnnnnnnnnnnnnnnnnnnnnnnnnnnnnnnnnnnnnnnnnnnnnnnnnnnnnnnnnnnnnnnnnnnnnnnnnnnnnnnnnnnnnnnnnnnnnnnnnnnnnnnnnnnnnnnnnnnnnnnnnnnnnnnnnnnnnnnnnnnnnnnnnnnnnnnnnnnnnnnnnnnnnnnnnnnnnnnnnnnnnnnnnnnnnnnnnnnnnnnnnnnnnnnnnnnnnnnnnnnnnnnnnnnnnnnnnnnnnnnnnnnnnnnnnnnnnnnnnnnnnnnnnnnnnnnnnnnnnnnnnnnnnnnnnnnnnnnnnnnnnnnnnnnnnnnnnnnnnnnnnnnnnnnnnnnnnnnnnnnnnnnnnnnnnnnnnnnnnnnnnnnnnnnnnnnnnnnnnnnnnnnnnnnnnnnnnnnnnnnnnnnnnnnnnnnnnnnnnnnnnnnnnnnnnnnnnnnnnnnnnnnnnnnnnnnnnnnnnnnnnnnnnnnnnnnnnnnnnnnnnnnnnnnnnnnnnnnnnnnnnnnnnnnnnnnnnnnnnnnnnnnnnnnnnnnnnnnnnnnnnnnnnnnnnnnnnnnnnnnnnnnnnnnnnnnnnnnnnnnnnnnnnnnnnnnnnnnnnnnnnnnnnnnnnnnnnnnnnnnnnnnnnnnnnnnnnnnnnnnnnnnnnnnnnnnnnnnnnnnnnnnnnnnnnnnnnnnnnnnnnnnnnnnnnnnnnnnnnnnnnnnnnnnnnnnnnnnnnnnnnnnnnnnnnnnnnnnnnnnnnnnnnnnnnnnnnnnnnnnnnnnnnnnnnnnnnnnnnnnnnnnnnnnnnnnnnnnnnnnnnnnnnnnnnnnnnnnnnnnnnnnnnnnnnnnnnnnnnnnnnnnnnnnnnnnnnnnnnnnnnnnnnnnnnnnnnnnnnnnnnnnnnnnnnnnnnnnnnnnnnnnnnnnnnnnnnnnnnnnnnnnnnnnnnnnnnnnnnnnnnnnnnnnnnnnnnnnnnnnnnnnnnnnnnnnnnnnnnnnnnnnnnnnnnnnnnnnnnnnnnnnnnnnnnnnnnnnnnnnnnnnnnnnnnnnnnnnnnnnnnnnnnnnnnnnnnnnnnnnnnnnnnnnnnnnnnnnnnnnnnnnnnnnnnnnnnnnnnnnnnnnnnnnnnnnnnnnnnnnnnnnnnnnnnnnnnnnnnnnnnnnnnnnnnnnnnnnnnnnnnnnnnnnnnnnnnnnnnnnnnnnnnnnnnnnnnnnnnnnnnnnnnnnnnnnnnnnnnnnnnnnnnnnnnnnnnnnnnnnnnnnnnnnnnnnnnnnnnnnnnnnnnnnnnnnnnnnnnnnnnnnnnnnnnnnnnnnnnnnnnnnnnnnnnnnnnnnnnnnnnnnnnnnnnnnnnnnnnnnnnnnnnnnnnnnnnnnnnnnnnnnnnnnnnnnnnnnnnnnnnnnnnnnnnnnnnnnnnnnnnnnnnnnnnnnnnnnnnnnnnnnnnnnnnnnnnnnnnnnnnnnnnnnnnnnnnnnnnnnnnnnnnnnnnnnnnnnnnnnnnnnnnnnnnnnnnnnnnnnnnnnnnnnnnnnnnnnnnnnnnnnnnnnnnnnnnnnnnnnnnnnnnnnnnnnnnnnnnnnnnnnnnnnnnnnnnnnnnnnnnnnnnnnnnnnnnnnnnnnnnnnnnnnnnnnnnnnnnnnnnnnnnnnnnnnnnnnnnnnnnnnnnnnnnnnnnnnnnnnnnnnnnnnnnnnnnnnnnnnnnnnnnnnnnnnnnnnnnnnnnnnnnnnnnnnnnnnnnnnnnnnnnnnnnnnnnnnnnnnnnnnnnnnnnnnnnnnnnnnnnnnnnnnnnnnnnnnnnnnnnnnnnnnnnnnnnnnnnnnnnnnnnnnnnnnnnnnnnnnnnnnnnnnnnnnnnnnnnnnnnnnnnnnnnnnnnnnnnnnnnnnnnnnnnnnnnnnnnnnnnnnnnnnnnnnnnnnnnnnnnnnnnnnnnnnnnnnnnnnnnnnnnnnnnnnnnnnnnnnnnnnnnnnnnnnnnnnnnnnnnnnnnnnnnnnnnnnnnnnnnnnnnnnnnnnnnnnnnnnnnnnnnnnnnnnnnnnnnnnnnnnnnnnnnnnnnnnnnnnnnnnnnnnnnnnnnnnnnnnnnnnnnnnnnnnnnnnnnnnnnnnnnnnnnnnnnnnnnnnnnnnnnnnnnnnnnnnnnnnnnnnnnnnnnnnnnnnnnnnnnnnnnnnnnnnnnnnnnnnnnnnnnnnnnnnnnnnnnnnnnnnnnnnnnnnnnnnnnnnnnnnnnnnnnnnnnnnnnnnnnnnnnnnnnnnnnnnnnnnnnnnnnnnnnnnnnnnnnnnnnnnnnnnnnnnnnnnnnnnnnnnnnnnnnnnnnnnnnnnnnnnnnnnnnnnnnnnnnnnnnnnnnnnnnnnnnnnnnnnnnnnnnnnnnnnnnnnnnnnnnnnnnnnnnnnnnnnnnnnnnnnnnnnnnnnnnnnnnnnnnnnnnnnnnnnnnnnnnnnnnnnnnnnnnnnnnnnnnnnnnnnnnnnnnnnnnnnnnnnnnnnnnnnnnnnnnnnnnnnnnnnnnnnnnnnnnnnnnnnnnnnnnnnnnnnnnnnnnnnnnnnnnnnnnnnnnnnnnnnnnnnnnnnnnnnnnnnnnnnnnnnnnnnnnnnnnnnnnnnnnnnnnnnnnnnnnnnnnnnnnnnnnnnnnnnnnnnnnnnnnnnnnnnnnnnnnnnnnnnnnnnnnnnnnnnnnnnnnnnnnnnnnnnnnnnnnnnnnnnnnnnnnnnnnnnnnnnnnnnnnnnnnnnnnnnnnnnnnnnnnnnnnnnnnnnnnnnnnnnnnnnnnnnnnnnnnnnnnnnnnnnnnnnnnnnnnnnnnnnnnnnnnnnnnnnnnnnnnnnnnnnnnnnnnnnnnnnnnnnnnnnnnnnnnnnnnnnnnnnnnnnnnnnnnnnnnnnnnnnnnnnnnnnnnnnnnnnnnnnnnnnnnnnnnnnnnnnnnnnnnnnnnnnnnnnnnnnnnnnnnnnnnnnnnnnnnnnnnnnnnnnnnnnnnnnnnnnnnnnnnnnnnnnnnnnnnnnnnnnnnnnnnnnnnnnnnnnnnnnnnnnnnnnnnnnnnnnnnnnnnnnnnnnnnnnnnnnnnnnnnnnnnnnnnnnnnnnnnnnnnnnnnnnnnnnnnnnnnnnnnnnnnnnnnnnnnnnnnnnnnnnnnnnnnnnnnnnnnnnnnnnnnnnnnnnnnnnnnnnnnnnnnnnnnnnnnnnnnnnnnnnnnnnnnnnnnnnnnnnnnnnnnnnnnnnnnnnnnnnnnnnnnnnnnnnnnnnnnnnnnnnnnnnnnnnnnnnnnnnnnnnnnnnnnnnnnnnnnnnnnnnnnnnnnnnnnnnnnnnnnnnnnnnnnnnnnnnnnnnnnnnnnnnnnnnnnnnnnnnnnnnnnnnnnnnnnnnnnnnnnnnnnnnnnnnnnnnnnnnnnnnnnnnnnnnnnnnnnnnnnnnnnnnnnnnnnnnnnnnnnnnnnnnnnnnnnnnnnnnnnnnnnnnnnnnnnnnnnnnnnnnnnnnnnnnnnnnnnnnnnnnnnnnnnnnnnnnnnnnnnnnnnnnnnnnnnnnnnnnnnnnnnnnnnnnnnnnnnnnnnnnnnnnnnnnnnnnnnnnnnnnnnnnnnnnnnnnnnnnnnnnnnnnnnnnnnnnnnnnnnnnnnnnnnnnnnnnnnnnnnnnnnnnnnnnnnnnnnnnnnnnnnnnnnnnnnnnnnnnnnnnnnnnnnnnnnnnnnnnnnnnnnnnnnnnnnnnnnnnnnnnnnnnnnnnnnnnnnnnnnnnnnnnnnnnnnnnnnnnnnnnnnnnnnnnnnnnnnnnnnnnnnnnnnnnnnnnnnnnnnnnnnnnnnnnnnnnnnnnnnnnnnnnnnnnnnnnnnnnnnnnnnnnnnnnnnnnnnnnnnnnnnnnnnnnnnnnnnnnnnnnnnnnnnnnnnnnnnnnnnnnnnnnnnnnnnnnnnnnnnnnnnnnnnnnnnnnnnnnnnnnnnnnnnnnnnnnnnnnnnnnnnnnnnnnnnnnnnnnnnnnnnnnnnnnnnnnnnnnnnnnnnnnnnnnnnnnnnnnnnnnnnnnnnnnnnnnnnnnnnnnnnnnnnnnnnnnnnnnnnnnnnnnnnnnnnnnnnnnnnnnnnnnnnnnnnnnnnnnnnnnnnnnnnnnnnnnnnnnnnnnnnnnnnnnnnnnnnnnnnnnnnnnnnnnnnnnnnnnnnnnnnnnnnnnnnnnnnnnnnnnnnnnnnnnnnnnnnnnnnnnnnnnnnnnnnnnnnnnnnnnnnnnnnnnnnnnnnnnnnnnnnnnnnnnnnnnnnnnnnnnnnnnnnnnnnnnnnnnnnnnnnnnnnnnnnnnnnnnnnnnnnnnnnnnnnnnnnnnnnnnnnnnnnnnnnnnnnnnnnnnnnnnnnnnnnnnnnnnnnnnnnnnnnnnnnnnnnnnnnnnnnnnnnnnnnnnnnnnnnnnnnnnnnnnnnnnnnnnnnnnnnnnnnnnnnnnnnnnnnnnnnnnnnnnnnnnnnnnnnnnnnnnnnnnnnnnnnnnnnnnnnnnnnnnnnnnnnnnnnnnnnnnnnnnnnnnnnnnnnnnnnnnnnnnnnnnnnnnnnnnnnnnnnnnnnnnnnnnnnnnnnnnnnnnnnnnnnnnnnnnnnnnnnnnnnnnnnnnnnnnnnnnnnnnnnnnnnnnnnnnnnnnnnnnnnnnnnnnnnnnnnnnnnnnnnnnnnnnnnnnnnnnnnnnnnnnnnnnnnnnnnnnnnnnnnnnnnnnnnnnnnnnnnnnnnnnnnnnnnnnnnnnnnnnnnnnnnnnnnnnnnnnnnnnnnnnnnnnnnnnnnnnnnnnnnnnnnnnnnnnnnnnnnnnnnnnnnnnnnnnnnnnnnnnnnnnnnnnnnnnnnnnnnnnnnnnnnnnnnnnnnnnnnnnnnnnnnnnnnnnnnnnnnnnnnnnnnnnnnnnnnnnnnnnnnnnnnnnnnnnnnnnnnnnnnnnnnnnnnnnnnnnnnnnnnnnnnnnnnnnnnnnnnnnnnnnnnnnnnnnnnnnnnnnnnnnnnnnnnnnnnnnnnnnnnnnnnnnnnnnnnnnnnnnnnnnnnnnnnnnnnnnnnnnnnnnnnnnnnnnnnnnnnnnnnnnnnnnnnnnnnnnnnnnnnnnnnnnnnnnnnnnnnnnnnnnnnnnnnnnnnnnnnnnnnnnnnnnnnnnnnnnnnnnnnnnnnnnnnnnnnnnnnnnnnnnnnnnnnnnnnnnnnnnnnnnnnnnnnnnnnnnnnnnnnnnnnnnnnnnnnnnnnnnnnnnnnnnnnnnnnnnnnnnnnnnnnnnnnnnnnnnnnnnnnnnnnnnnnnnnnnnnnnnnnnnnnnnnnnnnnnnnnnnnnnnnnnnnnnnnnnnnnnnnnnnnnnnnnnnnnnnnnnnnnnnnnnnnnnnnnnnnnnnnnnnnnnnnnnnnnnnnnnnnnnnnnnnnnnnnnnnnnnnnnnnnnnnnnnnnnnnnnnnnnnnnnnnnnnnnnnnnnnnnnnnnnnnnnnnnnnnnnnnnnnnnnnnnnnnnnnnnnnnnnnnnnnnnnnnnnnnnnnnnnnnnnnnnnnnnnnnnnnnnnnnnnnnnnnnnnnnnnnnnnnnnnnnnnnnnnnnnnnnnnnnnnnnnnnnnnnnnnnnnnnnnnnnnnnnnnnnnnnnnnnnnnnnnnnnnnnnnnnnnnnnnnnnnnnnnnnnnnnnnnnnnnnnnnnnnnnnnnnnnnnnnnnnnnnnnnnnnnnnnnnnnnnnnnnnnnnnnnnnnnnnnnnnnnnnnnnnnnnnnnnnnnnnnnnnnnnnnnnnnnnnnnnnnnnnnnnnnnnnnnnnnnnnnnnnnnnnnnnnnnnnnnnnnnnnnnnnnnnnnnnnnnnnnnnnnnnnnnnnnnnnnnnnnnnnnnnnnnnnnnnnnnnnnnnnnnnnnnnnnnnnnnnnnnnnnnnnnnnnnnnnnnnnnnnnnnnnnnnnnnnnnnnnnnnnnnnnnnnnnnnnnnnnnnnnnnnnnnnnnnnnnnnnnnnnnnnnnnnnnnnnnnnnnnnnnnnnnnnnnnnnnnnnnnnnnnnnnnnnnnnnnnnnnnnnnnnnnnnnnnnnnnnnnnnnnnnnnnnnnnnnnnnnnnnnnnnnnnnnnnnnnnnnnnnnnnnnnnnnnnnnnnnnnnnnnnnnnnnnnnnnnnnnnnnnnnnnnnnnnnnnnnnnnnnnnnnnnnnnnnnnnnnnnnnnnnnnnnnnnnnnnnnnnnnnnnnnnnnnnnnnnnnnnnnnnnnnnnnnnnnnnnnnnnnnnnnnnnnnnnnnnnnnnnnnnnnnnnnnnnnnnnnnnnnnnnnnnnnnnnnnnnnnnnnnnnnnnnnnnnnnnnnnnnnnnnnnnnnnnnnnnnnnnnnnnnnnnnnnnnnnnnnnnnnnnnnnnnnnnnnnnnnnnnnnnnnnnnnnnnnnnnnnnnnnnnnnnnnnnnnnnnnnnnnnnnnnnnnnnnnnnnnnnnnnnnnnnnnnnnnnnnnnnnnnnnnnnnnnnnnnnnnnnnnnnnnnnnnnnnnnnnnnnnnnnnnnnnnnnnnnnnnnnnnnnnnnnnnnnnnnnnnnnnnnnnnnnnnnnnnnnnnnnnnnnnnnnnnnnnnnnnnnnnnnnnnnnnnnnnnnnnnnnnnnnnnnnnnnnnnnnnnnnnnnnnnnnnnnnnnnnnnnnnnnnnnnnnnnnnnnnnnnnnnnnnnnnnnnnnnnnnnnnnnnnnnnnnnnnnnnnnnnnnnnnnnnnnnnnnnnnnnnnnnnnnnnnnnnnnnnnnnnnnnnnnnnnnnnnnnnnnnnnnnnnnnnnnnnnnnnnnnnnnnnnnnnnnnnnnnnnnnnnnnnnnnnnnnnnnnnnnnnnnnnnnnnnnnnnnnnnnnnnnnnnnnnnnnnnnnnnnnnnnnnnnnnnnnnnnnnnnnnnnnnnnnnnnnnnnnnnnnnnnnnnnnnnnnnnnnnnnnnnnnnnnnnnnnnnnnnnnnnnnnnnnnnnnnnnnnnnnnnnnnnnnnnnnnnnnnnnnnnnnnnnnnnnnnnnnnnnnnnnnnnnnnnnnnnnnnnnnnnnnnnnnnnnnnnnnnnnnnnnnnnnnnnnnnnnnnnnnnnnnnnnnnnnnnnnnnnnnnnnnnnnnnnnnnnnnnnnnnnnnnnnnnnnnnnnnnnnnnnnnnnnnnnnnnnnnnnnnnnnnnnnnnnnnnnnnnnnnnnnnnnnnnnnnnnnnnnnnnnnnnnnnnnnnnnnnnnnnnnnnnnnnnnnnnnnnnnnnnnnnnnnnnnnnnnnnnnnnnnnnnnnnnnnnnnnnnnnnnnnnnnnnnnnnnnnnnnnnnnnnnnnnnnnnnnnnnnnnnnnnnnnnnnnnnnnnnnnnnnnnnnnnnnnnnnnnnnnnnnnnnnnnnnnnnnnnnnnnnnnnnnnnnnnnnnnnnnnnnnnnnnnnnnnnnnnnnnnnnnnnnnnnnnnnnnnnnnnnnnnnnnnnnnnnnnnnnnnnnnnnnnnnnnnnnnnnnnnnnnnnnnnnnnnnnnnnnnnnnnnnnnnnnnnnnnnnnnnnnnnnnnnnnnnnnnnnnnnnnnnnnnnnnnnnnnnnnnnnnnnnnnnnnnnnnnnnnnnnnnnnnnnnnnnnnnnnnnnnnnnnnnnnnnnnnnnnnnnnnnnnnnnnnnnnnnnnnnnnnnnnnnnnnnnnnnnnnnnnnnnnnnnnnnnnnnnnnnnnnnnnnnnnnnnnnnnnnnnnnnnnnnnnnnnnnnnnnnnnnnnnnnnnnnnnnnnnnnnnnnnnnnnnnnnnnnnnnnnnnnnnnnnnnnnnnnnnnnnnnnnnnnnnnnnnnnnnnnnnnnnnnnnnnnnnnnnnnnnnnnnnnnnnnnnnnnnnnnnnnnnnnnnnnnnnnnnnnnnnnnnnnnnnnnnnnnnnnnnnnnnnnnnnnnnnnnnnnnnnnnnnnnnnnnnnnnnnnnnnnnnnnnnnnnnnnnnnnnnnnnnnnnnnnnnnnnnnnnnnnnnnnnnnnnnnnnnnnnnnnnnnnnnnnnnnnnnnnnnnnnnnnnnnnnnnnnnnnnnnnnnnnnnnnnnnnnnnnnnnnnnnnnnnnnnnnnnnnnnnnnnnnnnnnnnnnnnnnnnnnnnnnnnnnnnnnnnnnnnnnnnnnnnnnnnnnnnnnnnnnnnnnnnnnnnnnnnnnnnnnnnnnnnnnnnnnnnnnnnnnnnnnnnnnnnnnnnnnnnnnnnnnnnnnnnnnnnnnnnnnnnnnnnnnnnnnnnnnnnnnnnnnnnnnnnnnnnnnnnnnnnnnnnnnnnnnnnnnnnnnnnnnnnnnnnnnnnnnnnnnnnnnnnnnnnnnnnnnnnnnnnnnnnnnnnnnnnnnnnnnnnnnnnnnnnnnnnnnnnnnnnnnnnnnnnnnnnnnnnnnnnnnnnnnnnnnnnnnnnnnnnnnnnnnnnnnnnnnnnnnnnnnnnnnnnnnnnnnnnnnnnnnnnnnnnnnnnnnnnnnnnnnnnnnnnnnnnnnnnnnnnnnnnnnnnnnnnnnnnnnnnnnnnnnnnnnnnnnnnnnnnnnnnnnnnnnnnnnnnnnnnnnnnnnnnnnnnnnnnnnnnnnnnnnnnnnnnnnnnnnnnnnnnnnnnnnnnnnnnnnnnnnnnnnnnnnnnnnnnnnnnnnnnnnnnnnnnnnnnnnnnnnnnnnnnnnnnnnnnnnnnnnnnnnnnnnnnnnnnnnnnnnnnnnnnnnnnnnnnnnnnnnnnnnnnnnnnnnnnnnnnnnnnnnnnnnnnnnnnnnnnnnnnnnnnnnnnnnnnnnnnnnnnnnnnnnnnnnnnnnnnnnnnnnnnnnnnnnnnnnnnnnnnnnnnnnnnnnnnnnnnnnnnnnnnnnnnnnnnnnnnnnnnnnnnnnnnnnnnnnnnnnnnnnnnnnnnnnnnnnnnnnnnnnnnnnnnnnnnnnnnnnnnnnnnnnnnnnnnnnnnnnnnnnnnnnnnnnnnnnnnnnnnnnnnnnnnnnnnnnnnnnnnnnnnnnnnnnnnnnnnnnnnnnnnnnnnnnnnnnnnnnnnnnnnnnnnnnnnnnnnnnnnnnnnnnnnnnnnnnnnnnnnnnnnnnnnnnnnnnnnnnnnnnnnnnnnnnnnnnnnnnnnnnnnnnnnnnnnnnnnnnnnnnnnnnnnnnnnnnnnnnnnnnnnnnnnnnnnnnnnnnnnnnnnnnnnnnnnnnnnnnnnnnnnnnnnnnnnnnnnnnnnnnnnnnnnnnnnnnnnnnnnnnnnnnnnnnnnnnnnnnnnnnnnnnnnnnnnnnnnnnnnnnnnnnnnnnnnnnnnnnnnnnnnnnnnnnnnnnnnnnnnnnnnnnnnnnnnnnnnnnnnnnnnnnnnnnnnnnnnnnnnnnnnnnnnnnnnnnnnnnnnnnnnnnnnnnnnnnnnnnnnnnnnnnnnnnnnnnnnnnnnnnnnnnnnnnnnnnnnnnnnnnnnnnnnnnnnnnnnnnnnnnnnnnnnnnnnnnnnnnnnnnnnnnnnnnnnnnnnnnnnnnnnnnnnnnnnnnnnnnnnnnnnnnnnnnnnnnnnnnnnnnnnnnnnnnnnnnnnnnnnnnnnnnnnnnnnnnnnnnnnnnnnnnnnnnnnnnnnnnnnnnnnnnnnnnnnnnnnnnnnnnnnnnnnnnnnnnnnnnnnnnnnnnnnnnnnnnnnnnnnnnnnnnnnnnnnnnnnnnnnnnnnnnnnnnnnnnnnnnnnnnnnnnnnnnnnnnnnnnnnnnnnnnnnnnnnnnnnnnnnnnnnnnnnnnnnnnnnnnnnnnnnnnnnnnnnnnnnnnnnnnnnnnnnnnnnnnnnnnnnnnnnnnnnnnnnnnnnnnnnnnnnnnnnnnnnnnnnnnnnnnnnnnnnnnnnnnnnnnnnnnnnnnnnnnnnnnnnnnnnnnnnnnnnnnnnnnnnnnnnnnnnnnnnnnnnnnnnnnnnnnnnnnnnnnnnnnnnnnnnnnnnnnnnnnnnnnnnnnnnnnnnnnnnnnnnnnnnnnnnnnnnnnnnnnnnnnnnnnnnnnnnnnnnnnnnnnnnnnnnnnnnnnnnnnnnnnnnnnnnnnnnnnnnnnnnnnnnnnnnnnnnnnnnnnnnnnnnnnnnnnnnnnnnnnnnnnnnnnnnnnnnnnnnnnnnnnnnnnnnnnnnnnnnnnnnnnnnnnnnnnnnnnnnnnnnnnnnnnnnnnnnnnnnnnnnnnnnnnnnnnnnnnnnnnnnnnnnnnnnnnnnnnnnnnnnnnnnnnnnnnnnnnnnnnnnnnnnnnnnnnnnnnnnnnnnnnnnnnnnnnnnnnnnnnnnnnnnnnnnnnnnnnnnnnnnnnnnnnnnnnnnnnnnnnnnnnnnnnnnnnnnnnnnnnnnnnnnnnnnnnnnnnnnnnnnnnnnnnnnnnnnnnnnnnnnnnnnnnnnnnnnnnnnnnnnnnnnnnnnnnnnnnnnnnnnnnnnnnnnnnnnnnnnnnnnnnnnnnnnnnnnnnnnnnnnnnnnnnnnnnnnnnnnnnnnnnnnnnnnnnnnnnnnnnnnnnnnnnnnnnnnnnnnnnnnnnnnnnnnnnnnnnnnnnnnnnnnnnnnnnnnnnnnnnnnnnnnnnnnnnnnnnnnnnnnnnnnnnnnnnnnnnnnnnnnnnnnnnnnnnnnnnnnnnnnnnnnnnnnnnnnnnnnnnnnnnnnnnnnnnnnnnnnnnnnnnnnnnnnnnnnnnnnnnnnnnnnnnnnnnnnnnnnnnnnnnnnnnnnnnnnnnnnnnnnnnnnnnnnnnnnnnnnnnnnnnnnnnnnnnnnnnnnnnnnnnnnnnnnnnnnnnnnnnnnnnnnnnnnnnnnnnnnnnnnnnnnnnnnnnnnnnnnnnnnnnnnnnnnnnnnnnnnnnnnnnnnnnnnnnnnnnnnnnnnnnnnnnnnnnnnnnnnnnnnnnnnnnnnnnnnnnnnnnnnnnnnnnnnnnnnnnnnnnnnnnnnnnnnnnnnnnnnnnnnnnnnnnnnnnnnnnnnnnnnnnnnnnnnnnnnnnnnnnnnnnnnnnnnnnnnnnnnnnnnnnnnnnnnnnnnnnnnnnnnnnnnnnnnnnnnnnnnnnnnnnnnnnnnnnnnnnnnnnnnnnnnnnnnnnnnnnnnnnnnnnnnnnnnnnnnnnnnnnnnnnnnnnnnnnnnnnnnnnnnnnnnnnnnnnnnnnnnnnnnnnnnnnnnnnnnnnnnnnnnnnnnnnnnnnnnnnnnnnnnnnnnnnnnnnnnnnnnnnnnnnnnnnnnnnnnnnnnnnnnnnnnnnnnnnnnnnnnnnnnnnnnnnnnnnnnnnnnnnnnnnnnnnnnnnnnnnnnnnnnnnnnnnnnnnnnnnnnnnnnnnnnnnnnnnnnnnnnnnnnnnnnnnnnnnnnnnnnnnnnnnnnnnnnnnnnnnnnnnnnnnnnnnnnnnnnnnnnnnnnnnnnnnnnnnnnnnnnnnnnnnnnnnnnnnnnnnnnnnnnnnnnnnnnnnnnnnnnnnnnnnnnnnnnnnnnnnnnnnnnnnnnnnnnnnnnnnnnnnnnnnnnnnnnnnnnnnnnnnnnnnnnnnnnnnnnnnnnnnnnnnnnnnnnnnnnnnnnnnnnnnnnnnnnnnnnnnnnnnnnnnnnnnnnnnnnnnnnnnnnnnnnnnnnnnnnnnnnnnnnnnnnnnnnnnnnnnnnnnnnnnnnnnnnnnnnnnnnnnnnnnnnnnnnnnnnnnnnnnnnnnnnnnnnnnnnnnnnnnnnnnnnnnnnnnnnnnnnnnnnnnnnnnnnnnnnnnnnnnnnnnnnnnnnnnnnnnnnnnnnnnnnnnnnnnnnnnnnnnnnnnnnnnnnnnnnnnnnnnnnnnnnnnnnnnnnnnnnnnnnnnnnnnnnnnnnnnnnnnnnnnnnnnnnnnnnnnnnnnnnnnnnnnnnnnnnnnnnnnnnnnnnnnnnnnnnnnnnnnnnnnnnnnnnnnnnnnnnnnnnnnnnnnnnnnnnnnnnnnnnnnnnnnnnnnnnnnnnnnnnnnnnnnnnnnnnnnnnnnnnnnnnnnnnnnnnnnnnnnnnnnnnnnnnnnnnnnnnnnnnnnnnnnnnnnnnnnnnnnnnnnnnnnnnnnnnnnnnnnnnnnnnnnnnnnnnnnnnnnnnnnnnnnnnnnnnnnnnnnnnnnnnnnnnnnnnnnnnnnnnnnnnnnnnnnnnnnnnnnnnnnnnnnnnnnnnnnnnnnnnnnnnnnnnnnnnnnnnnnnnnnnnnnnnnnnnnnnnnnnnnnnnnnnnnnnnnnnnnnnnnnnnnnnnnnnnnnnnnnnnnnnnnnnnnnnnnnnnnnnnnnnnnnnnnnnnnnnnnnnnnnnnnnnnnnnnnnnnnnnnnnnnnnnnnnnnnnnnnnnnnnnnnnnnnnnnnnnnnnnnnnnnnnnnnnnnnnnnnnnnnnnnnnnnnnnnnnnnnnnnnnnnnnnnnnnnnnnnnnnnnnnnnnnnnnnnnnnnnnnnnnnnnnnnnnnnnnnnnnnnnnnnnnnnnnnnnnnnnnnnnnnnnnnnnnnnnnnnnnnnnnnnnnnnnnnnnnnnnnnnnnnnnnnnnnnnnnnnnnnnnnnnnnnnnnnnnnnnnnnnnnnnnnnnnnnnnnnnnnnnnnnnnnnnnnnnnnnnnnnnnnnnnnnnnnnnnnnnnnnnnnnnnnnnnnnnnnnnnnnnnnnnnnnnnnnnnnnnnnnnnnnnnnnnnnnnnnnnnnnnnnnnnnnnnnnnnnnnnnnnnnnnnnnnnnnnnnnnnnnnnnnnnnnnnnnnnnnnnnnnnnnnnnnnnnnnnnnnnnnnnnnnnnnnnnnnnnnnnnnnnnnnnnnnnnnnnnnnnnnnnnnnnnnnnnnnnnnnnnnnnnnnnnnnnnnnnnnnnnnnnnnnnnnnnnnnnnnnnnnnnnnnnnnnnnnnnnnnnnnnnnnnnnnnnnnnnnnnnnnnnnnnnnnnnnnnnnnnnnnnnnnnnnnnnnnnnnnnnnnnnnnnnnnnnnnnnnnnnnnnnnnnnnnnnnnnnnnnnnnnnnnnnnnnnnnnnnnnnnnnnnnnnnnnnnnnnnnnnnnnnnnnnnnnnnnnnnnnnnnnnnnnnnnnnnnnnnnnnnnnnnnnnnnnnnnnnnnnnnnnnnnnnnnnnnnnnnnnnnnnnnnnnnnnnnnnnnnnnnnnnnnnnnnnnnnnnnnnnnnnnnnnnnnnnnnnnnnnnnnnnnnnnnnnnnnnnnnnnnnnnnnnnnnnnnnnnnnnnnnnnnnnnnnnnnnnnnnnnnnnnnnnnnnnnnnnnnnnnnnnnnnnnnnnnnnnnnnnnnnnnnnnnnnnnnnnnnnnnnnnnnnnnnnnnnnnnnnnnnnnnnnnnnnnnnnnnnnnnnnnnnnnnnnnnnnnnnnnnnnnnnnnnnnnnnnnnnnnnnnnnnnnnnnnnnnnnnnnnnnnnnnnnnnnnnnnnnnnnnnnnnnnnnnnnnnnnnnnnnnnnnnnnnnnnnnnnnnnnnnnnnnnnnnnnnnnnnnnnnnnnnnnnnnnnnnnnnnnnnnnnnnnnnnnnnnnnnnnnnnnnnnnnnnnnnnnnnnnnnnnnnnnnnnnnnnnnnnnnnnnnnnnnnnnnnnnnnnnnnnnnnnnnnnnnnnnnnnnnnnnnnnnnnnnnnnnnnnnnnnnnnnnnnnnnnnnnnnnnnnnnnnnnnnnnnnnnnnnnnnnnnnnnnnnnnnnnnnnnnnnnnnnnnnnnnnnnnnnnnnnnnnnnnnnnnnnnnnnnnnnnnnnnnnnnnnnnnnnnnnnnnnnnnnnnnnnnnnnnnnnnnnnnnnnnnnnnnnnnnnnnnnnnnnnnnnnnnnnnnnnnnnnnnnnnnnnnnnnnnnnnnnnnnnnnnnnnnnnnnnnnnnnnnnnnnnnnnnnnnnnnnnnnnnnnnnnnnnnnnnnnnnnnnnnnnnnnnnnnnnnnnnnnnnnnnnnnnnnnnnnnnnnnnnnnnnnnnnnnnnnnnnnnnnnnnnnnnnnnnnnnnnnnnnnnnnnnnnnnnnnnnnnnnnnnnnnnnnnnnnnnnnnnnnnnnnnnnnnnnnnnnnnnnnnnnnnnnnnnnnnnnnnnnnnnnnnnnnnnnnnnnnnnnnnnnnnnnnnnnnnnnnnnnnnnnnnnnnnnnnnnnnnnnnnnnnnnnnnnnnnnnnnnnnnnnnnnnnnnnnnnnnnnnnnnnnnnnnnnnnnnnnnnnnnnnnnnnnnnnnnnnnnnnnnnnnnnnnnnnnnnnnnnnnnnnnnnnnnnnnnnnnnnnnnnnnnnnnnnnnnnnnnnnnnnnnnnnnnnnnnnnnnnnnnnnnnnnnnnnnnnnnnnnnnnnnnnnnnnnnnnnnnnnnnnnnnnnnnnnnnnnnnnnnnnnnnnnnnnnnnnnnnnnnnnnnnnnnnnnnnnnnnnnnnnnnnnnnnnnnnnnnnnnnnnnnnnnnnnnnnnnnnnnnnnnnnnnnnnnnnnnnnnnnnnnnnnnnnnnnnnnnnnnnnnnnnnnnnnnnnnnnnnnnnnnnnnnnnnnnnnnnnnnnnnnnnnnnnnnnnnnnnnnnnnnnnnnnnnnnnnnnnnnnnnnnnnnnnnnnnnnnnnnnnnnnnnnnnnnnnnnnnnnnnnnnnnnnnnnnnnnnnnnnnnnnnnnnnnnnnnnnnnnnnnnnnnnnnnnnnnnnnnnnnnnnnnnnnnnnnnnnnnnnnnnnnnnnnnnnnnnnnnnnnnnnnnnnnnnnnnnnnnnnnnnnnnnnnnnnnnnnnnnnnnnnnnnnnnnnnnnnnnnnnnnnnnnnnnnnnnnnnnnnnnnnnnnnnnnnnnnnnnnnnnnnnnnnnnnnnnnnnnnnnnnnnnnnnnnnnnnnnnnnnnnnnnnnnnnnnnnnnnnnnnnnnnnnnnnnnnnnnnnnnnnnnnnnnnnnnnnnnnnnnnnnnnnnnnnnnnnnnnnnnnnnnnnnnnnnnnnnnnnnnnnnnnnnnnnnnnnnnnnnnnnnnnnnnnnnnnnnnnnnnnnnnnnnnnnnnnnnnnnnnnnnnnnnnnnnnnnnnnnnnnnnnnnnnnnnnnnnnnnnnnnnnnnnnnnnnnnnnnnnnnnnnnnnnnnnnnnnnnnnnnnnnnnnnnnnnnnnnnnnnnnnnnnnnnnnnnnnnnnnnnnnnnnnnnnnnnnnnnnnnnnnnnnnnnnnnnnnnnnnnnnnnnnnnnnnnnnnnnnnnnnnnnnnnnnnnnnnnnnnnnnnnnnnnnnnnnnnnnnnnnnnnnnnnnnnnnnnnnnnnnnnnnnnnnnnnnnnnnnnnnnnnnnnnnnnnnnnnnnnnnnnnnnnnnnnnnnnnnnnnnnnnnnnnnnnnnnnnnnnnnnnnnnnnnnnnnnnnnnnnnnnnnnnnnnnnnnnnnnnnnnnnnnnnnnnnnnnnnnnnnnnnnnnnnnnnnnnnnnnnnnnnnnnnnnnnnnnnnnnnnnnnnnnnnnnnnnnnnnnnnnnnnnnnnnnnnnnnnnnnnnnnnnnnnnnnnnnnnnnnnnnnnnnnnnnnnnnnnnnnnnnnnnnnnnnnnnnnnnnnnnnnnnnnnnnnnnnnnnnnnnnnnnnnnnnnnnnnnnnnnnnnnnnnnnnnnnnnnnnnnnnnnnnnnnnnnnnnnnnnnnnnnnnnnnnnnnnnnnnnnnnnnnnnnnnnnnnnnnnnnnnnnnnnnnnnnnnnnnnnnnnnnnnnnnnnnnnnnnnnnnnnnnnnnnnnnnnnnnnnnnnnnnnnnnnnnnnnnnnnnnnnnnnnnnnnnnnnnnnnnnnnnnnnnnnnnnnnnnnnnnnnnnnnnnnnnnnnnnnnnnnnnnnnnnnnnnnnnnnnnnnnnnnnnnnnnnnnnnnnnnnnnnnnnnnnnnnnnnnnnnnnnnnnnnnnnnnnnnnnnnnnnnnnnnnnnnnnnnnnnnnnnnnnnnnnnnnnnnnnnnnnnnnnnnnnnnnnnnnnnnnnnnnnnnnnnnnnnnnnnnnnnnnnnnnnnnnnnnnnnnnnnnnnnnnnnnnnnnnnnnnnnnnnnnnnnnnnnnnnnnnnnnnnnnnnnnnnnnnnnnnnnnnnnnnnnnnnnnnnnnnnnnnnnnnnnnnnnnnnnnnnnnnnnnnnnnnnnnnnnnnnnnnnnnnnnnnnnnnnnnnnnnnnnnnnnnnnnnnnnnnnnnnnnnnnnnnnnnnnnnnnnnnnnnnnnnnnnnnnnnnnnnnnnnnnnnnnnnnnnnnnnnnnnnnnnnnnnnnnnnnnnnnnnnnnnnnnnnnnnnnnnnnnnnnnnnnnnnnnnnnnnnnnnnnnnnnnnnnnnnnnnnnnnnnnnnnnnnnnnnnnnnnnnnnnnnnnnnnnnnnnnnnnnnnnnnnnnnnnnnnnnnnnnnnnnnnnnnnnnnnnnnnnnnnnnnnnnnnnnnnnnnnnnnnnnnnnnnnnnnnnnnnnnnnnnnnnnnnnnnnnnnnnnnnnnnnnnnnnnnnnnnnnnnnnnnnnnnnnnnnnnnnnnnnnnnnnnnnnnnnnnnnnnnnnnnnnnnnnnnnnnnnnnnnnnnnnnnnnnnnnnnnnnnnnnnnnnnnnnnnnnnnnnnnnnnnnnnnnnnnnnnnnnnnnnnnnnnnnnnnnnnnnnnnnnnnnnnnnnnnnnnnnnnnnnnnnnnnnnnnnnnnnnnnnnnnnnnnnnnnnnnnnnnnnnnnnnnnnnnnnnnnnnnnnnnnnnnnnnnnnnnnnnnnnnnnnnnnnnnnnnnnnnnnnnnnnnnnnnnnnnnnnnnnnnnnnnnnnnnnnnnnnnnnnnnnnnnnnnnnnnnnnnnnnnnnnnnnnnnnnnnnnnnnnnnnnnnnnnnnnnnnnnnnnnnnnnnnnnnnnnnnnnnnnnnnnnnnnnnnnnnnnnnnnnnnnnnnnnnnnnnnnnnnnnnnnnnnnnnnnnnnnnnnnnnnnnnnnnnnnnnnnnnnnnnnnnnnnnnnnnnnnnnnnnnnnnnnnnnnnnnnnnnnnnnnnnnnnnnnnnnnnnnnnnnnnnnnnnnnnnnnnnnnnnnnnnnnnnnnnnnnnnnnnnnnnnnnnnnnnnnnnnnnnnnnnnnnnnnnnnnnnnnnnnnnnnnnnnnnnnnnnnnnnnnnnnnnnnnnnnnnnnnnnnnnnnnnnnnnnnnnnnnnnnnnnnnnnnnnnnnnnnnnnnnnnnnnnnnnnnnnnnnnnnnnnnnnnnnnnnnnnnnnnnnnnnnnnnnnnnnnnnnnnnnnnnnnnnnnnnnnnnnnnnnnnnnnnnnnnnnnnnnnnnnnnnnnnnnnnnnnnnnnnnnnnnnnnnnnnnnnnnnnnnnnnnnnnnnnnnnnnnnnnnnnnnnnnnnnnnnnnnnnnnnnnnnnnnnnnnnnnnnnnnnnnnnnnnnnnnnnnnnnnnnnnnnnnnnnnnnnnnnnnnnnnnnnnnnnnnnnnnnnnnnnnnnnnnnnnnnnnnnnnnnnnnnnnnnnnnnnnnnnnnnnnnnnnnnnnnnnnnnnnnnnnnnnnnnnnnnnnnnnnnnnnnnnnnnnnnnnnnnnnnnnnnnnnnnnnnnnnnnnnnnnnnnnnnnnnnnnnnnnnnnnnnnnnnnnnnnnnnnnnnnnnnnnnnnnnnnnnnnnnnnnnnnnnnnnnnnnnnnnnnnnnnnnnnnnnnnnnnnnnnnnnnnnnnnnnnnnnnnnnnnnnnnnnnnnnnnnnnnnnnnnnnnnnnnnnnnnnnnnnnnnnnnnnnnnnnnnnnnnnnnnnnnnnnnnnnnnnnnnnnnnnnnnnnnnnnnnnnnnnnnnnnnnnnnnnnnnnnnnnnnnnnnnnnnnnnnnnnnnnnnnnnnnnnnnnnnnnnnnnnnnnnnnnnnnnnnnnnnnnnnnnnnnnnnnnnnnnnnnnnnnnnnnnnnnnnnnnnnnnnnnnnnnnnnnnnnnnnnnnnnnnnnnnnnnnnnnnnnnnnnnnnnnnnnnnnnnnnnnnnnnnnnnnnnnnnnnnnnnnnnnnnnnnnnnnnnnnnnnnnnnnnnnnnnnnnnnnnnnnnnnnnnnnnnnnnnnnnnnnnnnnnnnnnnnnnnnnnnnnnnnnnnnnnnnnnnnnnnnnnnnnnnnnnnnnnnnnnnnnnnnnnnnnnnnnnnnnnnnnnnnnnnnnnnnnnnnnnnnnnnnnnnnnnnnnnnnnnnnnnnnnnnnnnnnnnnnnnnnnnnnnnnnnnnnnnnnnnnnnnnnnnnnnnnnnnnnnnnnnnnnnnnnnnnnnnnnnnnnnnnnnnnnnnnnnnnnnnnnnnnnnnnnnnnnnnnnnnnnnnnnnnnnnnnnnnnnnnnnnnnnnnnnnnnnnnnnnnnnnnnnnnnnnnnnnnnnnnnnnnnnnnnnnnnnnnnnnnnnnnnnnnnnnnnnnnnnnnnnnnnnnnnnnnnnnnnnnnnnnnnnnnnnnnnnnnnnnnnnnnnnnnnnnnnnnnnnnnnnnnnnnnnnnnnnnnnnnnnnnnnnnnnnnnnnnnnnnnnnnnnnnnnnnnnnnnnnnnnnnnnnnnnnnnnnnnnnnnnnnnnnnnnnnnnnnnnnnnnnnnnnnnnnnnnnnnnnnnnnnnnnnnnnnnnnnnnnnnnnnnnnnnnnnnnnnnnnnnnnnnnnnnnnnnnnnnnnnnnnnnnnnnnnnnnnnnnnnnnnnnnnnnnnnnnnnnnnnnnnnnnnnnnnnnnnnnnnnnnnnnnnnnnnnnnnnnnnnnnnnnnnnnnnnnnnnnnnnnnnnnnnnnnnnnnnnnnnnnnnnnnnnnnnnnnnnnnnnnnnnnnnnnnnnnnnnnnnnnnnnnnnnnnnnnnnnnnnnnnnnnnnnnnnnnnnnnnnnnnnnnnnnnnnnnnnnnnnnnnnnnnnnnnnnnnnnnnnnnnnnnnnnnnnnnnnnnnnnnnnnnnnnnnnnnnnnnnnnnnnnnnnnnnnnnnnnnnnnnnnnnnnnnnnnnnnnnnnnnnnnnnnnnnnnnnnnnnnnnnnnnnnnnnnnnnnnnnnnnnnnnnnnnnnnnnnnnnnnnnnnnnnnnnnnnnnnnnnnnnnnnnnnnnnnnnnnnnnnnnnnnnnnnnnnnnnnnnnnnnnnnnnnnnnnnnnnnnnnnnnnnnnnnnnnnnnnnnnnnnnnnnnnnnnnnnnnnnnnnnnnnnnnnnnnnnnnnnnnnnnnnnnnnnnnnnnnnnnnnnnnnnnnnnnnnnnnnnnnnnnnnnnnnnnnnnnnnnnnnnnnnnnnnnnnnnnnnnnnnnnnnnnnnnnnnnnnnnnnnnnnnnnnnnnnnnnnnnnnnnnnnnnnnnnnnnnnnnnnnnnnnnnnnnnnnnnnnnnnnnnnnnnnnnnnnnnnnnnnnnnnnnnnnnnnnnnnnnnnnnnnnnnnnnnnnnnnnnnnnnnnnnnnnnnnnnnnnnnnnnnnnnnnnnnnnnnnnnnnnnnnnnnnnnnnnnnnnnnnnnnnnnnnnnnnnnnnnnnnnnnnnnnnnnnnnnnnnnnnnnnnnnnnnnnnnnnnnnnnnnnnnnnnnnnnnnnnnnnnnnnnnnnnnnnnnnnnnnnnnnnnnnnnnnnnnnnnnnnnnnnnnnnnnnnnnnnnnnnnnnnnnnnnnnnnnnnnnnnnnnnnnnnnnnnnnnnnnnnnnnnnnnnnnnnnnnnnnnnnnnnnnnnnnnnnnnnnnnnnnnnnnnnnnnnnnnnnnnnnnnnnnnnnnnnnnnnnnnnnnnnnnnnnnnnnnnnnnnnnnnnnnnnnnnnnnnnnnnnnnnnnnnnnnnnnnnnnnnnnnnnnnnnnnnnnnnnnnnnnnnnnnnnnnnnnnnnnnnnnnnnnnnnnnnnnnnnnnnnnnnnnnnnnnnnnnnnnnnnnnnnnnnnnnnnnnnnnnnnnnnnnnnnnnnnnnnnnnnnnnnnnnnnnnnnnnnnnnnnnnnnnnnnnnnnnnnnnnnnnnnnnnnnnnnnnnnnnnnnnnnnnnnnnnnnnnnnnnnnnnnnnnnnnnnnnnnnnnnnnnnnnnnnnnnnnnnnnnnnnnnnnnnnnnnnnnnnnnnnnnnnnnnnnnnnnnnnnnnnnnnnnnnnnnnnnnnnnnnnnnnnnnnnnnnnnnnnnnnnnnnnnnnnnnnnnnnnnnnnnnnnnnnnnnnnnnnnnnnnnnnnnnnnnnnnnnnnnnnnnnnnnnnnnnnnnnnnnnnnnnnnnnnnnnnnnnnnnnnnnnnnnnnnnnnnnnnnnnnnnnnnnnnnnnnnnnnnnnnnnnnnnnnnnnnnnnnnnnnnnnnnnnnnnnnnnnnnnnnnnnnnnnnnnnnnnnnnnnnnnnnnnnnnnnnnnnnnnnnnnnnnnnnnnnnnnnnnnnnnnnnnnnnnnnnnnnnnnnnnnnnnnnnnnnnnnnnnnnnnnnnnnnnnnnnnnnnnnnnnnnnnnnnnnnnnnnnnnnnnnnnnnnnnnnnnnnnnnnnnnnnnnnnnnnnnnnnnnnnnnnnnnnnnnnnnnnnnnnnnnnnnnnnnnnnnnnnnnnnnnnnnnnnnnnnnnnnnnnnnnnnnnnnnnnnnnnnnnnnnnnnnnnnnnnnnnnnnnnnnnnnnnnnnnnnnnnnnnnnnnnnnnnnnnnnnnnnnnnnnnnnnnnnnnnnnnnnnnnnnnnnnnnnnnnnnnnnnnnnnnnnnnnnnnnnnnnnnnnnnnnnnnnnnnnnnnnnnnnnnnnnnnnnnnnnnnnnnnnnnnnnnnnnnnnnnnnnnnnnnnnnnnnnnnnnnnnnnnnnnnnnnnnnnnnnnnnnnnnnnnnnnnnnnnnnnnnnnnnnnnnnnnnnnnnnnnnnnnnnnnnnnnnnnnnnnnnnnnnnnnnnnnnnnnnnnnnnnnnnnnnnnnnnnnnnnnnnnnnnnnnnnnnnnnnnnnnnnnnnnnnnnnnnnnnnnnnnnnnnnnnnnnnnnnnnnnnnnnnnnnnnnnnnnnnnnnnnnnnnnnnnnnnnnnnnnnnnnnnnnnnnnnnnnnnnnnnnnnnnnnnnnnnnnnnnnnnnnnnnnnnnnnnnnnnnnnnnnnnnnnnnnnnnnnnnnnnnnnnnnnnnnnnnnnnnnnnnnnnnnnnnnnnnnnnnnnnnnnnnnnnnnnnnnnnnnnnnnnnnnnnnnnnnnnnnnnnnnnnnnnnnnnnnnnnnnnnnnnnnnnnnnnnnnnnnnnnnnnnnnnnnnnnnnnnnnnnnnnnnnnnnnnnnnnnnnnnnnnnnnnnnnnnnnnnnnnnnnnnnnnnnnnnnnnnnnnnnnnnnnnnnnnnnnnnnnnnnnnnnnnnnnnnnnnnnnnnnnnnnnnnnnnnnnnnnnnnnnnnnnnnnnnnnnnnnnnnnnnnnnnnnnnnnnnnnnnnnnnnnnnnnnnnnnnnnnnnnnnnnnnnnnnnnnnnnnnnnnnnnnnnnnnnnnnnnnnnnnnnnnnnnnnnnnnnnnnnnnnnnnnnnnnnnnnnnnnnnnnnnnnnnnnnnnnnnnnnnnnnnnnnnnnnnnnnnnnnnnnnnnnnnnnnnnnnnnnnnnnnnnnnnnnnnnnnnnnnnnnnnnnnnnnnnnnnnnnnnnnnnnnnnnnnnnnnnnnnnnnnnnnnnnnnnnnnnnnnnnnnnnnnnnnnnnnnnnnnnnnnnnnnnnnnnnnnnnnnnnnnnnnnnnnnnnnnnnnnnnnnnnnnnnnnnnnnnnnnnnnnnnnnnnnnnnnnnnnnnnnnnnnnnnnnnnnnnnnnnnnnnnnnnnnnnnnnnnnnnnnnnnnnnnnnnnnnnnnnnnnnnnnnnnnnnnnnnnnnnnnnnnnnnnnnnnnnnnnnnnnnnnnnnnnnnnnnnnnnnnnnnnnnnnnnnnnnnnnnnnnnnnnnnnnnnnnnnnnnnnnnnnnnnnnnnnnnnnnnnnnnnnnnnnnnnnnnnnnnnnnnnnnnnnnnnnnnnnnnnnnnnnnnnnnnnnnnnnnnnnnnnnnnnnnnnnnnnnnnnnnnnnnnnnnnnnnnnnnnnnnnnnnnnnnnnnnnnnnnnnnnnnnnnnnnnnnnnnnnnnnnnnnnnnnnnnnnnnnnnnnnnnnnnnnnnnnnnnnnnnnnnnnnnnnnnnnnnnnnnnnnnnnnnnnnnnnnnnnnnnnnnnnnnnnnnnnnnnnnnnnnnnnnnnnnnnnnnnnnnnnnnnnnnnnnnnnnnnnnnnnnnnnnnnnnnnnnnnnnnnnnnnnnnnnnnnnnnnnnnnnnnnnnnnnnnnnnnnnnnnnnnnnnnnnnnnnnnnnnnnnnnnnnnnnnnnnnnnnnnnnnnnnnnnnnnnnnnnnnnnnnnnnnnnnnnnnnnnnnnnnnnnnnnnnnnnnnnnnnnnnnnnnnnnnnnnnnnnnnnnnnnnnnnnnnnnnnnnnnnnnnnnnnnnnnnnnnnnnnnnnnnnnnnnnnnnnnnnnnnnnnnnnnnnnnnnnnnnnnnnnnnnnnnnnnnnnnnnnnnnnnnnnnnnnnnnnnnnnnnnnnnnnnnnnnnnnnnnnnnnnnnnnnnnnnnnnnnnnnnnnnnnnnnnnnnnnnnnnnnnnnnnnnnnnnnnnnnnnnnnnnnnnnnnnnnnnnnnnnnnnnnnnnnnnnnnnnnnnnnnnnnnnnnnnnnnnnnnnnnnnnnnnnnnnnnnnnnnnnnnnnnnnnnnnnnnnnnnnnnnnnnnnnnnnnnnnnnnnnnnnnnnnnnnnnnnnnnnnnnnnnnnnnnnnnnnnnnnnnnnnnnnnnnnnnnnnnnnnnnnnnnnnnnnnnnnnnnnnnnnnnnnnnnnnnnnnnnnnnnnnnnnnnnnnnnnnnnnnnnnnnnnnnnnnnnnnnnnnnnnnnnnnnnnnnnnnnnnnnnnnnnnnnnnnnnnnnnnnnnnnnnnnnnnnnnnnnnnnnnnnnnnnnnnnnnnnnnnnnnnnnnnnnnnnnnnnnnnnnnnnnnnnnnnnnnnnnnnnnnnnnnnnnnnnnnnnnnnnnnnnnnnnnnnnnnnnnnnnnnnnnnnnnnnnnnnnnnnnnnnnnnnnnnnnnnnnnnnnnnnnnnnnnnnnnnnnnnnnnnnnnnnnnnnnnnnnnnnnnnnnnnnnnnnnnnnnnnnnnnnnnnnnnnnnnnnnnnnnnnnnnnnnnnnnnnnnnnnnnnnnnnnnnnnnnnnnnnnnnnnnnnnnnnnnnnnnnnnnnnnnnnnnnnnnnnnnnnnnnnnnnnnnnnnnnnnnnnnnnnnnnnnnnnnnnnnnnnnnnnnnnnnnnnnnnnnnnnnnnnnnnnnnnnnnnnnnnnnnnnnnnnnnnnnnnnnnnnnnnnnnnnnnnnnnnnnnnnnnnnnnnnnnnnnnnnnnnnnnnnnnnnnnnnnnnnnnnnnnnnnnnnnnnnnnnnnnnnnnnnnnnnnnnnnnnnnnnnnnnnnnnnnnnnnnnnnnnnnnnnnnnnnnnnnnnnnnnnnnnnnnnnnnnnnnnnnnnnnnnnnnnnnnnnnnnnnnnnnnnnnnnnnnnnnnnnnnnnnnnnnnnnnnnnnnnnnnnnnnnnnnnnnnnnnnnnnnnnnnnnnnnnnnnnnnnnnnnnnnnnnnnnnnnnnnnnnnnnnnnnnnnnnnnnnnnnnnnnnnnnnnnnnnnnnnnnnnnnnnnnnnnnnnnnnnnnnnnnnnnnnnnnnnnnnnnnnnnnnnnnnnnnnnnnnnnnnnnnnnnnnnnnnnnnnnnnnnnnnnnnnnnnnnnnnnnnnnnnnnnnnnnnnnnnnnnnnnnnnnnnnnnnnnnnnnnnnnnnnnnnnnnnnnnnnnnnnnnnnnnnnnnnnnnnnnnnnnnnnnnnnnnnnnnnnnnnnnnnnnnnnnnnnnnnnnnnnnnnnnnnnnnnnnnnnnnnnnnnnnnnnnnnnnnnnnnnnnnnnnnnnnnnnnnnnnnnnnnnnnnnnnnnnnnnnnnnnnnnnnnnnnnnnnnnnnnnnnnnnnnnnnnnnnnnnnnnnnnnnnnnnnnnnnnnnnnnnnnnnnnnnnnnnnnnnnnnnnnnnnnnnnnnnnnnnnnnnnnnnnnnnnnnnnnnnnnnnnnnnnnnnnnnnnnnnnnnnnnnnnnnnnnnnnnnnnnnnnnnnnnnnnnnnnnnnnnnnnnnnnnnnnnnnnnnnnnnnnnnnnnnnnnnnnnnnnnnnnnnnnnnnnnnnnnnnnnnnnnnnnnnnnnnnnnnnnnnnnnnnnnnnnnnnnnnnnnnnnnnnnnnnnnnnnnnnnnnnnnnnnnnnnnnnnnnnnnnnnnnnnnnnnnnnnnnnnnnnnnnnnnnnnnnnnnnnnnnnnnnnnnnnnnnnnnnnnnnnnnnnnnnnnnnnnnnnnnnnnnnnnnnnnnnnnnnnnnnnnnnnnnnnnnnnnnnnnnnnnnnnnnnnnnnnnnnnnnnnnnnnnnnnnnnnnnnnnnnnnnnnnnnnnnnnnnnnnnnnnnnnnnnnnnnnnnnnnnnnnnnnnnnnnnnnnnnnnnnnnnnnnnnnnnnnnnnnnnnnnnnnnnnnnnnnnnnnnnnnnnnnnnnnnnnnnnnnnnnnnnnnnnnnnnnnnnnnnnnnnnnnnnnnnnnnnnnnnnnnnnnnnnnnnnnnnnnnnnnnnnnnnnnnnnnnnnnnnnnnnnnnnnnnnnnnnnnnnnnnnnnnnnnnnnnnnnnnnnnnnnnnnnnnnnnnnnnnnnnnnnnnnnnnnnnnnnnnnnnnnnnnnnnnnnnnnnnnnnnnnnnnnnnnnnnnnnnnnnnnnnnnnnnnnnnnnnnnnnnnnnnnnnnnnnnnnnnnnnnnnnnnnnnnnnnnnnnnnnnnnnnnnnnnnnnnnnnnnnnnnnnnnnnnnnnnnnnnnnnnnnnnnnnnnnnnnnnnnnnnnnnnnnnnnnnnnnnnnnnnnnnnnnnnnnnnnnnnnnnnnnnnnnnnnnnnnnnnnnnnnnnnnnnnnnnnnnnnnnnnnnnnnnnnnnnnnnnnnnnnnnnnnnnnnnnnnnnnnnnnnnnnnnnnnnnnnnnnnnnnnnnnnnnnnnnnnnnnnnnnnnnnnnnnnnnnnnnnnnnnnnnnnnnnnnnnnnnnnnnnnnnnnnnnnnnnnnnnnnnnnnnnnnnnnnnnnnnnnnnnnnnnnnnnnnnnnnnnnnnnnnnnnnnnnnnnnnnnnnnnnnnnnnnnnnnnnnnnnnnnnnnnnnnnnnnnnnnnnnnnnnnnnnnnnnnnnnnnnnnnnnnnnnnnnnnnnnnnnnnnnnnnnnnnnnnnnnnnnnnnnnnnnnnnnnnnnnnnnnnnnnnnnnnnnnnnnnnnnnnnnnnnnnnnnnnnnnnnnnnnnnnnnnnnnnnnnnnnnnnnnnnnnnnnnnnnnnnnnnnnnnnnnnnnnnnnnnnnnnnnnnnnnnnnnnnnnnnnnnnnnnnnnnnnnnnnnnnnnnnnnnnnnnnnnnnnnnnnnnnnnnnnnnnnnnnnnnnnnnnnnnnnnnnnnnnnnnnnnnnnnnnnnnnnnnnnnnnnnnnnnnnnnnnnnnnnnnnnnnnnnnnnnnnnnnnnnnnnnnnnnnnnnnnnnnnnnnnnnnnnnnnnnnnnnnnnnnnnnnnnnnnnnnnnnnnnnnnnnnnnnnnnnnnnnnnnnnnnnnnnnnnnnnnnnnnnnnnnnnnnnnnnnnnnnnnnnnnnnnnnnnnnnnnnnnnnnnnnnnnnnnnnnnnnnnnnnnnnnnnnnnnnnnnnnnnnnnnnnnnnnnnnnnnnnnnnnnnnnnnnnnnnnnnnnnnnnnnnnnnnnnnnnnnnnnnnnnnnnnnnnnnnnnnnnnnnnnnnnnnnnnnnnnnnnnnnnnnnnnnnnnnnnnnnnnnnnnnnnnnnnnnnnnnnnnnnnnnnnnnnnnnnnnnnnnnnnnnnnnnnnnnnnnnnnnnnnnnnnnnnnnnnnnnnnnnnnnnnnnnnnnnnnnnnnnnnnnnnnnnnnnnnnnnnnnnnnnnnnnnnnnnnnnnnnnnnnnnnnnnnnnnnnnnnnnnnnnnnnnnnnnnnnnnnnnnnnnnnnnnnnnnnnnnnnnnnnnnnnnnnnnnnnnnnnnnnnnnnnnnnnnnnnnnnnnnnnnnnnnnnnnnnnnnnnnnnnnnnnnnnnnnnnnnnnnnnnnnnnnnnnnnnnnnnnnnnnnnnnnnnnnnnnnnnnnnnnnnnnnnnnnnnnnnnnnnnnnnnnnnnnnnnnnnnnnnnnnnnnnnnnnnnnnnnnnnnnnnnnnnnnnnnnnnnnnnnnnnnnnnnnnnnnnnnnnnnnnnnnnnnnnnnnnnnnnnnnnnnnnnnnnnnnnnnnnnnnnnnnnnnnnnnnnnnnnnnnnnnnnnnnnnnnnnnnnnnnnnnnnnnnnnnnnnnnnnnnnnnnnnnnnnnnnnnnnnnnnnnnnnnnnnnnnnnnnnnnnnnnnnnnnnnnnnnnnnnnnnnnnnnnnnnnnnnnnnnnnnnnnnnnnnnnnnnnnnnnnnnnnnnnnnnnnnnnnnnnnnnnnnnnnnnnnnnnnnnnnnnnnnnnnnnnnnnnnnnnnnnnnnnnnnnnnnnnnnnnnnnnnnnnnnnnnnnnnnnnnnnnnnnnnnnnnnnnnnnnnnnnnnnnnnnnnnnnnnnnnnnnnnnnnnnnnnnnnnnnnnnnnnnnnnnnnnnnnnnnnnnnnnnnnnnnnnnnnnnnnnnnnnnnnnnnnnnnnnnnnnnnnnnnnnnnnnnnnnnnnnnnnnnnnnnnnnnnnnnnnnnnnnnnnnnnnnnnnnnnnnnnnnnnnnnnnnnnnnnnnnnnnnnnnnnnnnnnnnnnnnnnnnnnnnnnnnnnnnnnnnnnnnnnnnnnnnnnnnnnnnnnnnnnnnnnnnnnnnnnnnnnnnnnnnnnnnnnnnnnnnnnnnnnnnnnnnnnnnnnnnnnnnnnnnnnnnnnnnnnnnnnnnnnnnnnnnnnnnnnnnnnnnnnnnnnnnnnnnnnnnnnnnnnnnnnnnnnnnnnnnnnnnnnnnnnnnnnnnnnnnnnnnnnnnnnnnnnnnnnnnnnnnnnnnnnnnnnnnnnnnnnnnnnnnnnnnnnnnnnnnnnnnnnnnnnnnnnnnnnnnnnnnnnnnnnnnnnnnnnnnnnnnnnnnnnnnnnnnnnnnnnnnnnnnnnnnnnnnnnnnnnnnnnnnnnnnnnnnnnnnnnnnnnnnnnnnnnnnnnnnnnnnnnnnnnnnnnnnnnnnnnnnnnnnnnnnnnnnnnnnnnnnnnnnnnnnnnnnnnnnnnnnnnnnnnnnnnnnnnnnnnnnnnnnnnnnnnnnnnnnnnnnnnnnnnnnnnnnnnnnnnnnnnnnnnnnnnnnnnnnnnnnnnnnnnnnnnnnnnnnnnnnnnnnnnnnnnnnnnnnnnnnnnnnnnnnnnnnnnnnnnnnnnnnnnnnnnnnnnnnnnnnnnnnnnnnnnnnnnnnnnnnnnnnnnnnnnnnnnnnnnnnnnnnnnnnnnnnnnnnnnnnnnnnnnnnnnnnnnnnnnnnnnnnnnnnnnnnnnnnnnnnnnnnnnnnnnnnnnnnnnnnnnnnnnnnnnnnnnnnnnnnnnnnnnnnnnnnnnnnnnnnnnnnnnnnnnnnnnnnnnnnnnnnnnnnnnnnnnnnnnnnnnnnnnnnnnnnnnnnnnnnnnnnnnnnnnnnnnnnnnnnnnnnnnnnnnnnnnnnnnnnnnnnnnnnnnnnnnnnnnnnnnnnnnnnnnnnnnnnnnnnnnnnnnnnnnnnnnnnnnnnnnnnnnnnnnnnnnnnnnnnnnnnnnnnnnnnnnnnnnnnnnnnnnnnnnnnnnnnnnnnnnnnnnnnnnnnnnnnnnnnnnnnnnnnnnnnnnnnnnnnnnnnnnnnnnnnnnnnnnnnnnnnnnnnnnnnnnnnnnnnnnnnnnnnnnnnnnnnnnnnnnnnnnnnnnnnnnnnnnnnnnnnnnnnnnnnnnnnnnnnnnnnnnnnnnnnnnnnnnnnnnnnnnnnnnnnnnnnnnnnnnnnnnnnnnnnnnnnnnnnnnnnnnnnnnnnnnnnnnnnnnnnnnnnnnnnnnnnnnnnnnnnnnnnnnnnnnnnnnnnnnnnnnnnnnnnnnnnnnnnnnnnnnnnnnnnnnnnnnnnnnnnnnnnnnnnnnnnnnnnnnnnnnnnnnnnnnnnnnnnnnnnnnnnnnnnnnnnnnnnnnnnnnnnnnnnnnnnnnnnnnnnnnnnnnnnnnnnnnnnnnnnnnnnnnnnnnnnnnnnnnnnnnnnnnnnnnnnnnnnnnnnnnnnnnnnnnnnnnnnnnnnnnnnnnnnnnnnnnnnnnnnnnnnnnnnnnnnnnnnnnnnnnnnnnnnnnnnnnnnnnnnnnnnnnnnnnnnnnnnnnnnnnnnnnnnnnnnnnnnnnnnnnnnnnnnnnnnnnnnnnnnnnnnnnnnnnnnnnnnnnnnnnnnnnnnnnnnnnnnnnnnnnnnnnnnnnnnnnnnnnnnnnnnnnnnnnnnnnnnnnnnnnnnnnnnnnnnnnnnnnnnnnnnnnnnnnnnnnnnnnnnnnnnnnnnnnnnnnnnnnnnnnnnnnnnnnnnnnnnnnnnnnnnnnnnnnnnnnnnnnnnnnnnnnnnnnnnnnnnnnnnnnnnnnnnnnnnnnnnnnnnnnnnnnnnnnnnnnnnnnnnnnnnnnnnnnnnnnnnnnnnnnnnnnnnnnnnnnnnnnnnnnnnnnnnnnnnnnnnnnnnnnnnnnnnnnnnnnnnnnnnnnnnnnnnnnnnnnnnnnnnnnnnnnnnnnnnnnnnnnnnnnnnnnnnnnnnnnnnnnnnnnnnnnnnnnnnnnnnnnnnnnnnnnnnnnnnnnnnnnnnnnnnnnnnnnnnnnnnnnnnnnnnnnnnnnnnnnnnnnnnnnnnnnnnnnnnnnnnnnnnnnnnnnnnnnnnnnnnnnnnnnnnnnnnnnnnnnnnnnnnnnnnnnnnnnnnnnnnnnnnnnnnnnnnnnnnnnnnnnnnnnnnnnnnnnnnnnnnnnnnnnnnnnnnnnnnnnnnnnnnnnnnnnnnnnnnnnnnnnnnnnnnnnnnnnnnnnnnnnnnnnnnnnnnnnnnnnnnnnnnnnnnnnnnnnnnnnnnnnnnnnnnnnnnnnnnnnnnnnnnnnnnnnnnnnnnnnnnnnnnnnnnnnnnnnnnnnnnnnnnnnnnnnnnnnnnnnnnnnnnnnnnnnnnnnnnnnnnnnnnnnnnnnnnnnnnnnnnnnnnnnnnnnnnnnnnnnnnnnnnnnnnnnnnnnnnnnnnnnnnnnnnnnnnnnnnnnnnnnnnnnnnnnnnnnnnnnnnnnnnnnnnnnnnnnnnnnnnnnnnnnnnnnnnnnnnnnnnnnnnnnnnnnnnnnnnnnnnnnnnnnnnnnnnnnnnnnnnnnnnnnnnnnnnnnnnnnnnnnnnnnnnnnnnnnnnnnnnnnnnnnnnnnnnnnnnnnnnnnnnnnnnnnnnnnnnnnnnnnnnnnnnnnnnnnnnnnnnnnnnnnnnnnnnnnnnnnnnnnnnnnnnnnnnnnnnnnnnnnnnnnnnnnnnnnnnnnnnnnnnnnnnnnnnnnnnnnnnnnnnnnnnnnnnnnnnnnnnnnnnnnnnnnnnnnnnnnnnnnnnnnnnnnnnnnnnnnnnnnnnnnnnnnnnnnnnnnnnnnnnnnnnnnnnnnnnnnnnnnnnnnnnnnnnnnnnnnnnnnnnnnnnnnnnnnnnnnnnnnnnnnnnnnnnnnnnnnnnnnnnnnnnnnnnnnnnnnnnnnnnnnnnnnnnnnnnnnnnnnnnnnnnnnnnnnnnnnnnnnnnnnnnnnnnnnnnnnnnnnnnnnnnnnnnnnnnnnnnnnnnnnnnnnnnnnnnnnnnnnnnnnnnnnnnnnnnnnnnnnnnnnnnnnnnnnnnnnnnnnnnnnnnnnnnnnnnnnnnnnnnnnnnnnnnnnnnnnnnnnnnnnnnnnnnnnnnnnnnnnnnnnnnnnnnnnnnnnnnnnnnnnnnnnnnnnnnnnnnnnnnnnnnnnnnnnnnnnnnnnnnnnnnnnnnnnnnnnnnnnnnnnnnnnnnnnnnnnnnnnnnnnnnnnnnnnnnnnnnnnnnnnnnnnnnnnnnnnnnnnnnnnnnnnnnnnnnnnnnnnnnnnnnnnnnnnnnnnnnnnnnnnnnnnnnnnnnnnnnnnnnnnnnnnnnnnnnnnnnnnnnnnnnnnnnnnnnnnnnnnnnnnnnnnnnnnnnnnnnnnnnnnnnnnnnnnnnnnnnnnnnnnnnnnnnnnnnnnnnnnnnnnnnnnnnnnnnnnnnnnnnnnnnnnnnnnnnnnnnnnnnnnnnnnnnnnnnnnnnnnnnnnnnnnnnnnnnnnnnnnnnnnnnnnnnnnnnnnnnnnnnnnnnnnnnnnnnnnnnnnnnnnnnnnnnnnnnnnnnnnnnnnnnnnnnnnnnnnnnnnnnnnnnnnnnnnnnnnnnnnnnnnnnnnnnnnnnnnnnnnnnnnnnnnnnnnnnnnnnnnnnnnnnnnnnnnnnnnnnnnnnnnnnnnnnnnnnnnnnnnnnnnnnnnnnnnnnnnnnnnnnnnnnnnnnnnnnnnnnnnnnnnnnnnnnnnnnnnnnnnnnnnnnnnnnnnnnnnnnnnnnnnnnnnnnnnnnnnnnnnnnnnnnnnnnnnnnnnnnnnnnnnnnnnnnnnnnnnnnnnnnnnnnnnnnnnnnnnnnnnnnnnnnnnnnnnnnnnnnnnnnnnnnnnnnnnnnnnnnnnnnnnnnnnnnnnnnnnnnnnnnnnnnnnnnnnnnnnnnnnnnnnnnnnnnnnnnnnnnnnnnnnnnnnnnnnnnnnnnnnnnnnnnnnnnnnnnnnnnnnnnnnnnnnnnnnnnnnnnnnnnnnnnnnnnnnnnnnnnnnnnnnnnnnnnnnnnnnnnnnnnnnnnnnnnnnnnnnnnnnnnnnnnnnnnnnnnnnnnnnnnnnnnnnnnnnnnnnnnnnnnnnnnnnnnnnnnnnnnnnnnnnnnnnnnnnnnnnnnnnnnnnnnnnnnnnnnnnnnnnnnnnnnnnnnnnnnnnnnnnnnnnnnnnnnnnnnnnnnnnnnnnnnnnnnnnnnnnnnnnnnnnnnnnnnnnnnnnnnnnnnnnnnnnnnnnnnnnnnnnnnnnnnnnnnnnnnnnnnnnnnnnnnnnnnnnnnnnnnnnnnnnnnnnnnnnnnnnnnnnnnnnnnnnnnnnnnnnnnnnnnnnnnnnnnnnnnnnnnnnnnnnnnnnnnnnnnnnnnnnnnnnnnnnnnnnnnnnnnnnnnnnnnnnnnnnnnnnnnnnnnnnnnnnnnnnnnnnnnnnnnnnnnnnnnnnnnnnnnnnnnnnnnnnnnnnnnnnnnnnnnnnnnnnnnnnnnnnnnnnnnnnnnnnnnnnnnnnnnnnnnnnnnnnnnnnnnnnnnnnnnnnnnnnnnnnnnnnnnnnnnnnnnnnnnnnnnnnnnnnnnnnnnnnnnnnnnnnnnnnnnnnnnnnnnnnnnnnnnnnnnnnnnnnnnnnnnnnnnnnnnnnnnnnnnnnnnnnnnnnnnnnnnnnnnnnnnnnnnnnnnnnnnnnnnnnnnnnnnnnnnnnnnnnnnnnnnnnnnnnnnnnnnnnnnnnnnnnnnnnnnnnnnnnnnnnnnnnnnnnnnnnnnnnnnnnnnnnnnnnnnnnnnnnnnnnnnnnnnnnnnnnnnnnnnnnnnnnnnnnnnnnnnnnnnnnnnnnnnnnnnnnnnnnnnnnnnnnnnnnnnnnnnnnnnnnnnnnnnnnnnnnnnnnnnnnnnnnnnnnnnnnnnnnnnnnnnnnnnnnnnnnnnnnnnnnnnnnnnnnnnnnnnnnnnnnnnnnnnnnnnnnnnnnnnnnnnnnnnnnnnnnnnnnnnnnnnnnnnnnnnnnnnnnnnnnnnnnnnnnnnnnnnnnnnnnnnnnnnnnnnnnnnnnnnnnnnnnnnnnnnnnnnnnnnnnnnnnnnnnnnnnnnnnnnnnnnnnnnnnnnnnnnnnnnnnnnnnnnnnnnnnnnnnnnnnnnnnnnnnnnnnnnnnnnnnnnnnnnnnnnnnnnnnnnnnnnnnnnnnnnnnnnnnnnnnnnnnnnnnnnnnnnnnnnnnnnnnnnnnnnnnnnnnnnnnnnnnnnnnnnnnnnnnnnnnnnnnnnnnnnnnnnnnnnnnnnnnnnnnnnnnnnnnnnnnnnnnnnnnnnnnnnnnnnnnnnnnnnnnnnnnnnnnnnnnnnnnnnnnnnnnnnnnnnnnnnnnnnnnnnnnnnnnnnnnnnnnnnnnnnnnnnnnnnnnnnnnnnnnnnnnnnnnnnnnnnnnnnnnnnnnnnnnnnnnnnnnnnnnnnnnnnnnnnnnnnnnnnnnnnnnnnnnnnnnnnnnnnnnnnnnnnnnnnnnnnnnnnnnnnnnnnnnnnnnnnnnnnnnnnnnnnnnnnnnnnnnnnnnnnnnnnnnnnnnnnnnnnnnnnnnnnnnnnnnnnnnnnnnnnnnnnnnnnnnnnnnnnnnnnnnnnnnnnnnnnnnnnnnnnnnnnnnnnnnnnnnnnnnnnnnnnnnnnnnnnnnnnnnnnnnnnnnnnnnnnnnnnnnnnnnnnnnnnnnnnnnnnnnnnnnnnnnnnnnnnnnnnnnnnnnnnnnnnnnnnnnnnnnnnnnnnnnnnnnnnnnnnnnnnnnnnnnnnnnnnnnnnnnnnnnnnnnnnnnnnnnnnnnnnnnnnnnnnnnnnnnnnnnnnnnnnnnnnnnnnnnnnnnnnnnnnnnnnnnnnnnnnnnnnnnnnnnnnnnnnnnnnnnnnnnnnnnnnnnnnnnnnnnnnnnnnnnnnnnnnnnnnnnnnnnnnnnnnnnnnnnnnnnnnnnnnnnnnnnnnnnnnnnnnnnnnnnnnnnnnnnnnnnnnnnnnnnnnnnnnnnnnnnnnnnnnnnnnnnnnnnnnnnnnnnnnnnnnnnnnnnnnnnnnnnnnnnnnnnnnnnnnnnnnnnnnnnnnnnnnnnnnnnnnnnnnnnnnnnnnnnnnnnnnnnnnnnnnnnnnnnnnnnnnnnnnnnnnnnnnnnnnnnnnnnnnnnnnnnnnnnnnnnnnnnnnnnnnnnnnnnnnnnnnnnnnnnnnnnnnnnnnnnnnnnnnnnnnnnnnnnnnnnnnnnnnnnnnnnnnnnnnnnnnnnnnnnnnnnnnnnnnnnnnnnnnnnnnnnnnnnnnnnnnnnnnnnnnnnnnnnnnnnnnnnnnnnnnnnnnnnnnnnnnnnnnnnnnnnnnnnnnnnnnnnnnnnnnnnnnnnnnnnnnnnnnnnnnnnnnnnnnnnnnnnnnnnnnnnnnnnnnnnnnnnnnnnnnnnnnnnnnnnnnnnnnnnnnnnnnnnnnnnnnnnnnnnnnnnnnnnnnnnnnnnnnnnnnnnnnnnnnnnnnnnnnnnnnnnnnnnnnnnnnnnnnnnnnnnnnnnnnnnnnnnnnnnnnnnnnnnnnnnnnnnnnnnnnnnnnnnnnnnnnnnnnnnnnnnnnnnnnnnnnnnnnnnnnnnnnnnnnnnnnnnnnnnnnnnnnnnnnnnnnnnnnnnnnnnnnnnnnnnnnnnnnnnnnnnnnnnnnnnnnnnnnnnnnnnnnnnnnnnnnnnnnnnnnnnnnnnnnnnnnnnnnnnnnnnnnnnnnnnnnnnnnnnnnnnnnnnnnnnnnnnnnnnnnnnnnnnnnnnnnnnnnnnnnnnnnnnnnnnnnnnnnnnnnnnnnnnnnnnnnnnnnnnnnnnnnnnnnnnnnnnnnnnnnnnnnnnnnnnnnnnnnnnnnnnnnnnnnnnnnnnnnnnnnnnnnnnnnnnnnnnnnnnnnnnnnnnnnnnnnnnnnnnnnnnnnnnnnnnnnnnnnnnnnnnnnnnnnnnnnnnnnnnnnnnnnnnnnnnnnnnnnnnnnnnnnnnnnnnnnnnnnnnnnnnnnnnnnnnnnnnnnnnnnnnnnnnnnnnnnnnnnnnnnnnnnnnnnnnnnnnnnnnnnnnnnnnnnnnnnnnnnnnnnnnnnnnnnnnnnnnnnnnnnnnnnnnnnnnnnnnnnnnnnnnnnnnnnnnnnnnnnnnnnnnnnnnnnnnnnnnnnnnnnnnnnnnnnnnnnnnnnnnnnnnnnnnnnnnnnnnnnnnnnnnnnnnnnnnnnnnnnnnnnnnnnnnnnnnnnnnnnnnnnnnnnnnnnnnnnnnnnnnnnnnnnnnnnnnnnnnnnnnnnnnnnnnnnnnnnnnnnnnnnnnnnnnnnnnnnnnnnnnnnnnnnnnnnnnnnnnnnnnnnnnnnnnnnnnnnnnnnnnnnnnnnnnnnnnnnnnnnnnnnnnnnnnnnnnnnnnnnnnnnnnnnnnnnnnnnnnnnnnnnnnnnnnnnnnnnnnnnnnnnnnnnnnnnnnnnnnnnnnnnnnnnnnnnnnnnnnnnnnnnnnnnnnnnnnnnnnnnnnnnnnnnnnnnnnnnnnnnnnnnnnnnnnnnnnnnnnnnnnnnnnnnnnnnnnnnnnnnnnnnnnnnnnnnnnnnnnnnnnnnnnnnnnnnnnnnnnnnnnnnnnnnnnnnnnnnnnnnnnnnnnnnnnnnnnnnnnnnnnnnnnnnnnnnnnnnnnnnnnnnnnnnnnnnnnnnnnnnnnnnnnnnnnnnnnnnnnnnnnnnnnnnnnnnnnnnnnnnnnnnnnnnnnnnnnnnnnnnnnnnnnnnnnnnnnnnnnnnnnnnnnnnnnnnnnnnnnnnnnnnnnnnnnnnnnnnnnnnnnnnnnnnnnnnnnnnnnnnnnnnnnnnnnnnnnnnnnnnnnnnnnnnnnnnnnnnnnnnnnnnnnnnnnnnnnnnnnnnnnnnnnnnnnnnnnnnnnnnnnnnnnnnnnnnnnnnnnnnnnnnnnnnnnnnnnnnnnnnnnnnnnnnnnnnnnnnnnnnnnnnnnnnnnnnnnnnnnnnnnnnnnnnnnnnnnnnnnnnnnnnnnnnnnnnnnnnnnnnnnnnnnnnnnnnnnnnnnnnnnnnnnnnnnnnnnnnnnnnnnnnnnnnnnnnnnnnnnnnnnnnnnnnnnnnnnnnnnnnnnnnnnnnnnnnnnnnnnnnnnnnnnnnnnnnnnnnnnnnnnnnnnnnnnnnnnnnnnnnnnnnnnnnnnnnnnnnnnnnnnnnnnnnnnnnnnnnnnnnnnnnnnnnnnnnnnnnnnnnnnnnnnnnnnnnnnnnnnnnnnnnnnnnnnnnnnnnnnnnnnnnnnnnnnnnnnnnnnnnnnnnnnnnnnnnnnnnnnnnnnnnnnnnnnnnnnnnnnnnnnnnnnnnnnnnnnnnnnnnnnnnnnnnnnnnnnnnnnnnnnnnnnnnnnnnnnnnnnnnnnnnnnnnnnnnnnnnnnnnnnnnnnnnnnnnnnnnnnnnnnnnnnnnnnnnnnnnnnnnnnnnnnnnnnnnnnnnnnnnnnnnnnnnnnnnnnnnnnnnnnnnnnnnnnnnnnnnnnnnnnnnnnnnnnnnnnnnnnnnnnnnnnnnnnnnnnnnnnnnnnnnnnnnnnnnnnnnnnnnnnnnnnnnnnnnnnnnnnnnnnnnnnnnnnnnnnnnnnnnnnnnnnnnnnnnnnnnnnnnnnnnnnnnnnnnnnnnnnnnnnnnnnnnnnnnnnnnnnnnnnnnnnnnnnnnnnnnnnnnnnnnnnnnnnnnnnnnnnnnnnnnnnnnnnnnnnnnnnnnnnnnnnnnnnnnnnnnnnnnnnnnnnnnnnnnnnnnnnnnnnnnnnnnnnnnnnnnnnnnnnnnnnnnnnnnnnnnnnnnnnnnnnnnnnnnnnnnnnnnnnnnnnnnnnnnnnnnnnnnnnnnnnnnnnnnnnnnnnnnnnnnnnnnnnnnnnnnnnnnnnnnnnnnnnnnnnnnnnnnnnnnnnnnnnnnnnnnnnnnnnnnnnnnnnnnnnnnnnnnnnnnnnnnnnnnnnnnnnnnnnnnnnnnnnnnnnnnnnnnnnnnnnnnnnnnnnnnnnnnnnnnnnnnnnnnnnnnnnnnnnnnnnnnnnnnnnnnnnnnnnnnnnnnnnnnnnnnnnnnnnnnnnnnnnnnnnnnnnnnnnnnnnnnnnnnnnnnnnnnnnnnnnnnnnnnnnnnnnnnnnnnnnnnnnnnnnnnnnnnnnnnnnnnnnnnnnnnnnnnnnnnnnnnnnnnnnnnnnnnnnnnnnnnnnnnnnnnnnnnnnnnnnnnnnnnnnnnnnnnnnnnnnnnnnnnnnnnnnnnnnnnnnnnnnnnnnnnnnnnnnnnnnnnnnnnnnnnnnnnnnnnnnnnnnnnnnnnnnnnnnnnnnnnnnnnnnnnnnnnnnnnnnnnnnnnnnnnnnnnnnnnnnnnnnnnnnnnnnnnnnnnnnnnnnnnnnnnnnnnnnnnnnnnnnnnnnnnnnnnnnnnnnnnnnnnnnnnnnnnnnnnnnnnnnnnnnnnnnnnnnnnnnnnnnnnnnnnnnnnnnnnnnnnnnnnnnnnnnnnnnnnnnnnnnnnnnnnnnnnnnnnnnnnnnnnnnnnnnnnnnnnnnnnnnnnnnnnnnnnnnnnnnnnnnnnnnnnnnnnnnnnnnnnnnnnnnnnnnnnnnnnnnnnnnnnnnnnnnnnnnnnnnnnnnnnnnnnnnnnnnnnnnnnnnnnnnnnnnnnnnnnnnnnnnnnnnnnnnnnnnnnnnnnnnnnnnnnnnnnnnnnnnnnnnnnnnnnnnnnnnnnnnnnnnnnnnnnnnnnnnnnnnnnnnnnnnnnnnnnnnnnnnnnnnnnnnnnnnnnnnnnnnnnnnnnnnnnnnnnnnnnnnnnnnnnnnnnnnnnnnnnnnnnnnnnnnnnnnnnnnnnnnnnnnnnnnnnnnnnnnnnnnnnnnnnnnnnnnnnnnnnnnnnnnnnnnnnnnnnnnnnnnnnnnnnnnnnnnnnnnnnnnnnnnnnnnnnnnnnnnnnnnnnnnnnnnnnnnnnnnnnnnnnnnnnnnnnnnnnnnnnnnnnnnnnnnnnnnnnnnnnnnnnnnnnnnnnnnnnnnnnnnnnnnnnnnnnnnnnnnnnnnnnnnnnnnnnnnnnnnnnnnnnnnnnnnnnnnnnnnnnnnnnnnnnnnnnnnnnnnnnnnnnnnnnnnnnnnnnnnnnnnnnnnnnnnnnnnnnnnnnnnnnnnnnnnnnnnnnnnnnnnnnnnnnnnnnnnnnnnnnnnnnnnnnnnnnnnnnnnnnnnnnnnnnnnnnnnnnnnnnnnnnnnnnnnnnnnnnnnnnnnnnnnnnnnnnnnnnnnnnnnnnnnnnnnnnnnnnnnnnnnnnnnnnnnnnnnnnnnnnnnnnnnnnnnnnnnnnnnnnnnnnnnnnnnnnnnnnnnnnnnnnnnnnnnnnnnnnnnnnnnnnnnnnnnnnnnnnnnnnnnnnnnnnnnnnnnnnnnnnnnnnnnnnnnnnnnnnnnnnnnnnnnnnnnnnnnnnnnnnnnnnnnnnnnnnnnnnnnnnnnnnnnnnnnnnnnnnnnnnnnnnnnnnnnnnnnnnnnnnnnnnnnnnnnnnnnnnnnnnnnnnnnnnnnnnnnnnnnnnnnnnnnnnnnnnnnnnnnnnnnnnnnnnnnnnnnnnnnnnnnnnnnnnnnnnnnnnnnnnnnnnnnnnnnnnnnnnnnnnnnnnnnnnnnnnnnnnnnnnnnnnnnnnnnnnnnnnnnnnnnnnnnnnnnnnnnnnnnnnnnnnnnnnnnnnnnnnnnnnnnnnnnnnnnnnnnnnnnnnnnnnnnnnnnnnnnnnnnnnnnnnnnnnnnnnnnnnnnnnnnnnnnnnnnnnnnnnnnnnnnnnnnnnnnnnnnnnnnnnnnnnnnnnnnnnnnnnnnnnnnnnnnnnnnnnnnnnnnnnnnnnnnnnnnnnnnnnnnnnnnnnnnnnnnnnnnnnnnnnnnnnnnnnnnnnnnnnnnnnnnnnnnnnnnnnnnnnnnnnnnnnnnnnnnnnnnnnnnnnnnnnnnnnnnnnnnnnnnnnnnnnnnnnnnnnnnnnnnnnnnnnnnnnnnnnnnnnnnnnnnnnnnnnnnnnnnnnnnnnnnnnnnnnnnnnnnnnnnnnnnnnnnnnnnnnnnnnnnnnnnnnnnnnnnnnnnnnnnnnnnnnnnnnnnnnnnnnnnnnnnnnnnnnnnnnnnnnnnnnnnnnnnnnnnnnnnnnnnnnnnnnnnnnnnnnnnnnnnnnnnnnnnnnnnnnnnnnnnnnnnnnnnnnnnnnnnnnnnnnnnnnnnnnnnnnnnnnnnnnnnnnnnnnnnnnnnnnnnnnnnnnnnnnnnnnnnnnnnnnnnnnnnnnnnnnnnnnnnnnnnnnnnnnnnnnnnnnnnnnnnnnnnnnnnnnnnnnnnnnnnnnnnnnnnnnnnnnnnnnnnnnnnnnnnnnnnnnnnnnnnnnnnnnnnnnnnnnnnnnnnnnnnnnnnnnnnnnnnnnnnnnnnnnnnnnnnnnnnnnnnnnnnnnnnnnnnnnnnnnnnnnnnnnnnnnnnnnnnnnnnnnnnnnnnnnnnnnnnnnnnnnnnnnnnnnnnnnnnnnnnnnnnnnnnnnnnnnnnnnnnnnnnnnnnnnnnnnnnnnnnnnnnnnnnnnnnnnnnnnnnnnnnnnnnnnnnnnnnnnnnnnnnnnnnnnnnnnnnnnnnnnnnnnnnnnnnnnnnnnnnnnnnnnnnnnnnnnnnnnnnnnnnnnnnnnnnnnnnnnnnnnnnnnnnnnnnnnnnnnnnnnnnnnnnnnnnnnnnnnnnnnnnnnnnnnnnnnnnnnnnnnnnnnnnnnnnnnnnnnnnnnnnnnnnnnnnnnnnnnnnnnnnnnnnnnnnnnnnnnnnnnnnnnnnnnnnnnnnnnnnnnnnnnnnnnnnnnnnnnnnnnnnnnnnnnnnnnnnnnnnnnnnnnnnnnnnnnnnnnnnnnnnnnnnnnnnnnnnnnnnnnnnnnnnnnnnnnnnnnnnnnnnnnnnnnnnnnnnnnnnnnnnnnnnnnnnnnnnnnnnnnnnnnnnnnnnnnnnnnnnnnnnnnnnnnnnnnnnnnnnnnnnnnnnnnnnnnnnnnnnnnnnnnnnnnnnnnnnnnnnnnnnnnnnnnnnnnnnnnnnnnnnnnnnnnnnnnnnnnnnnnnnnnnnnnnnnnnnnnnnnnnnnnnnnnnnnnnnnnnnnnnnnnnnnnnnnnnnnnnnnnnnnnnnnnnnnnnnnnnnnnnnnnnnnnnnnnnnnnnnnnnnnnnnnnnnnnnnnnnnnnnnnnnnnnnnnnnnnnnnnnnnnnnnnnnnnnnnnnnnnnnnnnnnnnnnnnnnnnnnnnnnnnnnnnnnnnnnnnnnnnnnnnnnnnnnnnnnnnnnnnnnnnnnnnnnnnnnnnnnnnnnnnnnnnnnnnnnnnnnnnnnnnnnnnnnnnnnnnnnnnnnnnnnnnnnnnnnnnnnnnnnnnnnnnnnnnnnnnnnnnnnnnnnnnnnnnnnnnnnnnnnnnnnnnnnnnnnnnnnnnnnnnnnnnnnnnnnnnnnnnnnnnnnnnnnnnnnnnnnnnnnnnnnnnnnnnnnnnnnnnnnnnnnnnnnnnnnnnnnnnnnnnnnnnnnnnnnnnnnnnnnnnnnnnnnnnnnnnnnnnnnnnnnnnnnnnnnnnnnnnnnnnnnnnnnnnnnnnnnnnnnnnnnnnnnnnnnnnnnnnnnnnnnnnnnnnnnnnnnnnnnnnnnnnnnnnnnnnnnnnnnnnnnnnnnnnnnnnnnnnnnnnnnnnnnnnnnnnnnnnnnnnnnnnnnnnnnnnnnnnnnnnnnnnnnnnnnnnnnnnnnnnnnnnnnnnnnnnnnnnnnnnnnnnnnnnnnnnnnnnnnnnnnnnnnnnnnnnnnnnnnnnnnnnnnnnnnnnnnnnnnnnnnnnnnnnnnnnnnnnnnnnnnnnnnnnnnnnnnnnnnnnnnnnnnnnnnnnnnnnnnnnnnnnnnnnnnnnnnnnnnnnnnnnnnnnnnnnnnnnnnnnnnnnnnnnnnnnnnnnnnnnnnnnnnnnnnnnnnnnnnnnnnnnnnnnnnnnnnnnnnnnnnnnnnnnnnnnnnnnnnnnnnnnnnnnnnnnnnnnnnnnnnnnnnnnnnnnnnnnnnnnnnnnnnnnnnnnnnnnnnnnnnnnnnnnnnnnnnnnnnnnnnnnnnnnnnnnnnnnnnnnnnnnnnnnnnnnnnnnnnnnnnnnnnnnnnnnnnnnnnnnnnnnnnnnnnnnnnnnnnnnnnnnnnnnnnnnnnnnnnnnnnnnnnnnnnnnnnnnnnnnnnnnnnnnnnnnnnnnnnnnnnnnnnnnnnnnnnnnnnnnnnnnnnnnnnnnnnnnnnnnnnnnnnnnnnnnnnnnnnnnnnnnnnnnnnnnnnnnnnnnnnnnnnnnnnnnnnnnnnnnnnnnnnnnnnnnnnnnnnnnnnnnnnnnnnnnnnnnnnnnnnnnnnnnnnnnnnnnnnnnnnnnnnnnnnnnnnnnnnnnnnnnnnnnnnnnnnnnnnnnnnnnnnnnnnnnnnnnnnnnnnnnnnnnnnnnnnnnnnnnnnnnnnnnnnnnnnnnnnnnnnnnnnnnnnnnnnnnnnnnnnnnnnnnnnnnnnnnnnnnnnnnnnnnnnnnnnnnnnnnnnnnnnnnnnnnnnnnnnnnnnnnnnnnnnnnnnnnnnnnnnnnnnnnnnnnnnnnnnnnnnnnnnnnnnnnnnnnnnnnnnnnnnnnnnnnnnnnnnnnnnnnnnnnnnnnnnnnnnnnnnnnnnnnnnnnnnnnnnnnnnnnnnnnnnnnnnnnnnnnnnnnnnnnnnnnnnnnnnnnnnnnnnnnnnnnnnnnnnnnnnnnnnnnnnnnnnnnnnnnnnnnnnnnnnnnnnnnnnnnnnnnnnnnnnnnnnnnnnnnnnnnnnnnnnnnnnnnnnnnnnnnnnnnnnnnnnnnnnnnnnnnnnnnnnnnnnnnnnnnnnnnnnnnnnnnnnnnnnnnnnnnnnnnnnnnnnnnnnnnnnnnnnnnnnnnnnnnnnnnnnnnnnnnnnnnnnnnnnnnnnnnnnnnnnnnnnnnnnnnnnnnnnnnnnnnnnnnnnnnnnnnnnnnnnnnnnnnnnnnnnnnnnnnnnnnnnnnnnnnnnnnnnnnnnnnnnnnnnnnnnnnnnnnnnnnnnnnnnnnnnnnnnnnnnnnnnnnnnnnnnnnnnnnnnnnnnnnnnnnnnnnnnnnnnnnnnnnnnnnnnnnnnnnnnnnnnnnnnnnnnnnnnnnnnnnnnnnnnnnnnnnnnnnnnnnnnnnnnnnnnnnnnnnnnnnnnnnnnnnnnnnnnnnnnnnnnnnnnnnnnnnnnnnnnnnnnnnnnnnnnnnnnnnnnnnnnnnnnnnnnnnnnnnnnnnnnnnnnnnnnnnnnnnnnnnnnnnnnnnnnnnnnnnnnnnnnnnnnnnnnnnnnnnnnnnnnnnnnnnnnnnnnnnnnnnnnnnnnnnnnnnnnnnnnnnnnnnnnnnnnnnnnnnnnnnnnnnnnnnnnnnnnnnnnnnnnnnnnnnnnnnnnnnnnnnnnnnnnnnnnnnnnnnnnnnnnnnnnnnnnnnnnnnnnnnnnnnnnnnnnnnnnnnnnnnnnnnnnnnnnnnnnnnnnnnnnnnnnnnnnnnnnnnnnnnnnnnnnnnnnnnnnnnnnnnnnnnnnnnnnnnnnnnnnnnnnnnnnnnnnnnnnnnnnnnnnnnnnnnnnnnnnnnnnnnnnnnnnnnnnnnnnnnnnnnnnnnnnnnnnnnnnnnnnnnnnnnnnnnnnnnnnnnnnnnnnnnnnnnnnnnnnnnnnnnnnnnnnnnnnnnnnnnnnnnnnnnnnnnnnnnnnnnnnnnnnnnnnnnnnnnnnnnnnnnnnnnnnnnnnnnnnnnnnnnnnnnnnnnnnnnnnnnnnnnnnnnnnnnnnnnnnnnnnnnnnnnnnnnnnnnnnnnnnnnnnnnnnnnnnnnnnnnnnnnnnnnnnnnnnnnnnnnnnnnnnnnnnnnnnnnnnnnnnnnnnnnnnnnnnnnnnnnnnnnnnnnnnnnnnnnnnnnnnnnnnnnnnnnnnnnnnnnnnnnnnnnnnnnnnnnnnnnnnnnnnnnnnnnnnnnnnnnnnnnnnnnnnnnnnnnnnnnnnnnnnnnnnnnnnnnnnnnnnnnnnnnnnnnnnnnnnnnnnnnnnnnnnnnnnnnnnnnnnnnnnnnnnnnnnnnnnnnnnnnnnnnnnnnnnnnnnnnnnnnnnnnnnnnnnnnnnnnnnnnnnnnnnnnnnnnnnnnnnnnnnnnnnnnnnnnnnnnnnnnnnnnnnnnnnnnnnnnnnnnnnnnnnnnnnnnnnnnnnnnnnnnnnnnnnnnnnnnnnnnnnnnnnnnnnnnnnnnnnnnnnnnnnnnnnnnnnnnnnnnnnnnnnnnnnnnnnnnnnnnnnnnnnnnnnnnnnnnnnnnnnnnnnnnnnnnnnnnnnnnnnnnnnnnnnnnnnnnnnnnnnnnnnnnnnnnnnnnnnnnnnnnnnnnnnnnnnnnnnnnnnnnnnnnnnnnnnnnnnnnnnnnnnnnnnnnnnnnnnnnnnnnnnnnnnnnnnnnnnnnnnnnnnnnnnnnnnnnnnnnnnnnnnnnnnnnnnnnnnnnnnnnnnnnnnnnnnnnnnnnnnnnnnnnnnnnnnnnnnnnnnnnnnnnnnnnnnnnnnnnnnnnnnnnnnnnnnnnnnnnnnnnnnnnnnnnnnnnnnnnnnnnnnnnnnnnnnnnnnnnnnnnnnnnnnnnnnnnnnnnnnnnnnnnnnnnnnnnnnnnnnnnnnnnnnnnnnnnnnnnnnnnnnnnnnnnnnnnnnnnnnnnnnnnnnnnnnnnnnnnnnnnnnnnnnnnnnnnnnnnnnnnnnnnnnnnnnnnnnnnnnnnnnnnnnnnnnnnnnnnnnnnnnnnnnnnnnnnnnnnnnnnnnnnnnnnnnnnnnnnnnnnnnnnnnnnnnnnnnnnnnnnnnnnnnnnnnnnnnnnnnnnnnnnnnnnnnnnnnnnnnnnnnnnnnnnnnnnnnnnnnnnnnnnnnnnnnnnnnnnnnnnnnnnnnnnnnnnnnnnnnnnnnnnnnnnnnnnnnnnnnnnnnnnnnnnnnnnnnnnnnnnnnnnnnnnnnnnnnnnnnnnnnnnnnnnnnnnnnnnnnnnnnnnnnnnnnnnnnnnnnnnnnnnnnnnnnnnnnnnnnnnnnnnnnnnnnnnnnnnnnnnnnnnnnnnnnnnnnnnnnnnnnnnnnnnnnnnnnnnnnnnnnnnnnnnnnnnnnnnnnnnnnnnnnnnnnnnnnnnnnnnnnnnnnnnnnnnnnnnnnnnnnnnnnnnnnnnnnnnnnnnnnnnnnnnnnnnnnnnnnnnnnnnnnnnnnnnnnnnnnnnnnnnnnnnnnnnnnnnnnnnnnnnnnnnnnnnnnnnnnnnnnnnnnnnnnnnnnnnnnnnnnnnnnnnnnnnnnnnnnnnnnnnnnnnnnnnnnnnnnnnnnnnnnnnnnnnnnnnnnnnnnnnnnnnnnnnnnnnnnnnnnnnnnnnnnnnnnnnnnnnnnnnnnnnnnnnnnnnnnnnnnnnnnnnnnnnnnnnnnnnnnnnnnnnnnnnnnnnnnnnnnnnnnnnnnnnnnnnnnnnnnnnnnnnnnnnnnnnnnnnnnnnnnnnnnnnnnnnnnnnnnnnnnnnnnnnnnnnnnnnnnnnnnnnnnnnnnnnnnnnnnnnnnnnnnnnnnnnnnnnnnnnnnnnnnnnnnnnnnnnnnnnnnnnnnnnnnnnnnnnnnnnnnnnnnnnnnnnnnnnnnnnnnnnnnnnnnnnnnnnnnnnnnnnnnnnnnnnnnnnnnnnnnnnnnnnnnnnnnnnnnnnnnnnnnnnnnnnnnnnnnnnnnnnnnnnnnnnnnnnnnnnnnnnnnnnnnnnnnnnnnnnnnnnnnnnnnnnnnnnnnnnnnnnnnnnnnnnnnnnnnnnnnnnnnnnnnnnnnnnnnnnnnnnnnnnnnnnnnnnnnnnnnnnnnnnnnnnnnnnnnnnnnnnnnnnnnnnnnnnnnnnnnnnnnnnnnnnnnnnnnnnnnnnnnnnnnnnnnnnnnnnnnnnnnnnnnnnnnnnnnnnnnnnnnnnnnnnnnnnnnnnnnnnnnnnnnnnnnnnnnnnnnnnnnnnnnnnnnnnnnnnnnnnnnnnnnnnnnnnnnnnnnnnnnnnnnnnnnnnnnnnnnnnnnnnnnnnnnnnnnnnnnnnnnnnnnnnnnnnnnnnnnnnnnnnnnnnnnnnnnnnnnnnnnnnnnnnnnnnnnnnnnnnnnnnnnnnnnnnnnnnnnnnnnnnnnnnnnnnnnnnnnnnnnnnnnnnnnnnnnnnnnnnnnnnnnnnnnnnnnnnnnnnnnnnnnnnnnnnnnnnnnnnnnnnnnnnnnnnnnnnnnnnnnnnnnnnnnnnnnnnnnnnnnnnnnnnnnnnnnnnnnnnnnnnnnnnnnnnnnnnnnnnnnnnnnnnnnnnnnnnnnnnnnnnnnnnnnnnnnnnnnnnnnnnnnnnnnnnnnnnnnnnnnnnnnnnnnnnnnnnnnnnnnnnnnnnnnnnnnnnnnnnnnnnnnnnnnnnnnnnnnnnnnnnnnnnnnnnnnnnnnnnnnnnnnnnnnnnnnnnnnnnnnnnnnnnnnnnnnnnnnnnnnnnnnnnnnnnnnnnnnnnnnnnnnnnnnnnnnnnnnnnnnnnnnnnnnnnnnnnnnnnnnnnnnnnnnnnnnnnnnnnnnnnnnnnnnnnnnnnnnnnnnnnnnnnnnnnnnnnnnnnnnnnnnnnnnnnnnnnnnnnnnnnnnnnnnnnnnnnnnnnnnnnnnnnnnnnnnnnnnnnnnnnnnnnnnnnnnnnnnnnnnnnnnnnnnnnnnnnnnnnnnnnnnnnnnnnnnnnnnnnnnnnnnnnnnnnnnnnnnnnnnnnnnnnnnnnnnnnnnnnnnnnnnnnnnnnnnnnnnnnnnnnnnnnnnnnnnnnnnnnnnnnnnnnnnnnnnnnnnnnnnnnnnnnnnnnnnnnnnnnnnnnnnnnnnnnnnnnnnnnnnnnnnnnnnnnnnnnnnnnnnnnnnnnnnnnnnnnnnnnnnnnnnnnnnnnnnnnnnnnnnnnnnnnnnnnnnnnnnnnnnnnnnnnnnnnnnnnnnnnnnnnnnnnnnnnnnnnnnnnnnnnnnnnnnnnnnnnnnnnnnnnnnnnnnnnnnnnnnnnnnnnnnnnnnnnnnnnnnnnnnnnnnnnnnnnnnnnnnnnnnnnnnnnnnnnnnnnnnnnnnnnnnnnnnnnnnnnnnnnnnnnnnnnnnnnnnnnnnnnnnnnnnnnnnnnnnnnnnnnnnnnnnnnnnnnnnnnnnnnnnnnnnnnnnnnnnnnnnnnnnnnnnnnnnnnnnnnnnnnnnnnnnnnnnnnnnnnnnnnnnnnnnnnnnnnnnnnnnnnnnnnnnnnnnnnnnnnnnnnnnnnnnnnnnnnnnnnnnnnnnnnnnnnnnnnnnnnnnnnnnnnnnnnnnnnnnnnnnnnnnnnnnnnnnnnnnnnnnnnnnnnnnnnnnnnnnnnnnnnnnnnnnnnnnnnnnnnnnnnnnnnnnnnnnnnnnnnnnnnnnnnnnnnnnnnnnnnnnnnnnnnnnnnnnnnnnnnnnnnnnnnnnnnnnnnnnnnnnnnnnnnnnnnnnnnnnnnnnnnnnnnnnnnnnnnnnnnnnnnnnnnnnnnnnnnnnnnnnnnnnnnnnnnnnnnnnnnnnnnnnnnnnnnnnnnnnnnnnnnnnnnnnnnnnnnnnnnnnnnnnnnnnnnnnnnnnnnnnnnnnnnnnnnnnnnnnnnnnnnnnnnnnnnnnnnnnnnnnnnnnnnnnnnnnnnnnnnnnnnnnnnnnnnnnnnnnnnnnnnnnnnnnnnnnnnnnnnnnnnnnnnnnnnnnnnnnnnnnnnnnnnnnnnnnnnnnnnnnnnnnnnnnnnnnnnnnnnnnnnnnnnnnnnnnnnnnnnnnnnnnnnnnnnnnnnnnnnnnnnnnnnnnnnnnnnnnnnnnnnnnnnnnnnnnnnnnnnnnnnnnnnnnnnnnnnnnnnnnnnnnnnnnnnnnnnnnnnnnnnnnnnnnnnnnnnnnnnnnnnnnnnnnnnnnnnnnnnnnnnnnnnnnnnnnnnnnnnnnnnnnnnnnnnnnnnnnnnnnnnnnnnnnnnnnnnnnnnnnnnnnnnnnnnnnnnnnnnnnnnnnnnnnnnnnnnnnnnnnnnnnnnnnnnnnnnnnnnnnnnnnnnnnnnnnnnnnnnnnnnnnnnnnnnnnnnnnnnnnnnnnnnnnnnnnnnnnnnnnnnnnnnnnnnnnnnnnnnnnnnnnnnnnnnnnnnnnnnnnnnnnnnnnnnnnnnnnnnnnnnnnnnnnnnnnnnnnnnnnnnnnnnnnnnnnnnnnnnnnnnnnnnnnnnnnnnnnnnnnnnnnnnnnnnnnnnnnnnnnnnnnnnnnnnnnnnnnnnnnnnnnnnnnnnnnnnnnnnnnnnnnnnnnnnnnnnnnnnnnnnnnnnnnnnnnnnnnnnnnnnnnnnnnnnnnnnnnnnnnnnnnnnnnnnnnnnnnnnnnnnnnnnnnnnnnnnnnnnnnnnnnnnnnnnnnnnnnnnnnnnnnnnnnnnnnnnnnnnnnnnnnnnnnnnnnnnnnnnnnnnnnnnnnnnnnnnnnnnnnnnnnnnnnnnnnnnnnnnnnnnnnnnnnnnnnnnnnnnnnnnnnnnnnnnnnnnnnnnnnnnnnnnnnnnnnnnnnnnnnnnnnnnnnnnnnnnnnnnnnnnnnnnnnnnnnnnnnnnnnnnnnnnnnnnnnnnnnnnnnnnnnnnnnnnnnnnnnnnnnnnnnnnnnnnnnnnnnnnnnnnnnnnnnnnnnnnnnnnnnnnnnnnnnnnnnnnnnnnnnnnnnnnnnnnnnnnnnnnnnnnnnnnnnnnnnnnnnnnnnnnnnnnnnnnnnnnnnnnnnnnnnnnnnnnnnnnnnnnnnnnnnnnnnnnnnnnnnnnnnnnnnnnnnnnnnnnnnnnnnnnnnnnnnnnnnnnnnnnnnnnnnnnnnnnnnnnnnnnnnnnnnnnnnnnnnnnnnnnnnnnnnnnnnnnnnnnnnnnnnnnnnnnnnnnnnnnnnnnnnnnnnnnnnnnnnnnnnnnnnnnnnnnnnnnnnnnnnnnnnnnnnnnnnnnnnnnnnnnnnnnnnnnnnnnnnnnnnnnnnnnnnnnnnnnnnnnnnnnnnnnnnnnnnnnnnnnnnnnnnnnnnnnnnnnnnnnnnnnnnnnnnnnnnnnnnnnnnnnnnnnnnnnnnnnnnnnnnnnnnnnnnnnnnnnnnnnnnnnnnnnnnnnnnnnnnnnnnnnnnnnnnnnnnnnnnnnnnnnnnnnnnnnnnnnnnnnnnnnnnnnnnnnnnnnnnnnnnnnnnnnnnnnnnnnnnnnnnnnnnnnnnnnnnnnnnnnnnnnnnnnnnnnnnnnnnnnnnnnnnnnnnnnnnnnnnnnnnnnnnnnnnnnnnnnnnnnnnnnnnnnnnnnnnnnnnnnnnnnnnnnnnnnnnnnnnnnnnnnnnnnnnnnnnnnnnnnnnnnnnnnnnnnnnnnnnnnnnnnnnnnnnnnnnnnnnnnnnnnnnnnnnnnnnnnnnnnnnnnnnnnnnnnnnnnnnnnnnnnnnnnnnnnnnnnnnnnnnnnnnnnnnnnnnnnnnnnnnnnnnnnnnnnnnnnnnnnnnnnnnnnnnnnnnnnnnnnnnnnnnnnnnnnnnnnnnnnnnnnnnnnnnnnnnnnnnnnnnnnnnnnnnnnnnnnnnnnnnnnnnnnnnnnnnnnnnnnnnnnnnnnnnnnnnnnnnnnnnnnnnnnnnnnnnnnnnnnnnnnnnnnnnnnnnnnnnnnnnnnnnnnnnnnnnnnnnnnnnnnnnnnnnnnnnnnnnnnnnnnnnnnnnnnnnnnnnnnnnnnnnnnnnnnnnnnnnnnnnnnnnnnnnnnnnnnnnnnnnnnnnnnnnnnnnnnnnnnnnnnnnnnnnnnnnnnnnnnnnnnnnnnnnnnnnnnnnnnnnnnnnnnnnnnnnnnnnnnnnnnnnnnnnnnnnnnnnnnnnnnnnnnnnnnnnnnnnnnnnnnnnnnnnnnnnnnnnnnnnnnnnnnnnnnnnnnnnnnnnnnnnnnnnnnnnnnnnnnnnnnnnnnnnnnnnnnnnnnnnnnnnnnnnnnnnnnnnnnnnnnnnnnnnnnnnnnnnnnnnnnnnnnnnnnnnnnnnnnnnnnnnnnnnnnnnnnnnnnnnnnnnnnnnnnnnnnnnnnnnnnnnnnnnnnnnnnnnnnnnnnnnnnnnnnnnnnnnnnnnnnnnnnnnnnnnnnnnnnnnnnnnnnnnnnnnnnnnnnnnnnnnnnnnnnnnnnnnnnnnnnnnnnnnnnnnnnnnnnnnnnnnnnnnnnnnnnnnnnnnnnnnnnnnnnnnnnnnnnnnnnnnnnnnnnnnnnnnnnnnnnnnnnnnnnnnnnnnnnnnnnnnnnnnnnnnnnnnnnnnnnnnnnnnnnnnnnnnnnnnnnnnnnnnnnnnnnnnnnnnnnnnnnnnnnnnnnnnnnnnnnnnnnnnnnnnnnnnnnnnnnnnnnnnnnnnnnnnnnnnnnnnnnnnnnnnnnnnnnnnnnnnnnnnnnnnnnnnnnnnnnnnnnnnnnnnnnnnnnnnnnnnnnnnnnnnnnnnnnnnnnnnnnnnnnnnnnnnnnnnnnnnnnnnnnnnnnnnnnnnnnnnnnnnnnnnnnnnnnnnnnnnnnnnnnnnnnnnnnnnnnnnnnnnnnnnnnnnnnnnnnnnnnnnnnnnnnnnnnnnnnnnnnnnnnnnnnnnnnnnnnnnnnnnnnnnnnnnnnnnnnnnnnnnnnnnnnnnnnnnnnnnnnnnnnnnnnnnnnnnnnnnnnnnnnnnnnnnnnnnnnnnnnnnnnnnnnnnnnnnnnnnnnnnnnnnnnnnnnnnnnnnnnnnnnnnnnnnnnnnnnnnnnnnnnnnnnnnnnnnnnnnnnnnnnnnnnnnnnnnnnnnnnnnnnnnnnnnnnnnnnnnnnnnnnnnnnnnnnnnnnnnnnnnnnnnnnnnnnnnnnnnnnnnnnnnnnnnnnnnnnnnnnnnnnnnnnnnnnnnnnnnnnnnnnnnnnnnnnnnnnnnnnnnnnnnnnnnnnnnnnnnnnnnnnnnnnnnnnnnnnnnnnnnnnnnnnnnnnnnnnnnnnnnnnnnnnnnnnnnnnnnnnnnnnnnnnnnnnnnnnnnnnnnnnnnnnnnnnnnnnnnnnnnnnnnnnnnnnnnnnnnnnnnnnnnnnnnnnnnnnnnnnnnnnnnnnnnnnnnnnnnnnnnnnnnnnnnnnnnnnnnnnnnnnnnnnnnnnnnnnnnnnnnnnnnnnnnnnnnnnnnnnnnnnnnnnnnnnnnnnnnnnnnnnnnnnnnnnnnnnnnnnnnnnnnnnnnnnnnnnnnnnnnnnnnnnnnnnnnnnnnnnnnnnnnnnnnnnnnnnnnnnnnnnnnnnnnnnnnnnnnnnnnnnnnnnnnnnnnnnnnnnnnnnnnnnnnnnnnnnnnnnnnnnnnnnnnnnnnnnnnnnnnnnnnnnnnnnnnnnnnnnnnnnnnnnnnnnnnnnnnnnnnnnnnnnnnnnnnnnnnnnnnnnnnnnnnnnnnnnnnnnnnnnnnnnnnnnnnnnnnnnnnnnnnnnnnnnnnnnnnnnnnnnnnnnnnnnnnnnnnnnnnnnnnnnnnnnnnnnnnnnnnnnnnnnnnnnnnnnnnnnnnnnnnnnnnnnnnnnnnnnnnnnnnnnnnnnnnnnnnnnnnnnnnnnnnnnnnnnnnnnnnnnnnnnnnnnnnnnnnnnnnnnnnnnnnnnnnnnnnnnnnnnnnnnnnnnnnnnnnnnnnnnnnnnnnnnnnnnnnnnnnnnnnnnnnnnnnnnnnnnnnnnnnnnnnnnnnnnnnnnnnnnnnnnnnnnnnnnnnnnnnnnnnnnnnnnnnnnnnnnnnnnnnnnnnnnnnnnnnnnnnnnnnnnnnnnnnnnnnnnnnnnnnnnnnnnnnnnnnnnnnnnnnnnnnnnnnnnnnnnnnnnnnnnnnnnnnnnnnnnnnnnnnnnnnnnnnnnnnnnnnnnnnnnnnnnnnnnnnnnnnnnnnnnnnnnnnnnnnnnnnnnnnnnnnnnnnnnnnnnnnnnnnnnnnnnnnnnnnnnnnnnnnnnnnnnnnnnnnnnnnnnnnnnnnnnnnnnnnnnnnnnnnnnnnnnnnnnnnnnnnnnnnnnnnnnnnnnnnnnnnnnnnnnnnnnnnnnnnnnnnnnnnnnnnnnnnnnnnnnnnnnnnnnnnnnnnnnnnnnnnnnnnnnnnnnnnnnnnnnnnnnnnnnnnnnnnnnnnnnnnnnnnnnnnnnnnnnnnnnnnnnnnnnnnnnnnnnnnnnnnnnnnnnnnnnnnnnnnnnnnnnnnnnnnnnnnnnnnnnnnnnnnnnnnnnnnnnnnnnnnnnnnnnnnnnnnnnnnnnnnnnnnnnnnnnnnnnnnnnnnnnnnnnnnnnnnnnnnnnnnnnnnnnnnnnnnnnnnnnnnnnnnnnnnnnnnnnnnnnnnnnnnnnnnnnnnnnnnnnnnnnnnnnnnnnnnnnnnnnnnnnnnnnnnnnnnnnnnnnnnnnnnnnnnnnnnnnnnnnnnnnnnnnnnnnnnnnnnnnnnnnnnnnnnnnnnnnnnnnnnnnnnnnnnnnnnnnnnnnnnnnnnnnnnnnnnnnnnnnnnnnnnnnnnnnnnnnnnnnnnnnnnnnnnnnnnnnnnnnnnnnnnnnnnnnnnnnnnnnnnnnnnnnnnnnnnnnnnnnnnnnnnnnnnnnnnnnnnnnnnnnnnnnnnnnnnnnnnnnnnnnnnnnnnnnnnnnnnnnnnnnnnnnnnnnnnnnnnnnnnnnnnnnnnnnnnnnnnnnnnnnnnnnnnnnnnnnnnnnnnnnnnnnnnnnnnnnnnnnnnnnnnnnnnnnnnnnnnnnnnnnnnnnnnnnnnnnnnnnnnnnnnnnnnnnnnnnnnnnnnnnnnnnnnnnnnnnnnnnnnnnnnnnnnnnnnnnnnnnnnnnnnnnnnnnnnnnnnnnnnnnnnnnnnnnnnnnnnnnnnnnnnnnnnnnnnnnnnnnnnnnnnnnnnnnnnnnnnnnnnnnnnnnnnnnnnnnnnnnnnnnnnnnnnnnnnnnnnnnnnnnnnnnnnnnnnnnnnnnnnnnnnnnnnnnnnnnnnnnnnnnnnnnnnnnnnnnnnnnnnnnnnnnnnnnnnnnnnnnnnnnnnnnnnnnnnnnnnnnnnnnnnnnnnnnnnnnnnnnnnnnnnnnnnnnnnnnnnnnnnnnnnnnnnnnnnnnnnnnnnnnnnnnnnnnnnnnnnnnnnnnnnnnnnnnnnnnnnnnnnnnnnnnnnnnnnnnnnnnnnnnnnnnnnnnnnnnnnnnnnnnnnnnnnnnnnnnnnnnnnnnnnnnnnnnnnnnnnnnnnnnnnnnnnnnnnnnnnnnnnnnnnnnnnnnnnnnnnnnnnnnnnnnnnnnnnnnnnnnnnnnnnnnnnnnnnnnnnnnnnnnnnnnnnnnnnnnnnnnnnnnnnnnnnnnnnnnnnnnnnnnnnnnnnnnnnnnnnnnnnnnnnnnnnnnnnnnnnnnnnnnnnnnnnnnnnnnnnnnnnnnnnnnnnnnnnnnnnnnnnnnnnnnnnnnnnnnnnnnnnnnnnnnnnnnnnnnnnnnnnnnnnnnnnnnnnnnnnnnnnnnnnnnnnnnnnnnnnnnnnnnnnnnnnnnnnnnnnnnnnnnnnnnnnnnnnnnnnnnnnnnnnnnnnnnnnnnnnnnnnnnnnnnnnnnnnnnnnnnnnnnnnnnnnnnnnnnnnnnnnnnnnnnnnnnnnnnnnnnnnnnnnnnnnnnnnnnnnnnnnnnnnnnnnnnnnnnnnnnnnnnnnnnnnnnnnnnnnnnnnnnnnnnnnnnnnnnnnnnnnnnnnnnnnnnnnnnnnnnnnnnnnnnnnnnnnnnnnnnnnnnnnnnnnnnnnnnnnnnnnnnnnnnnnnnnnnnnnnnnnnnnnnnnnnnnnnnnnnnnnnnnnnnnnnnnnnnnnnnnnnnnnnnnnnnnnnnnnnnnnnnnnnnnnnnnnnnnnnnnnnnnnnnnnnnnnnnnnnnnnnnnnnnnnnnnnnnnnnnnnnnnnnnnnnnnnnnnnnnnnnnnnnnnnnnnnnnnnnnnnnnnnnnnnnnnnnnnnnnnnnnnnnnnnnnnnnnnnnnnnnnnnnnnnnnnnnnnnnnnnnnnnnnnnnnnnnnnnnnnnnnnnnnnnnnnnnnnnnnnnnnnnnnnnnnnnnnnnnnnnnnnnnnnnnnnnnnnnnnnnnnnnnnnnnnnnnnnnnnnnnnnnnnnnnnnnnnnnnnnnnnnnnnnnnnnnnnnnnnnnnnnnnnnnnnnnnnnnnnnnnnnnnnnnnnnnnnnnnnnnnnnnnnnnnnnnnnnnnnnnnnnnnnnnnnnnnnnnnnnnnnnnnnnnnnnnnnnnnnnnnnnnnnnnnnnnnnnnnnnnnnnnnnnnnnnnnnnnnnnnnnnnnnnnnnnnnnnnnnnnnnnnnnnnnnnnnnnnnnnnnnnnnnnnnnnnnnnnnnnnnnnnnnnnnnnnnnnnnnnnnnnnnnnnnnnnnnnnnnnnnnnnnnnnnnnnnnnnnnnnnnnnnnnnnnnnnnnnnnnnnnnnnnnnnnnnnnnnnnnnnnnnnnnnnnnnnnnnnnnnnnnnnnnnnnnnnnnnnnnnnnnnnnnnnnnnnnnnnnnnnnnnnnnnnnnnnnnnnnnnnnnnnnnnnnnnnnnnnnnnnnnnnnnnnnnnnnnnnnnnnnnnnnnnnnnnnnnnnnnnnnnnnnnnnnnnnnnnnnnnnnnnnnnnnnnnnnnnnnnnnnnnnnnnnnnnnnnnnnnnnnnnnnnnnnnnnnnnnnnnnnnnnnnnnnnnnnnnnnnnnnnnnnnnnnnnnnnnnnnnnnnnnnnnnnnnnnnnnnnnnnnnnnnnnnnnnnnnnnnnnnnnnnnnnnnnnnnnnnnnnnnnnnnnnnnnnnnnnnnnnnnnnnnnnnnnnnnnnnnnnnnnnnnnnnnnnnnnnnnnnnnnnnnnnnnnnnnnnnnnnnnnnnnnnnnnnnnnnnnnnnnnnnnnnnnnnnnnnnnnnnnnnnnnnnnnnnnnnnnnnnnnnnnnnnnnnnnnnnnnnnnnnnnnnnnnnnnnnnnnnnnnnnnnnnnnnnnnnnnnnnnnnnnnnnnnnnnnnnnnnnnnnnnnnnnnnnnnnnnnnnnnnnnnnnnnnnnnnnnnnnnnnnnnnnnnnnnnnnnnnnnnnnnnnnnnnnnnnnnnnnnnnnnnnnnnnnnnnnnnnnnnnnnnnnnnnnnnnnnnnnnnnnnnnnnnnnnnnnnnnnnnnnnnnnnnnnnnnnnnnnnnnnnnnnnnnnnnnnnnnnnnnnnnnnnnnnnnnnnnnnnnnnnnnnnnnnnnnnnnnnnnnnnnnnnnnnnnnnnnnnnnnnnnnnnnnnnnnnnnnnnnnnnnnnnnnnnnnnnnnnnnnnnnnnnnnnnnnnnnnnnnnnnnnnnnnnnnnnnnnnnnnnnnnnnnnnnnnnnnnnnnnnnnnnnnnnnnnnnnnnnnnnnnnnnnnnnnnnnnnnnnnnnnnnnnnnnnnnnnnnnnnnnnnnnnnnnnnnnnnnnnnnnnnnnnnnnnnnnnnnnnnnnnnnnnnnnnnnnnnnnnnnnnnnnnnnnnnnnnnnnnnnnnnnnnnnnnnnnnnnnnnnnnnnnnnnnnnnnnnnnnnnnnnnnnnnnnnnnnnnnnnnnnnnnnnnnnnnnnnnnnnnnnnnnnnnnnnnnnnnnnnnnnnnnnnnnnnnnnnnnnnnnnnnnnnnnnnnnnnnnnnnnnnnnnnnnnnnnnnnnnnnnnnnnnnnnnnnnnnnnnnnnnnnnnnnnnnnnnnnnnnnnnnnnnnnnnnnnnnnnnnnnnnnnnnnnnnnnnnnnnnnnnnnnnnnnnnnnnnnnnnnnnnnnnnnnnnnnnnnnnnnnnnnnnnnnnnnnnnnnnnnnnnnnnnnnnnnnnnnnnnnnnnnnnnnnnnnnnnnnnnnnnnnnnnnnnnnnnnnnnnnnnnnnnnnnnnnnnnnnnnnnnnnnnnnnnnnnnnnnnnnnnnnnnnnnnnnnnnnnnnnnnnnnnnnnnnnnnnnnnnnnnnnnnnnnnnnnnnnnnnnnnnnnnnnnnnnnnnnnnnnnnnnnnnnnnnnnnnnnnnnnnnnnnnnnnnnnnnnnnnnnnnnnnnnnnnnnnnnnnnnnnnnnnnnnnnnnnnnnnnnnnnnnnnnnnnnnnnnnnnnnnnnnnnnnnnnnnnnnnnnnnnnnnnnnnnnnnnnnnnnnnnnnnnnnnnnnnnnnnnnnnnnnnnnnnnnnnnnnnnnnnnnnnnnnnnnnnnnnnnnnnnnnnnnnnnnnnnnnnnnnnnnnnnnnnnnnnnnnnnnnnnnnnnnnnnnnnnnnnnnnnnnnnnnnnnnnnnnnnnnnnnnnnnnnnnnnnnnnnnnnnnnnnnnnnnnnnnnnnnnnnnnnnnnnnnnnnnnnnnnnnnnnnnnnnnnnnnnnnnnnnnnnnnnnnnnnnnnnnnnnnnnnnnnnnnnnnnnnnnnnnnnnnnnnnnnnnnnnnnnnnnnnnnnnnnnnnnnnnnnnnnnnnnnnnnnnnnnnnnnnnnnnnnnnnnnnnnnnnnnnnnnnnnnnnnnnnnnnnnnnnnnnnnnnnnnnnnnnnnnnnnnnnnnnnnnnnnnnnnnnnnnnnnnnnnnnnnnnnnnnnnnnnnnnnnnnnnnnnnnnnnnnnnnnnnnnnnnnnnnnnnnnnnnnnnnnnnnnnnnnnnnnnnnnnnnnnnnnnnnnnnnnnnnnnnnnnnnnnnnnnnnnnnnnnnnnnnnnnnnnnnnnnnnnnnnnnnnnnnnnnnnnnnnnnnnnnnnnnnnnnnnnnnnnnnnnnnnnnnnnnnnnnnnnnnnnnnnnnnnnnnnnnnnnnnnnnnnnnnnnnnnnnnnnnnnnnnnnnnnnnnnnnnnnnnnnnnnnnnnnnnnnnnnnnnnnnnnnnnnnnnnnnnnnnnnnnnnnnnnnnnnnnnnnnnnnnnnnnnnnnnnnnnnnnnnnnnnnnnnnnnnnnnnnnnnnnnnnnnnnnnnnnnnnnnnnnnnnnnnnnnnnnnnnnnnnnnnnnnnnnnnnnnnnnnnnnnnnnnnnnnnnnnnnnnnnnnnnnnnnnnnnnnnnnnnnnnnnnnnnnnnnnnnnnnnnnnnnnnnnnnnnnnnnnnnnnnnnnnnnnnnnnnnnnnnnnnnnnnnnnnnnnnnnnnnnnnnnnnnnnnnnnnnnnnnnnnnnnnnnnnnnnnnnnnnnnnnnnnnnnnnnnnnnnnnnnnnnnnnnnnnnnnnnnnnnnnnnnnnnnnnnnnnnnnnnnnnnnnnnnnnnnnnnnnnnnnnnnnnnnnnnnnnnnnnnnnnnnnnnnnnnnnnnnnnnnnnnnnnnnnnnnnnnnnnnnnnnnnnnnnnnnnnnnnnnnnnnnnnnnnnnnnnnnnnnnnnnnnnnnnnnnnnnnnnnnnnnnnnnnnnnnnnnnnnnnnnnnnnnnnnnnnnnnnnnnnnnnnnnnnnnnnnnnnnnnnnnnnnnnnnnnnnnnnnnnnnnnnnnnnnnnnnnnnnnnnnnnnnnnnnnnnnnnnnnnnnnnnnnnnnnnnnnnnnnnnnnnnnnnnnnnnnnnnnnnnnnnnnnnnnnnnnnnnnnnnnnnnnnnnnnnnnnnnnnnnnnnnnnnnnnnnnnnnnnnnnnnnnnnnnnnnnnnnnnnnnnnnnnnnnnnnnnnnnnnnnnnnnnnnnnnnnnnnnnnnnnnnnnnnnnnnnnnnnnnnnnnnnnnnnnnnnnnnnnnnnnnnnnnnnnnnnnnnnnnnnnnnnnnnnnnnnnnnnnnnnnnnnnnnnnnnnnnnnnnnnnnnnnnnnnnnnnnnnnnnnnnnnnnnnnnnnnnnnnnnnnnnnnnnnnnnnnnnnnnnnnnnnnnnnnnnnnnnnnnnnnnnnnnnnnnnnnnnnnnnnnnnnnnnnnnnnnnnnnnnnnnnnnnnnnnnnnnnnnnnnnnnnnnnnnnnnnnnnnnnnnnnnnnnnnnnnnnnnnnnnnnnnnnnnnnnnnnnnnnnnnnnnnnnnnnnnnnnnnnnnnnnnnnnnnnnnnnnnnnnnnnnnnnnnnnnnnnnnnnnnnnnnnnnnnnnnnnnnnnnnnnnnnnnnnnnnnnnnnnnnnnnnnnnnnnnnnnnnnnnnnnnnnnnnnnnnnnnnnnnnnnnnnnnnnnnnnnnnnnnnnnnnnnnnnnnnnnnnnnnnnnnnnnnnnnnnnnnnnnnnnnnnnnnnnnnnnnnnnnnnnnnnnnnnnnnnnnnnnnnnnnnnnnnnnnnnnnnnnnnnnnnnnnnnnnnnnnnnnnnnnnnnnnnnnnnnnnnnnnnnnnnnnnnnnnnnnnnnnnnnnnnnnnnnnnnnnnnnnnnnnnnnnnnnnnnnnnnnnnnnnnnnnnnnnnnnnnnnnnnnnnnnnnnnnnnnnnnnnnnnnnnnnnnnnnnnnnnnnnnnnnnnnnnnnnnnnnnnnnnnnnnnnnnnnnnnnnnnnnnnnnnnnnnnnnnnnnnnnnnnnnnnnnnnnnnnnnnnnnnnnnnnnnnnnnnnnnnnnnnnnnnnnnnnnnnnnnnnnnnnnnnnnnnnnnnnnnnnnnnnnnnnnnnnnnnnnnnnnnnnnnnnnnnnnnnnnnnnnnnnnnnnnnnnnnnnnnnnnnnnnnnnnnnnnnnnnnnnnnnnnnnnnnnnnnnnnnnnnnnnnnnnnnnnnnnnnnnnnnnnnnnnnnnnnnnnnnnnnnnnnnnnnnnnnnnnnnnnnnnnnnnnnnnnnnnnnnnnnnnnnnnnnnnnnnnnnnnnnnnnnnnnnnnnnnnnnnnnnnnnnnnnnnnnnnnnnnnnnnnnnnnnnnnnnnnnnnnnnnnnnnnnnnnnnnnnnnnnnnnnnnnnnnnnnnnnnnnnnnnnnnnnnnnnnnnnnnnnnnnnnnnnnnnnnnnnnnnnnnnnnnnnnnnnnnnnnnnnnnnnnnnnnnnnnnnnnnnnnnnnnnnnnnnnnnnnnnnnnnnnnnnnnnnnnnnnnnnnnnnnnnnnnnnnnnnnnnnnnnnnnnnnnnnnnnnnnnnnnnnnnnnnnnnnnnnnnnnnnnnnnnnnnnnnnnnnnnnnnnnnnnnnnnnnnnnnnnnnnnnnnnnnnnnnnnnnnnnnnnnnnnnnnnnnnnnnnnnnnnnnnnnnnnnnnnnnnnnnnnnnnnnnnnnnnnnnnnnnnnnnnnnnnnnnnnnnnnnnnnnnnnnnnnnnnnnnnnnnnnnnnnnnnnnnnnnnnnnnnnnnnnnnnnnnnnnnnnnnnnnnnnnnnnnnnnnnnnnnnnnnnnnnnnnnnnnnnnnnnnnnnnnnnnnnnnnnnnnnnnnnnnnnnnnnnnnnnnnnnnnnnnnnnnnnnnnnnnnnnnnnnnnnnnnnnnnnnnnnnnnnnnnnnnnnnnnnnnnnnnnnnnnnnnnnnnnnnnnnnnnnnnnnnnnnnnnnnnnnnnnnnnnnnnnnnnnnnnnnnnnnnnnnnnnnnnnnnnnnnnnnnnnnnnnnnnnnnnnnnnnnnnnnnnnnnnnnnnnnnnnnnnnnnnnnnnnnnnnnnnnnnnnnnnnnnnnnnnnnnnnnnnnnnnnnnnnnnnnnnnnnnnnnnnnnnnnnnnnnnnnnnnnnnnnnnnnnnnnnnnnnnnnnnnnnnnnnnnnnnnnnnnnnnnnnnnnnnnnnnnnnnnnnnnnnnnnnnnnnnnnnnnnnnnnnnnnnnnnnnnnnnnnnnnnnnnnnnnnnnnnnnnnnnnnnnnnnnnnnnnnnnnnnnnnnnnnnnnnnnnnnnnnnnnnnnnnnnnnnnnnnnnnnnnnnnnnnnnnnnnnnnnnnnnnnnnnnnnnnnnnnnnnnnnnnnnnnnnnnnnnnnnnnnnnnnnnnnnnnnnnnnnnnnnnnnnnnnnnnnnnnnnnnnnnnnnnnnnnnnnnnnnnnnnnnnnnnnnnnnnnnnnnnnnnnnnnnnnnnnnnnnnnnnnnnnnnnnnnnnnnnnnnnnnnnnnnnnnnnnnnnnnnnnnnnnnnnnnnnnnnnnnnnnnnnnnnnnnnnnnnnnnnnnnnnnnnnnnnnnnnnnnnnnnnnnnnnnnnnnnnnnnnnnnnnnnnnnnnnnnnnnnnnnnnnnnnnnnnnnnnnnnnnnnnnnnnnnnnnnnnnnnnnnnnnnnnnnnnnnnnnnnnnnnnnnnnnnnnnnnnnnnnnnnnnnnnnnnnnnnnnnnnnnnnnnnnnnnnnnnnnnnnnnnnnnnnnnnnnnnnnnnnnnnnnnnnnnnnnnnnnnnnnnnnnnnnnnnnnnnnnnnnnnnnnnnnnnnnnnnnnnnnnnnnnnnnnnnnnnnnnnnnnnnnnnnnnnnnnnnnnnnnnnnnnnnnnnnnnnnnnnnnnnnnnnnnnnnnnnnnnnnnnnnnnnnnnnnnnnnnnnnnnnnnnnnnnnnnnnnnnnnnnnnnnnnnnnnnnnnnnnnnnnnnnnnnnnnnnnnnnnnnnnnnnnnnnnnnnnnnnnnnnnnnnnnnnnnnnnnnnnnnnnnnnnnnnnnnnnnnnnnnnnnnnnnnnnnnnnnnnnnnnnnnnnnnnnnnnnnnnnnnnnnnnnnnnnnnnnnnnnnnnnnnnnnnnnnnnnnnnnnnnnnnnnnnnnnnnnnnnnnnnnnnnnnnnnnnnnnnnnnnnnnnnnnnnnnnnnnnnnnnnnnnnnnnnnnnnnnnnnnnnnnnnnnnnnnnnnnnnnnnnnnnnnnnnnnnnnnnnnnnnnnnnnnnnnnnnnnnnnnnnnnnnnnnnnnnnnnnnnnnnnnnnnnnnnnnnnnnnnnnnnnnnnnnnnnnnnnnnnnnnnnnnnnnnnnnnnnnnnnnnnnnnnnnnnnnnnnnnnnnnnnnnnnnnnnnnnnnnnnnnnnnnnnnnnnnnnnnnnnnnnnnnnnnnnnnnnnnnnnnnnnnnnnnnnnnnnnnnnnnnnnnnnnnnnnnnnnnnnnnnnnnnnnnnnnnnnnnnnnnnnnnnnnnnnnnnnnnnnnnnnnnnnnnnnnnnnnnnnnnnnnnnnnnnnnnnnnnnnnnnnnnnnnnnnnnnnnnnnnnnnnnnnnnnnnnnnnnnnnnnnnnnnnnnnnnnnnnnnnnnnnnnnnnnnnnnnnnnnnnnnnnnnnnnnnnnnnnnnnnnnnnnnnnnnnnnnnnnnnnnnnnnnnnnnnnnnnnnnnnnnnnnnnnnnnnnnnnnnnnnnnnnnnnnnnnnnnnnnnnnnnnnnnnnnnnnnnnnnnnnnnnnnnnnnnnnnnnnnnnnnnnnnnnnnnnnnnnnnnnnnnnnnnnnnnnnnnnnnnnnnnnnnnnnnnnnnnnnnnnnnnnnnnnnnnnnnnnnnnnnnnnnnnnnnnnnnnnnnnnnnnnnnnnnnnnnnnnnnnnnnnnnnnnnnnnnnnnnnnnnnnnnnnnnnnnnnnnnnnnnnnnnnnnnnnnnnnnnnnnnnnnnnnnnnnnnnnnnnnnnnnnnnnnnnnnnnnnnnnnnnnnnnnnnnnnnnnnnnnnnnnnnnnnnnnnnnnnnnnnnnnnnnnnnnnnnnnnnnnnnnnnnnnnnnnnnnnnnnnnnnnnnnnnnnnnnnnnnnnnnnnnnnnnnnnnnnnnnnnnnnnnnnnnnnnnnnnnnnnnnnnnnnnnnnnnnnnnnnnnnnnnnnnnnnnnnnnnnnnnnnnnnnnnnnnnnnnnnnnnnnnnnnnnnnnnnnnnnnnnnnnnnnnnnnnnnnnnnnnnnnnnnnnnnnnnnnnnnnnnnnnnnnnnnnnnnnnnnnnnnnnnnnnnnnnnnnnnnnnnnnnnnnnnnnnnnnnnnnnnnnnnnnnnnnnnnnnnnnnnnnnnnnnnnnnnnnnnnnnnnnnnnnnnnnnnnnnnnnnnnnnnnnnnnnnnnnnnnnnnnnnnnnnnnnnnnnnnnnnnnnnnnnnnnnnnnnnnnnnnnnnnnnnnnnnnnnnnnnnnnnnnnnnnnnnnnnnnnnnnnnnnnnnnnnnnnnnnnnnnnnnnnnnnnnnnnnnnnnnnnnnnnnnnnnnnnnnnnnnnnnnnnnnnnnnnnnnnnnnnnnnnnnnnnnnnnnnnnnnnnnnnnnnnnnnnnnnnnnnnnnnnnnnnnnnnnnnnnnnnnnnnnnnnnnnnnnnnnnnnnnnnnnnnnnnnnnnnnnnnnnnnnnnnnnnnnnnnnnnnnnnnnnnnnnnnnnnnnnnnnnnnnnnnnnnnnnnnnnnnnnnnnnnnnnnnnnnnnnnnnnnnnnnnnnnnnnnnnnnnnnnnnnnnnnnnnnnnnnnnnnnnnnnnnnnnnnnnnnnnnnnnnnnnnnnnnnnnnnnnnnnnnnnnnnnnnnnnnnnnnnnnnnnnnnnnnnnnnnnnnnnnnnnnnnnnnnnnnnnnnnnnnnnnnnnnnnnnnnnnnnnnnnnnnnnnnnnnnnnnnnnnnnnnnnnnnnnnnnnnnnnnnnnnnnnnnnnnnnnnnnnnnnnnnnnnnnnnnnnnnnnnnnnnnnnnnnnnnnnnnnnnnnnnnnnnnnnnnnnnnnnnnnnnnnnnnnnnnnnnnnnnnnnnnnnnnnnnnnnnnnnnnnnnnnnnnnnnnnnnnnnnnnnnnnnnnnnnnnnnnnnnnnnnnnnnnnnnnnnnnnnnnnnnnnnnnnnnnnnnnnnnnnnnnnnnnnnnnnnnnnnnnnnnnnnnnnnnnnnnnnnnnnnnnnnnnnnnnnnnnnnnnnnnnnnnnnnnnnnnnnnnnnnnnnnnnnnnnnnnnnnnnnnnnnnnnnnnnnnnnnnnnnnnnnnnnnnnnnnnnnnnnnnnnnnnnnnnnnnnnnnnnnnnnnnnnnnnnnnnnnnnnnnnnnnnnnnnnnnnnnnnnnnnnnnnnnnnnnnnnnnnnnnnnnnnnnnnnnnnnnnnnnnnnnnnnnnnnnnnnnnnnnnnnnnnnnnnnnnnnnnnnnnnnnnnnnnnnnnnnnnnnnnnnnnnnnnnnnnnnnnnnnnnnnnnnnnnnnnnnnnnnnnnnnnnnnnnnnnnnnnnnnnnnnnnnnnnnnnnnnnnnnnnnnnnnnnnnnnnnnnnnnnnnnnnnnnnnnnnnnnnnnnnnnnnnnnnnnnnnnnnnnnnnnnnnnnnnnnnnnnnnnnnnnnnnnnnnnnnnnnnnnnnnnnnnnnnnnnnnnnnnnnnnnnnnnnnnnnnnnnnnnnnnnnnnnnnnnnnnnnnnnnnnnnnnnnnnnnnnnnnnnnnnnnnnnnnnnnnnnnnnnnnnnnnnnnnnnnnnnnnnnnnnnnnnnnnnnnnnnnnnnnnnnnnnnnnnnnnnnnnnnnnnnnnnnnnnnnnnnnnnnnnnnnnnnnnnnnnnnnnnnnnnnnnnnnnnnnnnnnnnnnnnnnnnnnnnnnnnnnnnnnnnnnnnnnnnnnnnnnnnnnnnnnnnnnnnnnnnnnnnnnnnnnnnnnnnnnnnnnnnnnnnnnnnnnnnnnnnnnnnnnnnnnnnnnnnnnnnnnnnnnnnnnnnnnnnnnnnnnnnnnnnnnnnnnnnnnnnnnnnnnnnnnnnnnnnnnnnnnnnnnnnnnnnnnnnnnnnnnnnnnnnnnnnnnnnnnnnnnnnnnnnnnnnnnnnnnnnnnnnnnnnnnnnnnnnnnnnnnnnnnnnnnnnnnnnnnnnnnnnnnnnnnnnnnnnnnnnnnnnnnnnnnnnnnnnnnnnnnnnnnnnnnnnnnnnnnnnnnnnnnnnnnnnnnnnnnnnnnnnnnnnnnnnnnnnnnnnnnnnnnnnnnnnnnnnnnnnnnnnnnnnnnnnnnnnnnnnnnnnnnnnnnnnnnnnnnnnnnnnnnnnnnnnnnnnnnnnnnnnnnnnnnnnnnnnnnnnnnnnnnnnnnnnnnnnnnnnnnnnnnnnnnnnnnnnnnnnnnnnnnnnnnnnnnnnnnnnnnnnnnnnnnnnnnnnnnnnnnnnnnnnnnnnnnnnnnnnnnnnnnnnnnnnnnnnnnnnnnnnnnnnnnnnnnnnnnnnnnnnnnnnnnnnnnnnnnnnnnnnnnnnnnnnnnnnnnnnnnnnnnnnnnnnnnnnnnnnnnnnnnnnnnnnnnnnnnnnnnnnnnnnnnnnnnnnnnnnnnnnnnnnnnnnnnnnnnnnnnnnnnnnnnnnnnnnnnnnnnnnnnnnnnnnnnnnnnnnnnnnnnnnnnnnnnnnnnnnnnnnnnnnnnnnnnnnnnnnnnnnnnnnnnnnnnnnnnnnnnnnnnnnnnnnnnnnnnnnnnnnnnnnnnnnnnnnnnnnnnnnnnnnnnnnnnnnnnnnnnnnnnnnnnnnnnnnnnnnnnnnnnnnnnnnnnnnnnnnnnnnnnnnnnnnnnnnnnnnnnnnnnnnnnnnnnnnnnnnnnnnnnnnnnnnnnnnnnnnnnnnnnnnnnnnnnnnnnnnnnnnnnnnnnnnnnnnnnnnnnnnnnnnnnnnnnnnnnnnnnnnnnnnnnnnnnnnnnnnnnnnnnnnnnnnnnnnnnnnnnnnnnnnnnnnnnnnnnnnnnnnnnnnnnnnnnnnnnnnnnnnnnnnnnnnnnnnnnnnnnnnnnnnnnnnnnnnnnnnnnnnnnnnnnnnnnnnnnnnnnnnnnnnnnnnnnnnnnnnnnnnnnnnnnnnnnnnnnnnnnnnnnnnnnnnnnnnnnnnnnnnnnnnnnnnnnnnnnnnnnnnnnnnnnnnnnnnnnnnnnnnnnnnnnnnnnnnnnnnnnnnnnnnnnnnnnnnnnnnnnnnnnnnnnnnnnnnnnnnnnnnnnnnnnnnnnnnnnnnnnnnnnnnnnnnnnnnnnnnnnnnnnnnnnnnnnnnnnnnnnnnnnnnnnnnnnnnnnnnnnnnnnnnnnnnnnnnnnnnnnnnnnnnnnnnnnnnnnnnnnnnnnnnnnnnnnnnnnnnnnnnnnnnnnnnnnnnnnnnnnnnnnnnnnnnnnnnnnnnnnnnnnnnnnnnnnnnnnnnnnnnnnnnnnnnnnnnnnnnnnnnnnnnnnnnnnnnnnnnnnnnnnnnnnnnnnnnnnnnnnnnnnnnnnnnnnnnnnnnnnnnnnnnnnnnnnnnnnnnnnnnnnnnnnnnnnnnnnnnnnnnnnnnnnnnnnnnnnnnnnnnnnnnnnnnnnnnnnnnnnnnnnnnnnnnnnnnnnnnnnnnnnnnnnnnnnnnnnnnnnnnnnnnnnnnnnnnnnnnnnnnnnnnnnnnnnnnnnnnnnnnnnnnnnnnnnnnnnnnnnnnnnnnnnnnnnnnnnnnnnnnnnnnnnnnnnnnnnnnnnnnnnnnnnnnnnnnnnnnnnnnnnnnnnnnnnnnnnnnnnnnnnnnnnnnnnnnnnnnnnnnnnnnnnnnnnnnnnnnnnnnnnnnnnnnnnnnnnnnnnnnnnnnnnnnnnnnnnnnnnnnnnnnnnnnnnnnnnnnnnnnnnnnnnnnnnnnnnnnnnnnnnnnnnnnnnnnnnnnnnnnnnnnnnnnnnnnnnnnnnnnnnnnnnnnnnnnnnnnnnnnnnnnnnnnnnnnnnnnnnnnnnnnnnnnnnnnnnnnnnnnnnnnnnnnnnnnnnnnnnnnnnnnnnnnnnnnnnnnnnnnnnnnnnnnnnnnnnnnnnnnnnnnnnnnnnnnnnnnnnnnnnnnnnnnnnnnnnnnnnnnnnnnnnnnnnnnnnnnnnnnnnnnnnnnnnnnnnnnnnnnnnnnnnnnnnnnnnnnnnnnnnnnnnnnnnnnnnnnnnnnnnnnnnnnnnnnnnnnnnnnnnnnnnnnnnnnnnnnnnnnnnnnnnnnnnnnnnnnnnnnnnnnnnnnnnnnnnnnnnnnnnnnnnnnnnnnnnnnnnnnnnnnnnnnnnnnnnnnnnnnnnnnnnnnnnnnnnnnnnnnnnnnnnnnnnnnnnnnnnnnnnnnnnnnnnnnnnnnnnnnnnnnnnnnnnnnnnnnnnnnnnnnnnnnnnnnnnnnnnnnnnnnnnnnnnnnnnnnnnnnnnnnnnnnnnnnnnnnnnnnnnnnnnnnnnnnnnnnnnnnnnnnnnnnnnnnnnnnnnnnnnnnnnnnnnnnnnnnnnnnnnnnnnnnnnnnnnnnnnnnnnnnnnnnnnnnnnnnnnnnnnnnnnnnnnnnnnnnnnnnnnnnnnnnnnnnnnnnnnnnnnnnnnnnnnnnnnnnnnnnnnnnnnnnnnnnnnnnnnnnnnnnnnnnnnnnnnnnnnnnnnnnnnnnnnnnnnnnnnnnnnnnnnnnnnnnnnnnnnnnnnnnnnnnnnnnnnnnnnnnnnnnnnnnnnnnnnnnnnnnnnnnnnnnnnnnnnnnnnnnnnnnnnnnnnnnnnnnnnnnnnnnnnnnnnnnnnnnnnnnnnnnnnnnnnnnnnnnnnnnnnnnnnnnnnnnnnnnnnnnnnnnnnnnnnnnnnnnnnnnnnnnnnnnnnnnnnnnnnnnnnnnnnnnnnnnnnnnnnnnnnnnnnnnnnnnnnnnnnnnnnnnnnnnnnnnnnnnnnnnnnnnnnnnnnnnnnnnnnnnnnnnnnnnnnnnnnnnnnnnnnnnnnnnnnnnnnnnnnnnnnnnnnnnnnnnnnnnnnnnnnnnnnnnnnnnnnnnnnnnnnnnnnnnnnnnnnnnnnnnnnnnnnnnnnnnnnnnnnnnnnnnnnnnnnnnnnnnnnnnnnnnnnnnnnnnnnnnnnnnnnnnnnnnnnnnnnnnnnnnnnnnnnnnnnnnnnnnnnnnnnnnnnnnnnnnnnnnnnnnnnnnnnnnnnnnnnnnnnnnnnnnnnnnnnnnnnnnnnnnnnnnnnnnnnnnnnnnnnnnnnnnnnnnnnnnnnnnnnnnnnnnnnnnnnnnnnnnnnnnnnnnnnnnnnnnnnnnnnnnnnnnnnnnnnnnnnnnnnnnnnnnnnnnnnnnnnnnnnnnnnnnnnnnnnnnnnnnnnnnnnnnnnnnnnnnnnnnnnnnnnnnnnnnnnnnnnnnnnnnnnnnnnnnnnnnnnnnnnnnnnnnnnnnnnnnnnnnnnnnnnnnnnnnnnnnnnnnnnnnnnnnnnnnnnnnnnnnnnnnnnnnnnnnnnnnnnnnnnnnnnnnnnnnnnnnnnnnnnnnnnnnnnnnnnnnnnnnnnnnnnnnnnnnnnnnnnnnnnnnnnnnnnnnnnnnnnnnnnnnnnnnnnnnnnnnnnnnnnnnnnnnnnnnnnnnnnnnnnnnnnnnnnnnnnnnnnnnnnnnnnnnnnnnnnnnnnnnnnnnnnnnnnnnnnnnnnnnnnnnnnnnnnnnnnnnnnnnnnnnnnnnnnnnnnnnnnnnnnnnnnnnnnnnnnnnnnnnnnnnnnnnnnnnnnnnnnnnnnnnnnnnnnnnnnnnnnnnnnnnnnnnnnnnnnnnnnnnnnnnnnnnnnnnnnnnnnnnnnnnnnnnnnnnnnnnnnnnnnnnnnnnnnnnnnnnnnnnnnnnnnnnnnnnnnnnnnnnnnnnnnnnnnnnnnnnnnnnnnnnnnnnnnnnnnnnnnnnnnnnnnnnnnnnnnnnnnnnnnnnnnnnnnnnnnnnnnnnnnnnnnnnnnnnnnnnnnnnnnnnnnnnnnnnnnnnnnnnnnnnnnnnnnnnnnnnnnnnnnnnnnnnnnnnnnnnnnnnnnnnnnnnnnnnnnnnnnnnnnnnnnnnnnnnnnnnnnnnnnnnnnnnnnnnnnnnnnnnnnnnnnnnnnnnnnnnnnnnnnnnnnnnnnnnnnnnnnnnnnnnnnnnnnnnnnnnnnnnnnnnnnnnnnnnnnnnnnnnnnnnnnnnnnnnnnnnnnnnnnnnnnnnnnnnnnnnnnnnnnnnnnnnnnnnnnnnnnnnnnnnnnnnnnnnnnnnnnnnnnnnnnnnnnnnnnnnnnnnnnnnnnnnnnnnnnnnnnnnnnnnnnnnnnnnnnnnnnnnnnnnnnnnnnnnnnnnnnnnnnnnnnnnnnnnnnnnnnnnnnnnnnnnnnnnnnnnnnnnnnnnnnnnnnnnnnnnnnnnnnnnnnnnnnnnnnnnnnnnnnnnnnnnnnnnnnnnnnnnnnnnnnnnnnnnnnnnnnnnnnnnnnnnnnnnnnnnnnnnnnnnnnnnnnnnnnnnnnnnnnnnnnnnnnnnnnnnnnnnnnnnnnnnnnnnnnnnnnnnnnnnnnnnnnnnnnnnnnnnnnnnnnnnnnnnnnnnnnnnnnnnnnnnnnnnnnnnnnnnnnnnnnnnnnnnnnnnnnnnnnnnnnnnnnnnnnnnnnnnnnnnnnnnnnnnnnnnnnnnnnnnnnnnnnnnnnnnnnnnnnnnnnnnnnnnnnnnnnnnnnnnnnnnnnnnnnnnnnnnnnnnnnnnnnnnnnnnnnnnnnnnnnnnnnnnnnnnnnnnnnnnnnnnnnnnnnnnnnnnnnnnnnnnnnnnnnnnnnnnnnnnnnnnnnnnnnnnnnnnnnnnnnnnnnnnnnnnnnnnnnnnnnnnnnnnnnnnnnnnnnnnnnnnnnnnnnnnnnnnnnnnnnnnnnnnnnnnnnnnnnnnnnnnnnnnnnnnnnnnnnnnnnnnnnnnnnnnnnnnnnnnnnnnnnnnnnnnnnnnnnnnnnnnnnnnnnnnnnnnnnnnnnnnnnnnnnnnnnnnnnnnnnnnnnnnnnnnnnnnnnnnnnnnnnnnnnnnnnnnnnnnnnnnnnnnnnnnnnnnnnnnnnnnnnnnnnnnnnnnnnnnnnnnnnnnnnnnnnnnnnnnnnnnnnnnnnnnnnnnnnnnnnnnnnnnnnnnnnnnnnnnnnnnnnnnnnnnnnnnnnnnnnnnnnnnnnnnnnnnnnnnnnnnnnnnnnnnnnnnnnnnnnnnnnnnnnnnnnnnnnnnnnnnnnnnnnnnnnnnnnnnnnnnnnnnnnnnnnnnnnnnnnnnnnnnnnnnnnnnnnnnnnnnnnnnnnnnnnnnnnnnnnnnnnnnnnnnnnnnnnnnnnnnnnnnnnnnnnnnnnnnnnnnnnnnnnnnnnnnnnnnnnnnnnnnnnnnnnnnnnnnnnnnnnnnnnnnnnnnnnnnnnnnnnnnnnnnnnnnnnnnnnnnnnnnnnnnnnnnnnnnnnnnnnnnnnnnnnnnnnnnnnnnnnnnnnnnnnnnnnnnnnnnnnnnnnnnnnnnnnnnnnnnnnnnnnnnnnnnnnnnnnnnnnnnnnnnnnnnnnnnnnnnnnnnnnnnnnnnnnnnnnnnnnnnnnnnnnnnnnnnnnnnnnnnnnnnnnnnnnnnnnnnnnnnnnnnnnnnnnnnnnnnnnnnnnnnnnnnnnnnnnnnnnnnnnnnnnnnnnnnnnnnnnnnnnnnnnnnnnnnnnnnnnnnnnnnnnnnnnnnnnnnnnnnnnnnnnnnnnnnnnnnnnnnnnnnnnnnnnnnnnnnnnnnnnnnnnnnnnnnnnnnnnnnnnnnnnnnnnnnnnnnnnnnnnnnnnnnnnnnnnnnnnnnnnnnnnnnnnnnnnnnnnnnnnnnnnnnnnnnnnnnnnnnnnnnnnnnnnnnnnnnnnnnnnnnnnnnnnnnnnnnnnnnnnnnnnnnnnnnnnnnnnnnnnnnnnnnnnnnnnnnnnnnnnnnnnnnnnnnnnnnnnnnnnnnnnnnnnnnnnnnnnnnnnnnnnnnnnnnnnnnnnnnnnnnnnnnnnnnnnnnnnnnnnnnnnnnnnnnnnnnnnnnnnnnnnnnnnnnnnnnnnnnnnnnnnnnnnnnnnnnnnnnnnnnnnnnnnnnnnnnnnnnnnnnnnnnnnnnnnnnnnnnnnnnnnnnnnnnnnnnnnnnnnnnnnnnnnnnnnnnnnnnnnnnnnnnnnnnnnnnnnnnnnnnnnnnnnnnnnnnnnnnnnnnnnnnnnnnnnnnnnnnnnnnnnnnnnnnnnnnnnnnnnnnnnnnnnnnnnnnnnnnnnnnnnnnnnnnnnnnnnnnnnnnnnnnnnnnnnnnnnnnnnnnnnnnnnnnnnnnnnnnnnnnnnnnnnnnnnnnnnnnnnnnnnnnnnnnnnnnnnnnnnnnnnnnnnnnnnnnnnnnnnnnnnnnnnnnnnnnnnnnnnnnnnnnnnnnnnnnnnnnnnnnnnnnnnnnnnnnnnnnnnnnnnnnnnnnnnnnnnnnnnnnnnnnnnnnnnnnnnnnnnnnnnnnnnnnnnnnnnnnnnnnnnnnnnnnnnnnnnnnnnnnnnnnnnnnnnnnnnnnnnnnnnnnnnnnnnnnnnnnnnnnnnnnnnnnnnnnnnnnnnnnnnnnnnnnnnnnnnnnnnnnnnnnnnnnnnnnnnnnnnnnnnnnnnnnnnnnnnnnnnnnnnnnnnnnnnnnnnnnnnnnnnnnnnnnnnnnnnnnnnnnnnnnnnnnnnnnnnnnnnnnnnnnnnnnnnnnnnnnnnnnnnnnnnnnnnnnnnnnnnnnnnnnnnnnnnnnnnnnnnnnnnnnnnnnnnnnnnnnnnnnnnnnnnnnnnnnnnnnnnnnnnnnnnnnnnnnnnnnnnnnnnnnnnnnnnnnnnnnnnnnnnnnnnnnnnnnnnnnnnnnnnnnnnnnnnnnnnnnnnnnnnnnnnnnnnnnnnnnnnnnnnnnnnnnnnnnnnnnnnnnnnnnnnnnnnnnnnnnnnnnnnnnnnnnnnnnnnnnnnnnnnnnnnnnnnnnnnnnnnnnnnnnnnnnnnnnnnnnnnnnnnnnnnnnnnnnnnnnnnnnnnnnnnnnnnnnnnnnnnnnnnnnnnnnnnnnnnnnnnnnnnnnnnnnnnnnnnnnnnnnnnnnnnnnnnnnnnnnnnnnnnnnnnnnnnnnnnnnnnnnnnnnnnnnnnnnnnnnnnnnnnnnnnnnnnnnnnnnnnnnnnnnnnnnnnnnnnnnnnnnnnnnnnnnnnnnnnnnnnnnnnnnnnnnnnnnnnnnnnnnnnnnnnnnnnnnnnnnnnnnnnnnnnnnnnnnnnnnnnnnnnnnnnnnnnnnnnnnnnnnnnnnnnnnnnnnnnnnnnnnnnnnnnnnnnnnnnnnnnnnnnnnnnnnnnnnnnnnnnnnnnnnnnnnnnnnnnnnnnnnnnnnnnnnnnnnnnnnnnnnnnnnnnnnnnnnnnnnnnnnnnnnnnnnnnnnnnnnnnnnnnnnnnnnnnnnnnnnnnnnnnnnnnnnnnnnnnnnnnnnnnnnnnnnnnnnnnnnnnnnnnnnnnnnnnnnnnnnnnnnnnnnnnnnnnnnnnnnnnnnnnnnnnnnnnnnnnnnnnnnnnnnnnnnnnnnnnnnnnnnnnnnnnnnnnnnnnnnnnnnnnnnnnnnnnnnnnnnnnnnnnnnnnnnnnnnnnnnnnnnnnnnnnnnnnnnnnnnnnnnnnnnnnnnnnnnnnnnnnnnnnnnnnnnnnnnnnnnnnnnnnnnnnnnnnnnnnnnnnnnnnnnnnnnnnnnnnnnnnnnnnnnnnnnnnnnnnnnnnnnnnnnnnnnnnnnnnnnnnnnnnnnnnnnnnnnnnnnnnnnnnnnnnnnnnnnnnnnnnnnnnnnnnnnnnnnnnnnnnnnnnnnnnnnnnnnnnnnnnnnnnnnnnnnnnnnnnnnnnnnnnnnnnnnnnnnnnnnnnnnnnnnnnnnnnnnnnnnnnnnnnnnnnnnnnnnnnnnnnnnnnnnnnnnnnnnnnnnnnnnnnnnnnnnnnnnnnnnnnnnnnnnnnnnnnnnnnnnnnnnnnnnnnnnnnnnnnnnnnnnnnnnnnnnnnnnnnnnnnnnnnnnnnnnnnnnnnnnnnnnnnnnnnnnnnnnnnnnnnnnnnnnnnnnnnnnnnnnnnnnnnnnnnnnnnnnnnnnnnnnnnnnnnnnnnnnnnnnnnnnnnnnnnnnnnnnnnnnnnnnnnnnnnnnnnnnnnnnnnnnnnnnnnnnnnnnnnnnnnnnnnnnnnnnnnnnnnnnnnnnnnnnnnnnnnnnnnnnnnnnnnnnnnnnnnnnnnnnnnnnnnnnnnnnnnnnnnnnnnnnnnnnnnnnnnnnnnnnnnnnnnnnnnnnnnnnnnnnnnnnnnnnnnnnnnnnnnnnnnnnnnnnnnnnnnnnnnnnnnnnnnnnnnnnnnnnnnnnnnnnnnnnnnnnnnnnnnnnnnnnnnnnnnnnnnnnnnnnnnnnnnnnnnnnnnnnnnnnnnnnnnnnnnnnnnnnnnnnnnnnnnnnnnnnnnnnnnnnnnnnnnnnnnnnnnnnnnnnnnnnnnnnnnnnnnnnnnnnnnnnnnnnnnnnnnnnnnnnnnnnnnnnnnnnnnnnnnnnnnnnnnnnnnnnnnnnnnnnnnnnnnnnnnnnnnnnnnnnnnnnnnnnnnnnnnnnnnnnnnnnnnnnnnnnnnnnnnnnnnnnnnnnnnnnnnnnnnnnnnnnnnnnnnnnnnnnnnnnnnnnnnnnnnnnnnnnnnnnnnnnnnnnnnnnnnnnnnnnnnnnnnnnnnnnnnnnnnnnnnnnnnnnnnnnnnnnnnnnnnnnnnnnnnnnnnnnnnnnnnnnnnnnnnnnnnnnnnnnnnnnnnnnnnnnnnnnnnnnnnnnnnnnnnnnnnnnnnnnnnnnnnnnnnnnnnnnnnnnnnnnnnnnnnnnnnnnnnnnnnnnnnnnnnnnnnnnnnnnnnnnnnnnnnnnnnnnnnnnnnnnnnnnnnnnnnnnnnnnnnnnnnnnnnnnnnnnnnnnnnnnnnnnnnnnnnnnnnnnnnnnnnnnnnnnnnnnnnnnnnnnnnnnnnnnnnnnnnnnnnnnnnnnnnnnnnnnnnnnnnnnnnnnnnnnnnnnnnnnnnnnnnnnnnnnnnnnnnnnnnnnnnnnnnnnnnnnnnnnnnnnnnnnnnnnnnnnnnnnnnnnnnnnnnnnnnnnnnnnnnnnnnnnnnnnnnnnnnnnnnnnnnnnnnnnnnnnnnnnnnnnnnnnnnnnnnnnnnnnnnnnnnnnnnnnnnnnnnnnnnnnnnnnnnnnnnnnnnnnnnnnnnnnnnnnnnnnnnnnnnnnnnnnnnnnnnnnnnnnnnnnnnnnnnnnnnnnnnnnnnnnnnnnnnnnnnnnnnnnnnnnnnnnnnnnnnnnnnnnnnnnnnnnnnnnnnnnnnnnnnnnnnnnnnnnnnnnnnnnnnnnnnnnnnnnnnnnnnnnnnnnnnnnnnnnnnnnnnnnnnnnnnnnnnnnnnnnnnnnnnnnnnnnnnnnnnnnnnnnnnnnnnnnnnnnnnnnnnnnnnnnnnnnnnnnnnnnnnnnnnnnnnnnnnnnnnnnnnnnnnnnnnnnnnnnnnnnnnnnnnnnnnnnnnnnnnnnnnnnnnnnnnnnnnnnnnnnnnnnnnnnnnnnnnnnnnnnnnnnnnnnnnnnnnnnnnnnnnnnnnnnnnnnnnnnnnnnnnnnnnnnnnnnnnnnnnnnnnnnnnnnnnnnnnnnnnnnnnnnnnnnnnnnnnnnnnnnnnnnnnnnnnnnnnnnnnnnnnnnnnnnnnnnnnnnnnnnnnnnnnnnnnnnnnnnnnnnnnnnnnnnnnnnnnnnnnnnnnnnnnnnnnnnnnnnnnnnnnnnnnnnnnnnnnnnnnnnnnnnnnnnnnnnnnnnnnnnnnnnnnnnnnnnnnnnnnnnnnnnnnnnnnnnnnnnnnnnnnnnnnnnnnnnnnnnnnnnnnnnnnnnnnnnnnnnnnnnnnnnnnnnnnnnnnnnnnnnnnnnnnnnnnnnnnnnnnnnnnnnnnnnnnnnnnnnnnnnnnnnnnnnnnnnnnnnnnnnnnnnnnnnnnnnnnnnnnnnnnnnnnnnnnnnnnnnnnnnnnnnnnnnnnnnnnnnnnnnnnnnnnnnnnnnnnnnnnnnnnnnnnnnnnnnnnnnnnnnnnnnnnnnnnnnnnnnnnnnnnnnnnnnnnnnnnnnnnnnnnnnnnnnnnnnnnnnnnnnnnnnnnnnnnnnnnnnnnnnnnnnnnnnnnnnnnnnnnnnnnnnnnnnnnnnnnnnnnnnnnnnnnnnnnnnnnnnnnnnnnnnnnnnnnnnnnnnnnnnnnnnnnnnnnnnnnnnnnnnnnnnnnnnnnnnnnnnnnnnnnnnnnnnnnnnnnnnnnnnnnnnnnnnnnnnnnnnnnnnnnnnnnnnnnnnnnnnnnnnnnnnnnnnnnnnnnnnnnnnnnnnnnnnnnnnnnnnnnnnnnnnnnnnnnnnnnnnnnnnnnnnnnnnnnnnnnnnnnnnnnnnnnnnnnnnnnnnnnnnnnnnnnnnnnnnnnnnnnnnnnnnnnnnnnnnnnnnnnnnnnnnnnnnnnnnnnnnnnnnnnnnnnnnnnnnnnnnnnnnnnnnnnnnnnnnnnnnnnnnnnnnnnnnnnnnnnnnnnnnnnnnnnnnnnnnnnnnnnnnnnnnnnnnnnnnnnnnnnnnnnnnnnnnnnnnnnnnnnnnnnnnnnnnnnnnnnnnnnnnnnnnnnnnnnnnnnnnnnnnnnnnnnnnnnnnnnnnnnnnnnnnnnnnnnnnnnnnnnnnnnnnnnnnnnnnnnnnnnnnnnnnnnnnnnnnnnnnnnnnnnnnnnnnnnnnnnnnnnnnnnnnnnnnnnnnnnnnnnnnnnnnnnnnnnnnnnnnnnnnnnnnnnnnnnnnnnnnnnnnnnnnnnnnnnnnnnnnnnnnnnnnnnnnnnnnnnnnnnnnnnnnnnnnnnnnnnnnnnnnnnnnnnnnnnnnnnnnnnnnnnnnnnnnnnnnnnnnnnnnnnnnnnnnnnnnnnnnnnnnnnnnnnnnnnnnnnnnnnnnnnnnnnnnnnnnnnnnnnnnnnnnnnnnnnnnnnnnnnnnnnnnnnnnnnnnnnnnnnnnnnnnnnnnnnnnnnnnnnnnnnnnnnnnnnnnnnnnnnnnnnnnnnnnnnnnnnnnnnnnnnnnnnnnnnnnnnnnnnnnnnnnnnnnnnnnnnnnnnnnnnnnnnnnnnnnnnnnnnnnnnnnnnnnnnnnnnnnnnnnnnnnnnnnnnnnnnnnnnnnnnnnnnnnnnnnnnnnnnnnnnnnnnnnnnnnnnnnnnnnnnnnnnnnnnnnnnnnnnnnnnnnnnnnnnnnnnnnnnnnnnnnnnnnnnnnnnnnnnnnnnnnnnnnnnnnnnnnnnnnnnnnnnnnnnnnnnnnnnnnnnnnnnnnnnnnnnnnnnnnnnnnnnnnnnnnnnnnnnnnnnnnnnnnnnnnnnnnnnnnnnnnnnnnnnnnnnnnnnnnnnnnnnnnnnnnnnnnnnnnnnnnnnnnnnnnnnnnnnnnnnnnnnnnnnnnnnnnnnnnnnnnnnnnnnnnnnnnnnnnnnnnnnnnnnnnnnnnnnnnnnnnnnnnnnnnnnnnnnnnnnnnnnnnnnnnnnnnnnnnnnnnnnnnnnnnnnnnnnnnnnnnnnnnnnnnnnnnnnnnnnnnnnnnnnnnnnnnnnnnnnnnnnnnnnnnnnnnnnnnnnnnnnnnnnnnnnnnnnnnnnnnnnnnnnnnnnnnnnnnnnnnnnnnnnnnnnnnnnnnnnnnnnnnnnnnnnnnnnnnnnnnnnnnnnnnnnnnnnnnnnnnnnnnnnnnnnnnnnnnnnnnnnnnnnnnnnnnnnnnnnnnnnnnnnnnnnnnnnnnnnnnnnnnnnnnnnnnnnnnnnnnnnnnnnnnnnnnnnnnnnnnnnnnnnnnnnnnnnnnnnnnnnnnnnnnnnnnnnnnnnnnnnnnnnnnnnnnnnnnnnnnnnnnnnnnnnnnnnnnnnnnnnnnnnnnnnnnnnnnnnnnnnnnnnnnnnnnnnnnnnnnnnnnnnnnnnnnnnnnnnnnnnnnnnnnnnnnnnnnnnnnnnnnnnnnnnnnnnnnnnnnnnnnnnnnnnnnnnnnnnnnnnnnnnnnnnnnnnnnnnnnnnnnnnnnnnnnnnnnnnnnnnnnnnnnnnnnnnnnnnnnnnnnnnnnnnnnnnnnnnnnnnnnnnnnnnnnnnnnnnnnnnnnnnnnnnnnnnnnnnnnnnnnnnnnnnnnnnnnnnnnnnnnnnnnnnnnnnnnnnnnnnnnnnnnnnnnnnnnnnnnnnnnnnnnnnnnnnnnnnnnnnnnnnnnnnnnnnnnnnnnnnnnnnnnnnnnnnnnnnnnnnnnnnnnnnnnnnnnnnnnnnnnnnnnnnnnnnnnnnnnnnnnnnnnnnnnnnnnnnnnnnnnnnnnnnnnnnnnnnnnnnnnnnnnnnnnnnnnnnnnnnnnnnnnnnnnnnnnnnnnnnnnnnnnnnnnnnnnnnnnnnnnnnnnnnnnnnnnnnnnnnnnnnnnnnnnnnnnnnnnnnnnnnnnnnnnnnnnnnnnnnnnnnnnnnnnnnnnnnnnnnnnnnnnnnnnnnnnnnnnnnnnnnnnnnnnnnnnnnnnnnnnnnnnnnnnnnnnnnnnnnnnnnnnnnnnnnnnnnnnnnnnnnnnnnnnnnnnnnnnnnnnnnnnnnnnnnnnnnnnnnnnnnnnnnnnnnnnnnnnnnnnnnnnnnnnnnnnnnnnnnnnnnnnnnnnnnnnnnnnnnnnnnnnnnnnnnnnnnnnnnnnnnnnnnnnnnnnnnnnnnnnnnnnnnnnnnnnnnnnnnnnnnnnnnnnnnnnnnnnnnnnnnnnnnnnnnnnnnnnnnnnnnnnnnnnnnnnnnnnnnnnnnnnnnnnnnnnnnnnnnnnnnnnnnnnnnnnnnnnnnnnnnnnnnnnnnnnnnnnnnnnnnnnnnnnnnnnnnnnnnnnnnnnnnnnnnnnnnnnnnnnnnnnnnnnnnnnnnnnnnnnnnnnnnnnnnnnnnnnnnnnnnnnnnnnnnnnnnnnnnnnnnnnnnnnnnnnnnnnnnnnnnnnnnnnnnnnnnnnnnnnnnnnnnnnnnnnnnnnnnnnnnnnnnnnnnnnnnnnnnnnnnnnnnnnnnnnnnnnnnnnnnnnnnnnnnnnnnnnnnnnnnnnnnnnnnnnnnnnnnnnnnnnnnnnnnnnnnnnnnnnnnnnnnnnnnnnnnnnnnnnnnnnnnnnnnnnnnnnnnnnnnnnnnnnnnnnnnnnnnnnnnnnnnnnnnnnnnnnnnnnnnnnnnnnnnnnnnnnnnnnnnnnnnnnnnnnnnnnnnnnnnnnnnnnnnnnnnnnnnnnnnnnnnnnnnnnnnnnnnnnnnnnnnnnnnnnnnnnnnnnnnnnnnnnnnnnnnnnnnnnnnnnnnnnnnnnnnnnnnnnnnnnnnnnnnnnnnnnnnnnnnnnnnnnnnnnnnnnnnnnnnnnnnnnnnnnnnnnnnnnnnnnnnnnnnnnnnnnnnnnnnnnnnnnnnnnnnnnnnnnnnnnnnnnnnnnnnnnnnnnnnnnnnnnnnnnnnnnnnnnnnnnnnnnnnnnnnnnnnnnnnnnnnnnnnnnnnnnnnnnnnnnnnnnnnnnnnnnnnnnnnnnnnnnnnnnnnnnnnnnnnnnnnnnnnnnnnnnnnnnnnnnnnnnnnnnnnnnnnnnnnnnnnnnnnnnnnnnnnnnnnnnnnnnnnnnnnnnnnnnnnnnnnnnnnnnnnnnnnnnnnnnnnnnnnnnnnnnnnnnnnnnnnnnnnnnnnnnnnnnnnnnnnnnnnnnnnnnnnnnnnnnnnnnnnnnnnnnnnnnnnnnnnnnnnnnnnnnnnnnnnnnnnnnnnnnnnnnnnnnnnnnnnnnnnnnnnnnnnnnnnnnnnnnnnnnnnnnnnnnnnnnnnnnnnnnnnnnnnnnnnnnnnnnnnnnnnnnnnnnnnnnnnnnnnnnnnnnnnnnnnnnnnnnnnnnnnnnnnnnnnnnnnnnnnnnnnnnnnnnnnnnnnnnnnnnnnnnnnnnnnnnnnnnnnnnnnnnnnnnnnnnnnnnnnnnnnnnnnnnnnnnnnnnnnnnnnnnnnnnnnnnnnnnnnnnnnnnnnnnnnnnnnnnnnnnnnnnnnnnnnnnnnnnnnnnnnnnnnnnnnnnnnnnnnnnnnnnnnnnnnnnnnnnnnnnnnnnnnnnnnnnnnnnnnnnnnnnnnnnnnnnnnnnnnnnnnnnnnnnnnnnnnnnnnnnnnnnnnnnnnnnnnnnnnnnnnnnnnnnnnnnnnnnnnnnnnnnnnnnnnnnnnnnnnnnnnnnnnnnnnnnnnnnnnnnnnnnnnnnnnnnnnnnnnnnnnnnnnnnnnnnnnnnnnnnnnnnnnnnnnnnnnnnnnnnnnnnnnnnnnnnnnnnnnnnnnnnnnnnnnnnnnnnnnnnnnnnnnnnnnnnnnnnnnnnnnnnnnnnnnnnnnnnnnnnnnnnnnnnnnnnnnnnnnnnnnnnnnnnnnnnnnnnnnnnnnnnnnnnnnnnnnnnnnnnnnnnnnnnnnnnnnnnnnnnnnnnnnnnnnnnnnnnnnnnnnnnnnnnnnnnnnnnnnnnnnnnnnnnnnnnnnnnnnnnnnnnnnnnnnnnnnnnnnnnnnnnnnnnnnnnnnnnnnnnnnnnnnnnnnnnnnnnnnnnnnnnnnnnnnnnnnnnnnnnnnnnnnnnnnnnnnnnnnnnnnnnnnnnnnnnnnnnnnnnnnnnnnnnnnnnnnnnnnnnnnnnnnnnnnnnnnnnnnnnnnnnnnnnnnnnnnnnnnnnnnnnnnnnnnnnnnnnnnnnnnnnnnnnnnnnnnnnnnnnnnnnnnnnnnnnnnnnnnnnnnnnnnnnnnnnnnnnnnnnnnnnnnnnnnnnnnnnnnnnnnnnnnnnnnnnnnnnnnnnnnnnnnnnnnnnnnnnnnnnnnnnnnnnnnnnnnnnnnnnnnnnnnnnnnnnnnnnnnnnnnnnnnnnnnnnnnnnnnnnnnnnnnnnnnnnnnnnnnnnnnnnnnnnnnnnnnnnnnnnnnnnnnnnnnnnnnnnnnnnnnnnnnnnnnnnnnnnnnnnnnnnnnnnnnnnnnnnnnnnnnnnnnnnnnnnnnnnnnnnnnnnnnnnnnnnnnnnnnnnnnnnnnnnnnnnnnnnnnnnnnnnnnnnnnnnnnnnnnnnnnnnnnnnnnnnnnnnnnnnnnnnnnnnnnnnnnnnnnnnnnnnnnnnnnnnnnnnnnnnnnnnnnnnnnnnnnnnnnnnnnnnnnnnnnnnnnnnnnnnnnnnnnnnnnnnnnnnnnnnnnnnnnnnnnnnnnnnnnnnnnnnnnnnnnnnnnnnnnnnnnnnnnnnnnnnnnnnnnnnnnnnnnnnnnnnnnnnnnnnnnnnnnnnnnnnnnnnnnnnnnnnnnnnnnnnnnnnnnnnnnnnnnnnnnnnnnnnnnnnnnnnnnnnnnnnnnnnnnnnnnnnnnnnnnnnnnnnnnnnnnnnnnnnnnnnnnnnnnnnnnnnnnnnnnnnnnnnnnnnnnnnnnnnnnnnnnnnnnnnnnnnnnnnnnnnnnnnnnnnnnnnnnnnnnnnnnnnnnnnnnnnnnnnnnnnnnnnnnnnnnnnnnnnnnnnnnnnnnnnnnnnnnnnnnnnnnnnnnnnnnnnnnnnnnnnnnnnnnnnnnnnnnnnnnnnnnnnnnnnnnnnnnnnnnnnnnnnnnnnnnnnnnnnnnnnnnnnnnnnnnnnnnnnnnnnnnnnnnnnnnnnnnnnnnnnnnnnnnnnnnnnnnnnnnnnnnnnnnnnnnnnnnnnnnnnnnnnnnnnnnnnnnnnnnnnnnnnnnnnnnnnnnnnnnnnnnnnnnnnnnnnnnnnnnnnnnnnnnnnnnnnnnnnnnnnnnnnnnnnnnnnnnnnnnnnnnnnnnnnnnnnnnnnnnnnnnnnnnnnnnnnnnnnnnnnnnnnnnnnnnnnnnnnnnnnnnnnnnnnnnnnnnnnnnnnnnnnnnnnnnnnnnnnnnnnnnnnnnnnnnnnnnnnnnnnnnnnnnnnnnnnnnnnnnnnnnnnnnnnnnnnnnnnnnnnnnnnnnnnnnnnnnnnnnnnnnnnnnnnnnnnnnnnnnnnnnnnnnnnnnnnnnnnnnnnnnnnnnnnnnnnnnnnnnnnnnnnnnnnnnnnnnnnnnnnnnnnnnnnnnnnnnnnnnnnnnnnnnnnnnnnnnnnnnnnnnnnnnnnnnnnnnnnnnnnnnnnnnnnnnnnnnnnnnnnnnnnnnnnnnnnnnnnnnnnnnnnnnnnnnnnnnnnnnnnnnnnnnnnnnnnnnnnnnnnnnnnnnnnnnnnnnnnnnnnnnnnnnnnnnnnnnnnnnnnnnnnnnnnnnnnnnnnnnnnnnnnnnnnnnnnnnnnnnnnnnnnnnnnnnnnnnnnnnnnnnnnnnnnnnnnnnnnnnnnnnnnnnnnnnnnnnnnnnnnnnnnnnnnnnnnnnnnnnnnnnnnnnnnnnnnnnnnnnnnnnnnnnnnnnnnnnnnnnnnnnnnnnnnnnnnnnnnnnnnnnnnnnnnnnnnnnnnnnnnnnnnnnnnnnnnnnnnnnnnnnnnnnnnnnnnnnnnnnnnnnnnnnnnnnnnnnnnnnnnnnnnnnnnnnnnnnnnnnnnnnnnnnnnnnnnnnnnnnnnnnnnnnnnnnnnnnnnnnnnnnnnnnnnnnnnnnnnnnnnnnnnnnnnnnnnnnnnnnnnnnnnnnnnnnnnnnnnnnnnnnnnnnnnnnnnnnnnnnnnnnnnnnnnnnnnnnnnnnnnnnnnnnnnnnnnnnnnnnnnnnnnnnnnnnnnnnnnnnnnnnnnnnnnnnnnnnnnnnnnnnnnnnnnnnnnnnnnnnnnnnnnnnnnnnnnnnnnnnnnnnnnnnnnnnnnnnnnnnnnnnnnnnnnnnnnnnnnnnnnnnnnnnnnnnnnnnnnnnnnnnnnnnnnnnnnnnnnnnnnnnnnnnnnnnnnnnnnnnnnnnnnnnnnnnnnnnnnnnnnnnnnnnnnnnnnnnnnnnnnnnnnnnnnnnnnnnnnnnnnnnnnnnnnnnnnnnnnnnnnnnnnnnnnnnnnnnnnnnnnnnnnnnnnnnnnnnnnnnnnnnnnnnnnnnnnnnnnnnnnnnnnnnnnnnnnnnnnnnnnnnnnnnnnnnnnnnnnnnnnnnnnnnnnnnnnnnnnnnnnnnnnnnnnnnnnnnnnnnnnnnnnnnnnnnnnnnnnnnnnnnnnnnnnnnnnnnnnnnnnnnnnnnnnnnnnnnnnnnnnnnnnnnnnnnnnnnnnnnnnnnnnnnnnnnnnnnnnnnnnnnnnnnnnnnnnnnnnnnnnnnnnnnnnnnnnnnnnnnnnnnnnnnnnnnnnnnnnnnnnnnnnnnnnnnnnnnnnnnnnnnnnnnnnnnnnnnnnnnnnnnnnnnnnnnnnnnnnnnnnnnnnnnnnnnnnnnnnnnnnnnnnnnnnnnnnnnnnnnnnnnnnnnnnnnnnnnnnnnnnnnnnnnnnnnnnnnnnnnnnnnnnnnnnnnnnnnnnnnnnnnnnnnnnnnnnnnnnnnnnnnnnnnnnnnnnnnnnnnnnnnnnnnnnnnnnnnnnnnnnnnnnnnnnnnnnnnnnnnnnnnnnnnnnnnnnnnnnnnnnnnnnnnnnnnnnnnnnnnnnnnnnnnnnnnnnnnnnnnnnnnnnnnnnnnnnnnnnnnnnnnnnnnnnnnnnnnnnnnnnnnnnnnnnnnnnnnnnnnnnnnnnnnnnnnnnnnnnnnnnnnnnnnnnnnnnnnnnnnnnnnnnnnnnnnnnnnnnnnnnnnnnnnnnnnnnnnnnnnnnnnnnnnnnnnnnnnnnnnnnnnnnnnnnnnnnnnnnnnnnnnnnnnnnnnnnnnnnnnnnnnnnnnnnnnnnnnnnnnnnnnnnnnnnnnnnnnnnnnnnnnnnnnnnnnnnnnnnnnnnnnnnnnnnnnnnnnnnnnnnnnnnnnnnnnnnnnnnnnnnnnnnnnnnnnnnnnnnnnnnnnnnnnnnnnnnnnnnnnnnnnnnnnnnnnnnnnnnnnnnnnnnnnnnnnnnnnnnnnnnnnnnnnnnnnnnnnnnnnnnnnnnnnnnnnnnnnnnnnnnnnnnnnnnnnnnnnnnnnnnnnnnnnnnnnnnnnnnnnnnnnnnnnnnnnnnnnnnnnnnnnnnnnnnnnnnnnnnnnnnnnnnnnnnnnnnnnnnnnnnnnnnnnnnnnnnnnnnnnnnnnnnnnnnnnnnnnnnnnnnnnnnnnnnnnnnnnnnnnnnnnnnnnnnnnnnnnnnnnnnnnnnnnnnnnnnnnnnnnnnnnnnnnnnnnnnnnnnnnnnnnnnnnnnnnnnnnnnnnnnnnnnnnnnnnnnnnnnnnnnnnnnnnnnnnnnnnnnnnnnnnnnnnnnnnnnnnnnnnnnnnnnnnnnnnnnnnnnnnnnnnnnnnnnnnnnnnnnnnnnnnnnnnnnnnnnnnnnnnnnnnnnnnnnnnnnnnnnnnnnnnnnnnnnnnnnnnnnnnnnnnnnnnnnnnnnnnnnnnnnnnnnnnnnnnnnnnnnnnnnnnnnnnnnnnnnnnnnnnnnnnnnnnnnnnnnnnnnnnnnnnnnnnnnnnnnnnnnnnnnnnnnnnnnnnnnnnnnnnnnnnnnnnnnnnnnnnnnnnnnnnnnnnnnnnnnnnnnnnnnnnnnnnnnnnnnnnnnnnnnnnnnnnnnnnnnnnnnnnnnnnnnnnnnnnnnnnnnnnnnnnnnnnnnnnnnnnnnnnnnnnnnnnnnnnnnnnnnnnnnnnnnnnnnnnnnnnnnnnnnnnnnnnnnnnnnnnnnnnnnnnnnnnnnnnnnnnnnnnnnnnnnnnnnnnnnnnnnnnnnnnnnnnnnnnnnnnnnnnnnnnnnnnnnnnnnnnnnnnnnnnnnnnnnnnnnnnnnnnnnnnnnnnnnnnnnnnnnnnnnnnnnnnnnnnnnnnnnnnnnnnnnnnnnnnnnnnnnnnnnnnnnnnnnnnnnnnnnnnnnnnnnnnnnnnnnnnnnnnnnnnnnnnnnnnnnnnnnnnnnnnnnnnnnnnnnnnnnnnnnnnnnnnnnnnnnnnnnnnnnnnnnnnnnnnnnnnnnnnnnnnnnnnnnnnnnnnnnnnnnnnnnnnnnnnnnnnnnnnnnnnnnnnnnnnnnnnnnnnnnnnnnnnnnnnnnnnnnnnnnnnnnnnnnnnnnnnnnnnnnnnnnnnnnnnnnnnnnnnnnnnnnnnnnnnnnnnnnnnnnnnnnnnnnnnnnnnnnnnnnnnnnnnnnnnnnnnnnnnnnnnnnnnnnnnnnnnnnnnnnnnnnnnnnnnnnnnnnnnnnnnnnnnnnnnnnnnnnnnnnnnnnnnnnnnnnnnnnnnnnnnnnnnnnnnnnnnnnnnnnnnnnnnnnnnnnnnnnnnnnnnnnnnnnnnnnnnnnnnnnnnnnnnnnnnnnnnnnnnnnnnnnnnnnnnnnnnnnnnnnnnnnnnnnnnnnnnnnnnnnnnnnnnnnnnnnnnnnnnnnnnnnnnnnnnnnnnnnnnnnnnnnnnnnnnnnnnnnnnnnnnnnnnnnnnnnnnnnnnnnnnnnnnnnnnnnnnnnnnnnnnnnnnnnnnnnnnnnnnnnnnnnnnnnnnnnnnnnnnnnnnnnnnnnnnnnnnnnnnnnnnnnnnnnnnnnnnnnnnnnnnnnnnnnnnnnnnnnnnnnnnnnnnnnnnnnnnnnnnnnnnnnnnnnnnnnnnnnnnnnnnnnnnnnnnnnnnnnnnnnnnnnnnnnnnnnnnnnnnnnnnnnnnnnnnnnnnnnnnnnnnnnnnnnnnnnnnnnnnnnnnnnnnnnnnnnnnnnnnnnnnnnnnnnnnnnnnnnnnnnnnnnnnnnnnnnnnnnnnnnnnnnnnnnnnnnnnnnnnnnnnnnnnnnnnnnnnnnnnnnnnnnnnnnnnnnnnnnnnnnnnnnnnnnnnnnnnnnnnnnnnnnnnnnnnnnnnnnnnnnnnnnnnnnnnnnnnnnnnnnnnnnnnnnnnnnnnnnnnnnnnnnnnnnnnnnnnnnnnnnnnnnnnnnnnnnnnnnnnnnnnnnnnnnnnnnnnnnnnnnnnnnnnnnnnnnnnnnnnnnnnnnnnnnnnnnnnnnnnnnnnnnnnnnnnnnnnnnnnnnnnnnnnnnnnnnnnnnnnnnnnnnnnnnnnnnnnnnnnnnnnnnnnnnnnnnnnnnnnnnnnnnnnnnnnnnnnnnnnnnnnnnnnnnnnnnnnnnnnnnnnnnnnnnnnnnnnnnnnnnnnnnnnnnnnnnnnnnnnnnnnnnnnnnnnnnnnnnnnnnnnnnnnnnnnnnnnnnnnnnnnnnnnnnnnnnnnnnnnnnnnnnnnnnnnnnnnnnnnnnnnnnnnnnnnnnnnnnnnnnnnnnnnnnnnnnnnnnnnnnnnnnnnnnnnnnnnnnnnnnnnnnnnnnnnnnnnnnnnnnnnnnnnnnnnnnnnnnnnnnnnnnnnnnnnnnnnnnnnnnnnnnnnnnnnnnnnnnnnnnnnnnnnnnnnnnnnnnnnnnnnnnnnnnnnnnnnnnnnnnnnnnnnnnnnnnnnnnnnnnnnnnnnnnnnnnnnnnnnnnnnnnnnnnnnnnnnnnnnnnnnnnnnnnnnnnnnnnnnnnnnnnnnnnnnnnnnnnnnnnnnnnnnnnnnnnnnnnnnnnnnnnnnnnnnnnnnnnnnnnnnnnnnnnnnnnnnnnnnnnnnnnnnnnnnnnnnnnnnnnnnnnnnnnnnnnnnnnnnnnnnnnnnnnnnnnnnnnnnnnnnnnnnnnnnnnnnnnnnnnnnnnnnnnnnnnnnnnnnnnnnnnnnnnnnnnnnnnnnnnnnnnnnnnnnnnnnnnnnnnnnnnnnnnnnnnnnnnnnnnnnnnnnnnnnnnnnnnnnnnnnnnnnnnnnnnnnnnnnnnnnnnnnnnnnnnnnnnnnnnnnnnnnnnnnnnnnnnnnnnnnnnnnnnnnnnnnnnnnnnnnnnnnnnnnnnnnnnnnnnnnnnnnnnnnnnnnnnnnnnnnnnnnnnnnnnnnnnnnnnnnnnnnnnnnnnnnnnnnnnnnnnnnnnnnnnnnnnnnnnnnnnnnnnnnnnnnnnnnnnnnnnnnnnnnnnnnnnnnnnnnnnnnnnnnnnnnnnnnnnnnnnnnnnnnnnnnnnnnnnnnnnnnnnnnnnnnnnnnnnnnnnnnnnnnnnnnnnnnnnnnnnnnnnnnnnnnnnnnnnnnnnnnnnnnnnnnnnnnnnnnnnnnnnnnnnnnnnnnnnnnnnnnnnnnnnnnnnnnnnnnnnnnnnnnnnnnnnnnnnnnnnnnnnnnnnnnnnnnnnnnnnnnnnnnnnnnnnnnnnnnnnnnnnnnnnnnnnnnnnnnnnnnnnnnnnnnnnnnnnnnnnnnnnnnnnnnnnnnnnnnnnnnnnnnnnnnnnnnnnnnnnnnnnnnnnnnnnnnnnnnnnnnnnnnnnnnnnnnnnnnnnnnnnnnnnnnnnnnnnnnnnnnnnnnnnnnnnnnnnnnnnnnnnnnnnnnnnnnnnnnnnnnnnnnnnnnnnnnnnnnnnnnnnnnnnnnnnnnnnnnnnnnnnnnnnnnnnnnnnnnnnnnnnnnnnnnnnnnnnnnnnnnnnnnnnnnnnnnnnnnnnnnnnnnnnnnnnnnnnnnnnnnnnnnnnnnnnnnnnnnnnnnnnnnnnnnnnnnnnnnnnnnnnnnnnnnnnnnnnnnnnnnnnnnnnnnnnnnnnnnnnnnnnnnnnnnnnnnnnnnnnnnnnnnnnnnnnnnnnnnnnnnnnnnnnnnnnnnnnnnnnnnnnnnnnnnnnnnnnnnnnnnnnnnnnnnnnnnnnnnnnnnnnnnnnnnnnnnnnnnnnnnnnnnnnnnnnnnnnnnnnnnnnnnnnnnnnnnnnnnnnnnnnnnnnnnnnnnnnnnnnnnnnnnnnnnnnnnnnnnnnnnnnnnnnnnnnnnnnnnnnnnnnnnnnnnnnnnnnnnnnnnnnnnnnnnnnnnnnnnnnnnnnnnnnnnnnnnnnnnnnnnnnnnnnnnnnnnnnnnnnnnnnnnnnnnnnnnnnnnnnnnnnnnnnnnnnnnnnnnnnnnnnnnnnnnnnnnnnnnnnnnnnnnnnnnnnnnnnnnnnnnnnnnnnnnnnnnnnnnnnnnnnnnnnnnnnnnnnngggaggcctatcaaactatggtggggcaggctgccagcctgtcatgcacaggcaagatgcctgtgctaccaattgataaggagagggcaaagacgatggggacctatctgggcgtgctggtggacaaaatttctacacggtcaaatagccagtgcccttgggacagcaagaaaattctgactgtgcagtgttttgggcgccaagcgctgcccattatttgggatttctcggagtctaacccttttgctgatgcgtcaggagctttcaccgaggcgattgaaggggtggttagagccgtcgccggttctgaagcgattccatttgcagcggttgttgctcgcggctcggcaacgttgcttccgttgcccgatgcctcgttcgacgccgtcataaccgatcccccctattacgacaacatccaatatgcggcactttccgacttcttctacgtttggctcaaacgcaccatagggcatctctaccctgagcacttcgccaccgaagtttcgccaaagaagaacgaggccgtcgtctcgccgtggcggcataagtgtaaatcggagtctcggcaagcctacgaagagatgatggcgcaatcatttcgcgaggcacatcgggtattgaagcccggcggccagatgatcgtggtctatgcccacaagacgacgctcggctggtccacattggtggatgcactcagacaatctgggtttgaggtaattgaagcatggccgttggataccgaaggttatcgactgattgctctcaacactgccgccctcgcctccagcatcttcctcgtcgcacggaaacgggaaggtacgttggccggctcctacgaagaggaagtccggtctgaactcgaaagtatcgtccgcgagcgggtcgattcgctctggaagatggggatcaccggcgcggacttggtcatcgccgccgtgggcgcgggtcttcgcgccttcactaaattctcccgtgtggaatacgccaacggcgaggaggtcccggccgagaagttcttggccgaggtggaaggggtcgtgctggagacgcttctggaaaagattttcggtgtgcccgtaagcggcgttgccgcggtggacggacccagccggttctacgtgctttggcgctacacctatggcgcggccgagatggacgcgggcgaggccatcgtcttcacctacggccagaatgtcgagctcgatggaccaaacggcctctccagcggaagccgcgccctgatggagaagaagaaaggcaagtaccggctgcgcgatttcgccgaacgcggcgacgacgaaaagctggggatgccaaaggatgatggtaaggccgcaccgctgatcgacatcctgcaccgcatcctttggctggtggaaaacgagccccgcaagctcaatgacttcctcgacaaagcgcgggcggaccgggagcggttgcgcttggtggctcaagccttggccgggactgagttagagggttggagtgtgcgagtgttggagagtgaaagaacgagtggatacacgaccataagagagcaggcagcacttaaaaagctaacggcaaactggaaagcgcttatcgagagtcctctttccagaatgccgctgtttgatacggataggtcaaaatgacaataaaggatttcagagaattacgggtttaccagatgtcttttcaatcagccatgaggatctttgatctctcaaagaattggccggttggagaaagatacagccttacagatcaaatcagacgatcatcccgctccgtatgcgcaaatgttgctgaagcctggcgtaagagacgatacgaggcgtcgttcatcagcaaactcagcgatgctgacacggaggcgggagaaactttggtctgcttggaattcgccctgaaatgtggatatctggatcaagccgatttcaaaaaactgatcaaccaatacgaccgcatttgcggccaactggtcaccatgaccaatcaatccgagaggtggtgtaaaaatgaacgataaaaactattcacactcataccctcccaccctatcacactcccactctcttcgcccatggactgatctggtcaagctccatcctgacgtggaggcaggggcgctgaccgaggcggtgttcgccatcgatttgggggccatcgccaccaatgatcccaacgtgcccgtggtcaaccgggacccggaggcctttttccgggcgacgtatcttacggccgacttgcgaagacttttagaagaggtgttggcttgtcttgccgggaaaagcggctacaaccgggtgctcaagctgcgcactccgttcggcggcggcaaatcgcacacattggcggcgctgtttcatgccgcacggaagcgcgaggcactggacggcattccggaggctaaggaattcgcccgacccggcaatgtggccgtggccgttttcgacggcgagaagttcgatgcccgcaacggcaagacggtagaacaggcttccagcctgttatccacaggcaagctgcctgtgccacaacagattcagaccatgtgggggtggattgcctggcagatcgatcccgagaaggcctttccgctggtggccgatcacgacaaggaccgcgtggctccgggcggggatgtgatccgcgacctgctcaccaagggtgccggcggcaggccggttctcattctcctggacgaggtgctcaagtacatggagcgggcggcggcggtcagtgttctcgattcaactcttcagcgacaggccaaggattttttccagaacttgaccgtcgaggtagctggcagccagaatgcggcgctcgtctattccctgacctggagcgcaagggaagctttgggcaatgtcggattgcttgccgagatcgacaagctagcttcaagagtggatcagctcagggaacctgtctcgggggacgaggtcctgcccatcttgcagcgtcgtctcttggggggcagtcccgatatttcatccaccaccgaggtcgtcacggcataccaagatgccataaccggcatgcggcgtgcctatgccgagacgtcgtccgaacgtcagcaggccgatgaggaaggccgcctcctgcgagaccggatgcaagcggcgtatccgttccatcctgcgctcatcgatattatgagggaacgctggacggcggtggacgcctttcagaggacgcgcggcgcgctgcggttccttgcctcctgcatgcactctcttaagaagaacggcggagccaagccacttcttggtcccggagacgtgccgctgaaggacgtggacgtccggatgaagatgctcaaagagctgggggttcagaacgactacgacccggtcatcacggcggatatcgacggtccgaacgcccgagcaaaacgcatcgacgagcggaaggcccgagaaacccctatacttgccagcgtgaggccggccacgcgtatcgccacggccatcctgctgtattcgttcggcgggttgcgacgcgagggcttgggcaacgatgagacgctaccgcctggcgtgacggagaacgagctactggcggcctgcgtcggtcccgaccttgacaacatcacggccaccgccgtcttgtccgagctccgtaacacatgcctgtatctgcattacgacggcgtccgatattgcttcaagaaggacccgaatgtcaccaagctgatcgaggacgcggagcagaccgtcgcccgcgaggattcccaggcacgcggccacggcccggtccgaagccaaatcaaggagatgctggatgcccggctggctggtcaccacacggctatcgtctggccggcaaagagccaggacatccccgacgaggacccgcgattcctcgtcgcctacctgcctcttgagtttgccgccgagggcaaatcggagcaggaacgcgaggccaaggattacctaaccaaatacggagatcgtccccggcgcttccgcaacgggctgggactcgcgataccggaaaagaaacaaatcgaggcgttgcggcgtgcggtccggtatctcttagcaattgaccgtgtagaagccaagaagcagcaactccgactcaccaaggaccagcttgatcaacttcgggagaggaaacgcaccgagcaggctgccgctgaatcttgcttccgggagctttacacggccgtctggctgcctcgggttcaggacggcgagttggaaatagaaagagtggaacgtggcgggcggccgcttcaggcgaccggcgtccacgagcgcatcatggagctgcttaccagtgtggggacgccgcgcattcacggatcggtgacgccgcgaaaaatcgccgaacgtgtgcgtctcggtgaaatcttgcgagagaacgagcccccgctgatgggcatcaagacatccgatgtcctcgaggcatttttccgggatatagcaccgccaaggttagaatccgcatctgtactgcgcaagggaatcgctcggggcgttgccgaaagcgtctttgcctatatttctgtaggggcgattcatgaatcgcccgttctcggccctgacgggaaataccaggtgaaccgcgacagggtaattatcggccactcccttgctgacgacgagatcgatttcgattcggggttcctcatgatgccggcagcgatcccggaagccccaagcgcccaacctgccgatgtattccctgtcgatactggcggagtttccccactgagtgtccatgaagagccggctggagttggagtggaaacctgtacaggatccacgaagactggcacggacgccgccggccggaagaaacgggttgcttttgcctttgaagctactagagaacaggtattcaaggctttcccggctattgcgaatctggctgacaaatccgacggggccagggtgcgaatccgcatcgaggcttcgtcggctgccggcttcgatccatcgtggctgcgcaacgccgtggacgaaccactcgacgaagcagacattgagcggagcatggaggaatagcaaagagaggtaactcatggctctaacgaaaggtgaacgaacctatcgactccaagcactgacggacttgtggaccggctcggtcactcttgaagaaaaaaacggccacataaaggaaaaaactgaaccggaccgtcttatcaccaccggcctgctcggctccatccgctggtggttcgaggtgttggtgcgtggtttgggcggcagcgcctgcgacccaaccgatacgaaatgtgaagaccgaaaccattgtgttgtttgcgaactatttggttgcaccggttgggcgcggaaattcagatttgaagtcctcgacaagaatggcaatatccgagaggccagaaacaatgccgaaacgaaaatctcacctcaaataaagaaagacgaagagttcagttttcgcttcacacccctccgtccgatccgggatgaagagtgggccctcctagacgccacccttcgcctgatcgccgaatatggggccatcggtggcaagacagtattcaagccgacggacgaatccagtcgggcgggcaagctgcaccacaaagactatggcttggtgcagatggtcacgtctcggcaattcgatggaacaagtcggggtgatttggaaacatatctatccaaatggcggaagttcaatcacggtgagttcgcctgggcttctctacagcacttctggtgcgtgaataaaaataaaaagcatcttgcgcgtgaagacaacaacaagagcactttcaaccaggtgcccggacgtcaggaggcaaaaaaccaagaacaacagttggccaccggcaccgatggaatagccagatggattgccgactctcagcaggagtgcaagaaggtgttcagcttcaagaatcccgcgaggacctttggcttcgtgaaacctggcgggaccgccgctgacaccaagaaaaaattcgaagagatgaagaagagacttgattctgcttgggggcagtacggctgggatttcctcaccggtgacgagatcattgaccagctattcgccgggaaggagggccgctcatgagtttcgattattacgcctcgctggccgaaatgaaagcctgcccgaaacaggcgaacgaaggcggactcgcttcaggctttggggatggatgcgtggtctggtcctgtcgtgacagggagaagaacaatgcgcgtcaatgctacatgaaacgggcggctgaactggaactcaatctccctcctggccttcaccttgagccggaccatgcttccctgccggattcgacctggtttggcatcgatatatccttcaccctgaaatcgccctggtattcgaaggacgaccggccctttcatgtgctcgacaatccagttcgcaaggatcgggtcttcggtgtgccgttcatgtcggcggcctcatggaaggggcttcttcgctgggcctgtaggatgcaggcgggcttatccaagcatcttgaaaagcacgatatgaaaatggatggctggaaggacccttcatggatcgtccatctcttcggcaatgagaaaggagaggatgaacgcttccgctccggcgctcttgtctgttatccgacttggttcaataaaatcggctttgaggtgatcaacccccacagtcgtagccgccgggctgggactcagcccattttctacgaggttgtcccagccggaacgaaggggaggctacagctactttatgcgcccctgccgggggaaatcgaacgcgacaaagtaacgccggctgacttcatcgacggcttcatcgacagcataagggcgcttctcgaaacctatggcatctccgccaaacgcaccgccggatggggtactgcgaggatcgatgcgtggagtggacttgtgatggcttccgatgaacccgcaaaggttgagccgcgatccacaaagaaaacttttcgcatccttcaggaccttgacgctctggtacgtgagcaaagctcacccggctccttcactctgaaggatgcggaggaattcaaatccgatttgaaaagtcgaattgcccggaagggaggtgacaaatgacgagatttcaacttccggacacattgcggcaacatcgccctctgcttctgacgctcgaagcaatcggctggcttcatatgaccggcaaggccaaggttgactttctgcgtaggcatggtggacaaaaaagcgactatgaatacgaaaaatgggatgaattggagaacccaccttttccatggaacgatcgacttaactgggtgaaagacaaattcgcgttagatggaaacgcctttcccgccactctcacggagtttatcaggaagtataccaagagagacaaagggctgcttggcctgctccaagccggccacgctatggcgtcgggtatcgaaaagaacctgccgtcggctaccgctaagtatctgggtcaagatgctgcccacatgtggctgtcttcggccttcggccatccggttcgcaatctgttggccgacccgcctgaattgcttaccgatgttggctggaaacgcctactcggacaaatcgaggatctcctcaccgaactgcagcggctcggcaacaacagtttcccgaatgatctttatggctggtggcgttggcgcgaggacgcggtcggccccgaaggttggctgcgcaaggcgtttaccagcaccttagcagaaacccgattgccgaacaacgacatcacgctttttgatcagtcctatgtcgcggccgcactgttcaagagcgctgtggccggggcggttctggaaggcaactcgtttccctggtccagcgatggactcaaacaacagacccgttggcggctcttgaccatcgggatcggtgcggaccactacgaggcccgggccgtgaagatcggtgactggaccggggcacggctggcgctggacgagttttttactaaagtccgcaagctcgttgaggtcgatttggctataggtcctttactgtacgcggacggagaggcctgtgtcttttcgttcccgggagaacgattcgatcacggcgaacaagggtatcagggtggtgatttaaagatcgcagactggcaaagctggctgacggagcagattgacggctatgcccgtgacgccaaccttgagatgcccccgtattgcggtatcagtgagccttcgcgatcacttgtgcgaatgacggctgaaatccgaaacgcgcgggaaacaatggccgtgccgctctttcgcaattggcaaattcccgggcaggattcgtcggatggccatgtttgtcccgtatgtcatgtgcgcagtagccgctcaagtactgacaagcaaatgccttgcgacccgtgtaagaatcgacggacccatcgcttagacatgtggcttcaggggaagtttggatcagacacgatctggattgatgagatagccgatgccaacgaccgcgtcgccctcgtcacgatgagcttggatatcgtgccctggcttgacggaacccgcttggatgcgctcaggacacaggccattccggaatggcgcaagttcaatcctgtcttgaaaaaccagccaaaccctattgatccctccacctgtttcgacagcctcttacagtacatcaaaggaaagctacagtcctttgacaaggatgaccccgtgctgagcagcctgcaggaggggtatcagcacgagatagattggcaatctttcttcaccaaaatcgtcgaggatcgaactggctcacaccaatggggcgatatcgatgagaacggacgcgccgcatggctcacgcatcagttgttttgcaagctcgcctcgcctggtcgtatctatcgcttctggcggcaggccgaggatttcttcaaagccttgcttgatgaattccgcgacatagcgagtgcagaccagaactgctggcgcgtgcgccgattggttatcaagcccgataacggctcttccggttcgtgggaaggccggcagacgtacagcggacgttatggggatgctcccgtaagcctgttgtatcgggaacaaacaaacgacttcctcaccatctgcaacctagcccgacttatgaaagcggagcagggcaaggacagtctttgcgaaatcaagctggagttgaaggcggatgacagcgtggaaacgaaacaacttgtggttcattcgacagcggaggatacgggcgctctggacatttatcatccggtgatcccccttgagctttcccctgtccgttttcgtgtccttctgccgcttgaagccgcatcggcttgtgtggaccgggcggttgaagcatggcgcggccaattcgcccgtgtctgggaccgtctgccgcttcgggtcggggtcgtggcttttcccagaatgatgccgtttcaggccgtgatagacgcggcgcggaccatcgaagatgatctggacagaatcaataaatcacaaacctggcgggtggcgggatgcgaaacgcgtgacggcgtcaccgctctcaacatcaagtcgctggattatcggcaagagcttcttcaaaccatacccgtcagactccccgatggacgagaagacgtgttctatccatacctggccgtggaagatagagatgttcgcattcctctggatttccgacatcccgatggtcgggttttcaggcatgtgaaagacttgcgaagcggggactgtgttttcgtttatccctcgcttgtcactacagttttcatgaatagtgcagccagacgcttcgaacccctcgacattcgatccctgacggattggttgcggatgcgcgatctctggcggctgatagaccggcatgcaccaagtcagaccgcgctccatggcgcatggtcggaaattatcgagcggcgcgaggcctggcaagggccggaggggacatggctcgaggggggaaagacggcatggctcgacttcgcacgcgcggtgttccatgaacgtctgggtgttcgaggagcttgccttgagacgttggtggcagccgccggagacagactcctggactggagtctggaatggcacatgagcatattaaaaaagcaagtgtccggaggtgaccgatgacaacaaataatcggagttttgcgacatttcagtttgctggcatggcgcttgatcccatccatgtcggtacgggcggagctcggctgggccgcgtggataacactatcgtgcgcgatccggtcacgcggataccgaaggttccggggtcgagcatcgcgggcgtcatgcgagcctacacggccatggcaaaggggaaataccccggctgcgccggccttggtcagccggagcgcaacggtgcaggtggtcattgcggaaaggccgattgtccggtatgtaccgtgttcgggtttgcaaaaggcataggcgcaagtggcgggttcgcgggactggcggcattcagtgatatgcatgtgctgctttttcccgtggcatcacaattggggccgcaatggatcacatgtccgatggcattgcggcaaaccagcatcgtgaaattctcagaactgggtgacttgcctgagcagcaagtcatttaccgcaaagcggatgggcaagcaactcagccatcattgaatctcggctggcttttattaccggtcaagacggattggccgcaactggacgaggttgctcaagggatcaaagcactggggataccggattacatcatcagccgcttgggtgtcgtctccgacaagctgttcgcccacctcgtgaacagcaacctcgaagtacggacctcggtcgccatcgatccggccaccggcgcagccgaggaaggggcgcttttcacctatgaggccctgcctcgatccacagtgcttgtttgggagctaacctgccggaatccaaagcactttaagatcaatcaagaggatgtgcaggcggtcgactcaccggaaaaggtaagaaatgttgttaccgaagcccattcttatctggaacatcttggtatcggtggcatgggaagccggggcatgggacggctgcgcgtgctgaaaacgaaggagcctgacgattcggataagtctggaaagggggtctcgtaatggacgctccaaccttagaaaatctggaccttgcctgtgccaaggtgggtaaaactatggcggagaagccgtcaaaggagcttgaaaacctcattataaacgcgctcgctgttctggaggagcaaggtatttacgctctctttctttttctaaaagcgcgaggcggcgatggagcccaaaatgtcaacgatcagctttataaattcctgaaatcgacgccgcagcaggcccctttactttctgacaatgcagacgtctttacctcgcttcagcagatggccaaggaccttgacaagctattactggctcgtgatttggtccggcaaacacttgtctacgcccgttatcacgcgcgagtgccacaaaagagtgaggtgcaaacatgacctggacggcacttcgatgggtctggcgactggaagcgcccctttacgtcggcatgcctccggcaggggccttgaaccgctgtcgaccctatgttccggcgcgcgtgctatggggagccgtgaccgctgagatttcccgatcaaaaaatggtgaaaactttccggattacggcaagcttggatgtgaagtcgctcgcgactgccgtttcacctacctctttccggccgagaaacggggcgacaaatttctggcttggcttccgaaatacgagaaaacaaaagggctgtgttggcgtagtcatggcggcgaggaaagcctttcggaccgtgacttcagacgtcgtctgctggtctcccggcccggcactgcaatcgctcccgaatcggactcggcgtctgaaggcacactccgagagacagaatgtatcaatccctggtggcgtgattccaactgtcaggaggaatcgagcgccgtgctgcttttggggtatgtcttcctgaaaaacaatggctttcggaggcagttggacaatatcgacgtcctctttgtcgggggcgataccagatacggtcttgggaaaatatgtcgtattgactggcacgacatatctagtgacttgaccgtcttcggggaacgatttcatctgaatggagagcatcccgaaatacagagcgacatcgtttggggacatgccttagattgtggccagaatcaaatccaaggaatgcaaggagtgaaggaacttcttggcgggtgggaccaagccagccagtggcgaggagcacttacgtgggctcccggctcatttctggaccgttttgtggcctggtcgatagacaactatggatactggatgcatcagggcaataaatagccaatgtttgcgacacaacttgcgacaagctcgcgactcaacttgcgacatccgcattgggtagggtaattgggaaatcgagtttgacgccgcttctacctcatcgggaacgacctgctctttgataaacggttgaaattgaaggtattcggtaaactgcaggagatcgagaacggttagaagggggattatacttggaagcaagacgacactacacacaaaacaaaaattgtgtttatagaatcaagatggaaatttaaatctttcaaaaccgtaatcttcccgtcaagtagacaattcataagtaaagtttttggcggtttgtcgttcacggaagactattggcggcaggccgcctagggcctcgtggggcgccgctcgttgtaggcgaacagccagtcggtcatacccgatctcccgcacttgctccaaatcctcaaacaagtagctattgaacgcctcctcgggataggtccggttgaattgttcaatgaaagcgttttggttcggcttgctcggcggatatgccggatggcgatgttcatcgccgacgccagtcgacaaagacctgagaggtcagctccaagccgggaataaaccctttcccaatttgcctgattgacatgagcagttcaaaataattatcttttctatagacccaaacgacgggggctgatcctgtgccgtcaatatgcggatagattcttcggttgttggaagatttcatgtagagttgaagaacaactggttcgagaggcaaaaaggccataaaaagattggcggattccatatttgggctcgcctgaacaggacattcgagagaagaacacttgagaaagacgccaagaacccgttgaaaatgacgccttacgcaaaatcgaatagacccactcagatattgttatatgcggaggaatcttatgaaacacggcaagtcttgaatgtcggcagtgtggatgataaagaggcataaagaaaaaaaagagggaatgattatgaattacaacttgctcgaagaaaaatggatacccgttctttaccgtaacggcgaatttgacagaatcgggatccgcaaagcttttgaagatgcccgtaaaattcgtcaaattgccgccagcaatcctatggatcgctttgcgatacttcgttttctgctggcgcttctttattggtgtaagggcaaccctccggaacggattccggaggattcgtttccccaagagtggttcaagaaactcgaggataatagagactgcttcaaccttctgggggatgggaagaggttctatcaggatagccaagccaagcgcccgcaatcggctacgcagctgatgcaagaaataccctccggcaataacttctggcatttcagacattcgacagatgaacgggacgggctttgcccggcttgctgcgctatgggtttattgcgtctgccgctttttgcaataactggtttgagcggaccgaaagaacccaacctgatgtccggaataaatggtgctccgccgatttatgttatgccatggggtaagtcgttgatggagacgttatgtgagaattggtctttttgctcaaatattggtgaaccatcatggatttttcagcagcttccgacaatgagctcggatgtcccattgcttacaggtttgacgctattaccgcgtagggtttttctacacgagccggacgggcagcctggtctatgcatcggctgtggagcctccgcaaaatcccttataaagactattgaatttcagactaccgggaagcaagagaataagaattggaatgatccccatgtgatttatgcgaagcgaaaagctataagagctgaagatttgactgtttccggcaggttcaggcttgaccgcccgtggcatagcctgcttgagcatttggcagaaactttatcgtcacggcaaaacatcgacaggtttcatggtttgcttgcacgtattgtggaaacaggaagaccggtatcgctgtttgtcgttgggtttgcgacaaatcaggctaaaaacgttgatgtgtgggaacggatgattgaaattccatcactggattcattcccgcagacggcagtttccttgatagaaaaatggcggaatcagggaatagggctggatagacacgaaaacatagcaaaatcaagaatagaaatgtctgccgttatttcctccatccgccctcatgtggaagccaaagtctccgccaatgctggcgccctacttgaagcagatgagcaagtatgggaacaagcagccgacgaatatgctccgctgatggctgccgtcgccgcatcaatctcccccggcttcacctcagaaaaattgaagcaacggaagcagatcgccgccataaggccggacatgagacaagaaacaagtgggccggcagaacgctccaagagaaaggaggcaacaagtgaatccgactgagcagtatgtaaacgtcctgaacgatttgaaaaccggcgaactcgggcttctgcgcacgcatgccggtcaaggccttgacgaatcggtcgatgggttcgacctgttcgccggtctctggtggccgcttcgccagatgagcgcgagcgccccccgccgtgaggtagcttggctgatagccaagctctacgctttccgtccaatagagcattcgcccggccagaccctcgcctatcagcttgggtgctgtcggccgaacacggatcgagatgagcattacgccaaaagattcgacagaatgctcactttgccgctcggcaaacttgaaaccgatctcagatgggcgctcgacctgctgggttcaaaagacctaaaaatagactgggttaaactgaccgacgatctctccatttgggaacgcgaatccacgcgcctcaaatgggcggaggaatttttaagatcattcaaaggaggtagagtatgttgatcgaagtccacatgattcaaaatcatgccccggccaatctgaaccgggacgacctcggcgcgcccaaaacctgttatttcggtggggttctgcgctcgcgtatctccagccagtgcatcaagagaagcatccgcatgagcgaacagttcaagcagttgctcgggggcgtccgcactcggcgactggccgaagagatcgcaaagttggtcccggaaaaaaaggacgttagaaaacgcgccgtatccattcttgaaaagtgcggcatcaagcccaaaagtaaagaagtcgaccgcagcgatatgcttgtttatacgactaaacgggcgatcgccgaaatggccgatttgttgaagaataatgatggaaaaaatgatgaagaactgaagaaagagttcgctaaactaatagctgaaaatactgcagtgccggatatggcgctctccggaaggatgctcgaaaccggtgaactcgagaatacaaccgtcgaagcggccctgcaagtagcccacgctatctctacccacgaggcccgccccgaagtcgattactacgttgccgcagacgacatcccgggcgaggatgccggcgccggttatgtggacgaagccatgtacgcctccgcctgtttctataaatacttttccatcgattgggaaacgctggtgaataatctaaatgggttcaaagatggttgcgaaaaactcgccgcccacactgttggggcgttcatccgcggggccgcgctgaccaatccaacaggcaagcaaaacagcttcgccgcacataacccgcccgatggaatactgatcgaactgagaaatacacccatcagctacgccaacgccttcgccaaaccggtcaataaagatgagcgcgatatcgtatcccagagcatcgcccaactcggtcaatacatctgtgatatcgacaccggatacggcaagccggagcaccggttctggttctcgcccaatctccgctacaagctgaccgttttggatgacaagaaggaaaatactcttgccaataacaacctcaaatcgctcgatgaactgatccccgccgtaatcaaaaccctcggctatgactgggaggaggtcaaaaaagtagtcgtaaacccggaggcggcctgatgagcgccaatacactttttcttcgccttgagggcccgatgcaggcatggggcgaccaacaatcgaagttcgttatccggcggacggccgaggcgcccaccaaatcgggcgttattgggatgctctgcgccgccttgggcgttccccgtccgcaggccgctgaaatatggcttccgaaactcgccaaactcgatatgggcgtgcgcatcgaccaacccggcatccgctggtgggattatcacaccgtcggtgccagaatgaaaatgcgcatcgccaagggtgagggtgaaaccaaacccggcgccatgctcagccggcgcgagtatctttgcgatgcctctttcttggtcgccctacaaggagaccccggcctgatcgccgaattggaaaacgccgtcaagacgccgaaatgggtgctttatctcggcagaaaatcatgcgttccctcccgccccctgctggaacatcaatccggtgatttttccgatttgcttggcgcccttacatccatcccttggcgtccgcggctcaaaaatgaccagcctccccaaaccgtggaatgcctgctcgactggcggcctacggccgcacaaccggaggcgcccgacgatgcccttatttggtatgatgttccactgacattcgagccaccttcgcatcagccgcgattcgttatccgcaaaacattgaaggtaggcaaagatggagaattggccgtcatgacggaagctgcccaaaatctccccaagtctcccccgcgcccacgagccaattacggcgacaacgaatacagaaagcgacgagaagaaaggcttgaccacgaccaccatctatgcgtcttctgcaaggcgccggcgacaaccgtgcagcacatcacctaccggcgggccggcggcgatgagaccgcagacgatttgcgttcgctttgccgcctctgtcacgatgccgtaacgatgatcgaatacggcctcaatatgggcatggaccgcatcaatcccgaagagccgcgctggcgcgaaatgatcatcaaaaaacgaaacgatatcatcaaattccgctctcttgaaacccgtcgtcggcgcctcgcctccgaggaggtggaataattatgtatatttccctgctcctgatcgatacaggcgataatcccgacagaccgcggccgggacggatatggctgcgcaatctctatcatgtgcaccaacgtctttgcatggcgttcccttccgactcccgtaaatcggccgacgcgcattttctcaagccgttcaatccggaggagttcggcaaaggccatgtgcatgtaaaccgcgccgaaaattccggttttctttttcgtatcgacccgctgcccaacggtagagccgccattttggtgcagtccgtcatcgaacccgactgggaatatgcctttcacaatgcctgctatcttctggccgccaagccgcattgtcggcctttcgatccccgattcaccagcggacagcgccttcgctttcgcctcgccgcaaatccgaccagacgtctgagcgaaaaatcaccggatgcaaaaagggaatccttccgaaaacgcgtccccgtgccgaccgataaactccccgactggcttgcccgccgggccgattcggccggctttcatatcctcaaattgaactccattcaaaccggatatgtttatttcaaaaagcccggtccggaagcgcgaaaatccccgacgaatcaaatttcttgcgatgacgaccatggatctgacaagcacgataattccgataaagatcagaaatcacgcctgcgtctggcccgttacgaaggcgtccttgaagtcaccgatcctgataaattccgcaaaaccattgtcagcggcctcggttcggccaaggccttcggcttcggcctcctctccgtcgcgccgtatgatggggagtcgtagtgagaatcaaaaacctgcatgccttgcccaaattcagcgacggctggagttatctctatgtgcagcattgccgcatagatcaggaagcacgggccatcgccgttcatgatgaagcgggcaaactgccggtcccctgcgccaatctggccatgttgatgctgggacccggcgtttcgatttcgcacgccgcaatctccgtgctggcggatcacggatgccttgtagcatggtgcggcgaggaaggggtgcgcttctacgcagtcggcatcggcgaaacgcgcagcgcggctaacctcctgcatcaggcgcggctgtgggcgcatgttgacctccacatgcaggtggtccgccgcctataccagttgaggtttcccgagaagctgagcccgcagttgacacttcgccaaatccggggtatggagggcgtccgcgtgcggaacgcctacgccaatgccgcgcgtgaaaccggcgtaacttggtcaggccgcaattaccaacgcgataactggaacaaagcagatccggtcaatcgggcgttgtcggccgccaactcgtgcctgtatggtatctgccatgcggccatcgtatccgcgggcttctcgcccgcactcggcttcatccacaccgggaaaatgctgtcgttcgtctatgacatcgccgatctctataaggctgagatcacgatcccagtggcgtttcgagccgcagccgagggagagggaatgttggagcgacgggttcgcctgacctgccgcgataaattcgtatcgacccggcttctggagagaatcattcccgatatccggacggcgctgatgttgtcaacgccagagccgaccgccgacggcccgcctttcgacgatgacgccgcccccggctcgttgtgggatcccgagggaaaagatgtggccggcggacgcgcctatctgccggaggtcaacgagaaggagaaggagaaagagaaggagaacgagaaggagaaggacgatggtggtgatgattcttgagcgggtgccgccggcattgcggggcgagttgacccgctggctgctggaaccgaaagccggagtctttgtcggccgaccatcggcgatggtgcgcgatatcctttgggagaaggcctgtgggcaggccaaggaaggtggttgtgtgatgatttattcgagtgacaacgaacagggttttcggattcgcagttggggtctgacgtcgcgctccatcgaggacttcgatgggctttttttggtgcgcgtgttgtagtataatagtttattaagtattgtccccacgcacgtgggggtgaacccggatggtcattcgccgataatcggtatgcaaaattgtccccacgcacgtgggggtgaaccgacgatgcaaaacgataaatttgaggcggccgcattgtccccacgcacgtgggggtgaaccgagaacatgtactacaacagatacgcatagcatattgtccccacgcacgtgggggtgaaccaatcgaacggcataattgatctcagcgactgcgattgtccccacgcacgtgggggtgaaccgaacggattttgaacagcatatccgtagcattgattgtccccacgcacg

SEQ ID NO: 990 - DNA, 103324 bp, Artificial Sequence
  Synthetic Oligonucleotide
  misc_feature (1)..(84736): n is a, c, g, or t
nnnnnnnnnnnnnnnnnnnnnnnnnnnnnnnnnnnnnnnnnnnnnnnnnnnnnnnnnnnnnnnnnnnnnnnnnnnnnnnnnnnnnnnnnnnnnnnnnnnnnnnnnnnnnnnnnnnnnnnnnnnnnnnnnnnnnnnnnnnnnnnnnnnnnnnnnnnnnnnnnnnnnnnnnnnnnnnnnnnnnnnnnnnnnnnnnnnnnnnnnnnnnnnnnnnnnnnnnnnnnnnnnnnnnnnnnnnnnnnnnnnnnnnnnnnnnnnnnnnnnnnnnnnnnnnnnnnnnnnnnnnnnnnnnnnnnnnnnnnnnnnnnnnnnnnnnnnnnnnnnnnnnnnnnnnnnnnnnnnnnnnnnnnnnnnnnnnnnnnnnnnnnnnnnnnnnnnnnnnnnnnnnnnnnnnnnnnnnnnnnnnnnnnnnnnnnnnnnnnnnnnnnnnnnnnnnnnnnnnnnnnnnnnnnnnnnnnnnnnnnnnnnnnnnnnnnnnnnnnnnnnnnnnnnnnnnnnnnnnnnnnnnnnnnnnnnnnnnnnnnnnnnnnnnnnnnnnnnnnnnnnnnnnnnnnnnnnnnnnnnnnnnnnnnnnnnnnnnnnnnnnnnnnnnnnnnnnnnnnnnnnnnnnnnnnnnnnnnnnnnnnnnnnnnnnnnnnnnnnnnnnnnnnnnnnnnnnnnnnnnnnnnnnnnnnnnnnnnnnnnnnnnnnnnnnnnnnnnnnnnnnnnnnnnnnnnnnnnnnnnnnnnnnnnnnnnnnnnnnnnnnnnnnnnnnnnnnnnnnnnnnnnnnnnnnnnnnnnnnnnnnnnnnnnnnnnnnnnnnnnnnnnnnnnnnnnnnnnnnnnnnnnnnnnnnnnnnnnnnnnnnnnnnnnnnnnnnnnnnnnnnnnnnnnnnnnnnnnnnnnnnnnnnnnnnnnnnnnnnnnnnnnnnnnnnnnnnnnnnnnnnnnnnnnnnnnnnnnnnnnnnnnnnnnnnnnnnnnnnnnnnnnnnnnnnnnnnnnnnnnnnnnnnnnnnnnnnnnnnnnnnnnnnnnnnnnnnnnnnnnnnnnnnnnnnnnnnnnnnnnnnnnnnnnnnnnnnnnnnnnnnnnnnnnnnnnnnnnnnnnnnnnnnnnnnnnnnnnnnnnnnnnnnnnnnnnnnnnnnnnnnnnnnnnnnnnnnnnnnnnnnnnnnnnnnnnnnnnnnnnnnnnnnnnnnnnnnnnnnnnnnnnnnnnnnnnnnnnnnnnnnnnnnnnnnnnnnnnnnnnnnnnnnnnnnnnnnnnnnnnnnnnnnnnnnnnnnnnnnnnnnnnnnnnnnnnnnnnnnnnnnnnnnnnnnnnnnnnnnnnnnnnnnnnnnnnnnnnnnnnnnnnnnnnnnnnnnnnnnnnnnnnnnnnnnnnnnnnnnnnnnnnnnnnnnnnnnnnnnnnnnnnnnnnnnnnnnnnnnnnnnnnnnnnnnnnnnnnnnnnnnnnnnnnnnnnnnnnnnnnnnnnnnnnnnnnnnnnnnnnnnnnnnnnnnnnnnnnnnnnnnnnnnnnnnnnnnnnnnnnnnnnnnnnnnnnnnnnnnnnnnnnnnnnnnnnnnnnnnnnnnnnnnnnnnnnnnnnnnnnnnnnnnnnnnnnnnnnnnnnnnnnnnnnnnnnnnnnnnnnnnnnnnnnnnnnnnnnnnnnnnnnnnnnnnnnnnnnnnnnnnnnnnnnnnnnnnnnnnnnnnnnnnnnnnnnnnnnnnnnnnnnnnnnnnnnnnnnnnnnnnnnnnnnnnnnnnnnnnnnnnnnnnnnnnnnnnnnnnnnnnnnnnnnnnnnnnnnnnnnnnnnnnnnnnnnnnnnnnnnnnnnnnnnnnnnnnnnnnnnnnnnnnnnnnnnnnnnnnnnnnnnnnnnnnnnnnnnnnnnnnnnnnnnnnnnnnnnnnnnnnnnnnnnnnnnnnnnnnnnnnnnnnnnnnnnnnnnnnnnnnnnnnnnnnnnnnnnnnnnnnnnnnnnnnnnnnnnnnnnnnnnnnnnnnnnnnnnnnnnnnnnnnnnnnnnnnnnnnnnnnnnnnnnnnnnnnnnnnnnnnnnnnnnnnnnnnnnnnnnnnnnnnnnnnnnnnnnnnnnnnnnnnnnnnnnnnnnnnnnnnnnnnnnnnnnnnnnnnnnnnnnnnnnnnnnnnnnnnnnnnnnnnnnnnnnnnnnnnnnnnnnnnnnnnnnnnnnnnnnnnnnnnnnnnnnnnnnnnnnnnnnnnnnnnnnnnnnnnnnnnnnnnnnnnnnnnnnnnnnnnnnnnnnnnnnnnnnnnnnnnnnnnnnnnnnnnnnnnnnnnnnnnnnnnnnnnnnnnnnnnnnnnnnnnnnnnnnnnnnnnnnnnnnnnnnnnnnnnnnnnnnnnnnnnnnnnnnnnnnnnnnnnnnnnnnnnnnnnnnnnnnnnnnnnnnnnnnnnnnnnnnnnnnnnnnnnnnnnnnnnnnnnnnnnnnnnnnnnnnnnnnnnnnnnnnnnnnnnnnnnnnnnnnnnnnnnnnnnnnnnnnnnnnnnnnnnnnnnnnnnnnnnnnnnnnnnnnnnnnnnnnnnnnnnnnnnnnnnnnnnnnnnnnnnnnnnnnnnnnnnnnnnnnnnnnnnnnnnnnnnnnnnnnnnnnnnnnnnnnnnnnnnnnnnnnnnnnnnnnnnnnnnnnnnnnnnnnnnnnnnnnnnnnnnnnnnnnnnnnnnnnnnnnnnnnnnnnnnnnnnnnnnnnnnnnnnnnnnnnnnnnnnnnnnnnnnnnnnnnnnnnnnnnnnnnnnnnnnnnnnnnnnnnnnnnnnnnnnnnnnnnnnnnnnnnnnnnnnnnnnnnnnnnnnnnnnnnnnnnnnnnnnnnnnnnnnnnnnnnnnnnnnnnnnnnnnnnnnnnnnnnnnnnnnnnnnnnnnnnnnnnnnnnnnnnnnnnnnnnnnnnnnnnnnnnnnnnnnnnnnnnnnnnnnnnnnnnnnnnnnnnnnnnnnnnnnnnnnnnnnnnnnnnnnnnnnnnnnnnnnnnnnnnnnnnnnnnnnnnnnnnnnnnnnnnnnnnnnnnnnnnnnnnnnnnnnnnnnnnnnnnnnnnnnnnnnnnnnnnnnnnnnnnnnnnnnnnnnnnnnnnnnnnnnnnnnnnnnnnnnnnnnnnnnnnnnnnnnnnnnnnnnnnnnnnnnnnnnnnnnnnnnnnnnnnnnnnnnnnnnnnnnnnnnnnnnnnnnnnnnnnnnnnnnnnnnnnnnnnnnnnnnnnnnnnnnnnnnnnnnnnnnnnnnnnnnnnnnnnnnnnnnnnnnnnnnnnnnnnnnnnnnnnnnnnnnnnnnnnnnnnnnnnnnnnnnnnnnnnnnnnnnnnnnnnnnnnnnnnnnnnnnnnnnnnnnnnnnnnnnnnnnnnnnnnnnnnnnnnnnnnnnnnnnnnnnnnnnnnnnnnnnnnnnnnnnnnnnnnnnnnnnnnnnnnnnnnnnnnnnnnnnnnnnnnnnnnnnnnnnnnnnnnnnnnnnnnnnnnnnnnnnnnnnnnnnnnnnnnnnnnnnnnnnnnnnnnnnnnnnnnnnnnnnnnnnnnnnnnnnnnnnnnnnnnnnnnnnnnnnnnnnnnnnnnnnnnnnnnnnnnnnnnnnnnnnnnnnnnnnnnnnnnnnnnnnnnnnnnnnnnnnnnnnnnnnnnnnnnnnnnnnnnnnnnnnnnnnnnnnnnnnnnnnnnnnnnnnnnnnnnnnnnnnnnnnnnnnnnnnnnnnnnnnnnnnnnnnnnnnnnnnnnnnnnnnnnnnnnnnnnnnnnnnnnnnnnnnnnnnnnnnnnnnnnnnnnnnnnnnnnnnnnnnnnnnnnnnnnnnnnnnnnnnnnnnnnnnnnnnnnnnnnnnnnnnnnnnnnnnnnnnnnnnnnnnnnnnnnnnnnnnnnnnnnnnnnnnnnnnnnnnnnnnnnnnnnnnnnnnnnnnnnnnnnnnnnnnnnnnnnnnnnnnnnnnnnnnnnnnnnnnnnnnnnnnnnnnnnnnnnnnnnnnnnnnnnnnnnnnnnnnnnnnnnnnnnnnnnnnnnnnnnnnnnnnnnnnnnnnnnnnnnnnnnnnnnnnnnnnnnnnnnnnnnnnnnnnnnnnnnnnnnnnnnnnnnnnnnnnnnnnnnnnnnnnnnnnnnnnnnnnnnnnnnnnnnnnnnnnnnnnnnnnnnnnnnnnnnnnnnnnnnnnnnnnnnnnnnnnnnnnnnnnnnnnnnnnnnnnnnnnnnnnnnnnnnnnnnnnnnnnnnnnnnnnnnnnnnnnnnnnnnnnnnnnnnnnnnnnnnnnnnnnnnnnnnnnnnnnnnnnnnnnnnnnnnnnnnnnnnnnnnnnnnnnnnnnnnnnnnnnnnnnnnnnnnnnnnnnnnnnnnnnnnnnnnnnnnnnnnnnnnnnnnnnnnnnnnnnnnnnnnnnnnnnnnnnnnnnnnnnnnnnnnnnnnnnnnnnnnnnnnnnnnnnnnnnnnnnnnnnnnnnnnnnnnnnnnnnnnnnnnnnnnnnnnnnnnnnnnnnnnnnnnnnnnnnnnnnnnnnnnnnnnnnnnnnnnnnnnnnnnnnnnnnnnnnnnnnnnnnnnnnnnnnnnnnnnnnnnnnnnnnnnnnnnnnnnnnnnnnnnnnnnnnnnnnnnnnnnnnnnnnnnnnnnnnnnnnnnnnnnnnnnnnnnnnnnnnnnnnnnnnnnnnnnnnnnnnnnnnnnnnnnnnnnnnnnnnnnnnnnnnnnnnnnnnnnnnnnnnnnnnnnnnnnnnnnnnnnnnnnnnnnnnnnnnnnnnnnnnnnnnnnnnnnnnnnnnnnnnnnnnnnnnnnnnnnnnnnnnnnnnnnnnnnnnnnnnnnnnnnnnnnnnnnnnnnnnnnnnnnnnnnnnnnnnnnnnnnnnnnnnnnnnnnnnnnnnnnnnnnnnnnnnnnnnnnnnnnnnnnnnnnnnnnnnnnnnnnnnnnnnnnnnnnnnnnnnnnnnnnnnnnnnnnnnnnnnnnnnnnnnnnnnnnnnnnnnnnnnnnnnnnnnnnnnnnnnnnnnnnnnnnnnnnnnnnnnnnnnnnnnnnnnnnnnnnnnnnnnnnnnnnnnnnnnnnnnnnnnnnnnnnnnnnnnnnnnnnnnnnnnnnnnnnnnnnnnnnnnnnnnnnnnnnnnnnnnnnnnnnnnnnnnnnnnnnnnnnnnnnnnnnnnnnnnnnnnnnnnnnnnnnnnnnnnnnnnnnnnnnnnnnnnnnnnnnnnnnnnnnnnnnnnnnnnnnnnnnnnnnnnnnnnnnnnnnnnnnnnnnnnnnnnnnnnnnnnnnnnnnnnnnnnnnnnnnnnnnnnnnnnnnnnnnnnnnnnnnnnnnnnnnnnnnnnnnnnnnnnnnnnnnnnnnnnnnnnnnnnnnnnnnnnnnnnnnnnnnnnnnnnnnnnnnnnnnnnnnnnnnnnnnnnnnnnnnnnnnnnnnnnnnnnnnnnnnnnnnnnnnnnnnnnnnnnnnnnnnnnnnnnnnnnnnnnnnnnnnnnnnnnnnnnnnnnnnnnnnnnnnnnnnnnnnnnnnnnnnnnnnnnnnnnnnnnnnnnnnnnnnnnnnnnnnnnnnnnnnnnnnnnnnnnnnnnnnnnnnnnnnnnnnnnnnnnnnnnnnnnnnnnnnnnnnnnnnnnnnnnnnnnnnnnnnnnnnnnnnnnnnnnnnnnnnnnnnnnnnnnnnnnnnnnnnnnnnnnnnnnnnnnnnnnnnnnnnnnnnnnnnnnnnnnnnnnnnnnnnnnnnnnnnnnnnnnnnnnnnnnnnnnnnnnnnnnnnnnnnnnnnnnnnnnnnnnnnnnnnnnnnnnnnnnnnnnnnnnnnnnnnnnnnnnnnnnnnnnnnnnnnnnnnnnnnnnnnnnnnnnnnnnnnnnnnnnnnnnnnnnnnnnnnnnnnnnnnnnnnnnnnnnnnnnnnnnnnnnnnnnnnnnnnnnnnnnnnnnnnnnnnnnnnnnnnnnnnnnnnnnnnnnnnnnnnnnnnnnnnnnnnnnnnnnnnnnnnnnnnnnnnnnnnnnnnnnnnnnnnnnnnnnnnnnnnnnnnnnnnnnnnnnnnnnnnnnnnnnnnnnnnnnnnnnnnnnnnnnnnnnnnnnnnnnnnnnnnnnnnnnnnnnnnnnnnnnnnnnnnnnnnnnnnnnnnnnnnnnnnnnnnnnnnnnnnnnnnnnnnnnnnnnnnnnnnnnnnnnnnnnnnnnnnnnnnnnnnnnnnnnnnnnnnnnnnnnnnnnnnnnnnnnnnnnnnnnnnnnnnnnnnnnnnnnnnnnnnnnnnnnnnnnnnnnnnnnnnnnnnnnnnnnnnnnnnnnnnnnnnnnnnnnnnnnnnnnnnnnnnnnnnnnnnnnnnnnnnnnnnnnnnnnnnnnnnnnnnnnnnnnnnnnnnnnnnnnnnnnnnnnnnnnnnnnnnnnnnnnnnnnnnnnnnnnnnnnnnnnnnnnnnnnnnnnnnnnnnnnnnnnnnnnnnnnnnnnnnnnnnnnnnnnnnnnnnnnnnnnnnnnnnnnnnnnnnnnnnnnnnnnnnnnnnnnnnnnnnnnnnnnnnnnnnnnnnnnnnnnnnnnnnnnnnnnnnnnnnnnnnnnnnnnnnnnnnnnnnnnnnnnnnnnnnnnnnnnnnnnnnnnnnnnnnnnnnnnnnnnnnnnnnnnnnnnnnnnnnnnnnnnnnnnnnnnnnnnnnnnnnnnnnnnnnnnnnnnnnnnnnnnnnnnnnnnnnnnnnnnnnnnnnnnnnnnnnnnnnnnnnnnnnnnnnnnnnnnnnnnnnnnnnnnnnnnnnnnnnnnnnnnnnnnnnnnnnnnnnnnnnnnnnnnnnnnnnnnnnnnnnnnnnnnnnnnnnnnnnnnnnnnnnnnnnnnnnnnnnnnnnnnnnnnnnnnnnnnnnnnnnnnnnnnnnnnnnnnnnnnnnnnnnnnnnnnnnnnnnnnnnnnnnnnnnnnnnnnnnnnnnnnnnnnnnnnnnnnnnnnnnnnnnnnnnnnnnnnnnnnnnnnnnnnnnnnnnnnnnnnnnnnnnnnnnnnnnnnnnnnnnnnnnnnnnnnnnnnnnnnnnnnnnnnnnnnnnnnnnnnnnnnnnnnnnnnnnnnnnnnnnnnnnnnnnnnnnnnnnnnnnnnnnnnnnnnnnnnnnnnnnnnnnnnnnnnnnnnnnnnnnnnnnnnnnnnnnnnnnnnnnnnnnnnnnnnnnnnnnnnnnnnnnnnnnnnnnnnnnnnnnnnnnnnnnnnnnnnnnnnnnnnnnnnnnnnnnnnnnnnnnnnnnnnnnnnnnnnnnnnnnnnnnnnnnnnnnnnnnnnnnnnnnnnnnnnnnnnnnnnnnnnnnnnnnnnnnnnnnnnnnnnnnnnnnnnnnnnnnnnnnnnnnnnnnnnnnnnnnnnnnnnnnnnnnnnnnnnnnnnnnnnnnnnnnnnnnnnnnnnnnnnnnnnnnnnnnnnnnnnnnnnnnnnnnnnnnnnnnnnnnnnnnnnnnnnnnnnnnnnnnnnnnnnnnnnnnnnnnnnnnnnnnnnnnnnnnnnnnnnnnnnnnnnnnnnnnnnnnnnnnnnnnnnnnnnnnnnnnnnnnnnnnnnnnnnnnnnnnnnnnnnnnnnnnnnnnnnnnnnnnnnnnnnnnnnnnnnnnnnnnnnnnnnnnnnnnnnnnnnnnnnnnnnnnnnnnnnnnnnnnnnnnnnnnnnnnnnnnnnnnnnnnnnnnnnnnnnnnnnnnnnnnnnnnnnnnnnnnnnnnnnnnnnnnnnnnnnnnnnnnnnnnnnnnnnnnnnnnnnnnnnnnnnnnnnnnnnnnnnnnnnnnnnnnnnnnnnnnnnnnnnnnnnnnnnnnnnnnnnnnnnnnnnnnnnnnnnnnnnnnnnnnnnnnnnnnnnnnnnnnnnnnnnnnnnnnnnnnnnnnnnnnnnnnnnnnnnnnnnnnnnnnnnnnnnnnnnnnnnnnnnnnnnnnnnnnnnnnnnnnnnnnnnnnnnnnnnnnnnnnnnnnnnnnnnnnnnnnnnnnnnnnnnnnnnnnnnnnnnnnnnnnnnnnnnnnnnnnnnnnnnnnnnnnnnnnnnnnnnnnnnnnnnnnnnnnnnnnnnnnnnnnnnnnnnnnnnnnnnnnnnnnnnnnnnnnnnnnnnnnnnnnnnnnnnnnnnnnnnnnnnnnnnnnnnnnnnnnnnnnnnnnnnnnnnnnnnnnnnnnnnnnnnnnnnnnnnnnnnnnnnnnnnnnnnnnnnnnnnnnnnnnnnnnnnnnnnnnnnnnnnnnnnnnnnnnnnnnnnnnnnnnnnnnnnnnnnnnnnnnnnnnnnnnnnnnnnnnnnnnnnnnnnnnnnnnnnnnnnnnnnnnnnnnnnnnnnnnnnnnnnnnnnnnnnnnnnnnnnnnnnnnnnnnnnnnnnnnnnnnnnnnnnnnnnnnnnnnnnnnnnnnnnnnnnnnnnnnnnnnnnnnnnnnnnnnnnnnnnnnnnnnnnnnnnnnnnnnnnnnnnnnnnnnnnnnnnnnnnnnnnnnnnnnnnnnnnnnnnnnnnnnnnnnnnnnnnnnnnnnnnnnnnnnnnnnnnnnnnnnnnnnnnnnnnnnnnnnnnnnnnnnnnnnnnnnnnnnnnnnnnnnnnnnnnnnnnnnnnnnnnnnnnnnnnnnnnnnnnnnnnnnnnnnnnnnnnnnnnnnnnnnnnnnnnnnnnnnnnnnnnnnnnnnnnnnnnnnnnnnnnnnnnnnnnnnnnnnnnnnnnnnnnnnnnnnnnnnnnnnnnnnnnnnnnnnnnnnnnnnnnnnnnnnnnnnnnnnnnnnnnnnnnnnnnnnnnnnnnnnnnnnnnnnnnnnnnnnnnnnnnnnnnnnnnnnnnnnnnnnnnnnnnnnnnnnnnnnnnnnnnnnnnnnnnnnnnnnnnnnnnnnnnnnnnnnnnnnnnnnnnnnnnnnnnnnnnnnnnnnnnnnnnnnnnnnnnnnnnnnnnnnnnnnnnnnnnnnnnnnnnnnnnnnnnnnnnnnnnnnnnnnnnnnnnnnnnnnnnnnnnnnnnnnnnnnnnnnnnnnnnnnnnnnnnnnnnnnnnnnnnnnnnnnnnnnnnnnnnnnnnnnnnnnnnnnnnnnnnnnnnnnnnnnnnnnnnnnnnnnnnnnnnnnnnnnnnnnnnnnnnnnnnnnnnnnnnnnnnnnnnnnnnnnnnnnnnnnnnnnnnnnnnnnnnnnnnnnnnnnnnnnnnnnnnnnnnnnnnnnnnnnnnnnnnnnnnnnnnnnnnnnnnnnnnnnnnnnnnnnnnnnnnnnnnnnnnnnnnnnnnnnnnnnnnnnnnnnnnnnnnnnnnnnnnnnnnnnnnnnnnnnnnnnnnnnnnnnnnnnnnnnnnnnnnnnnnnnnnnnnnnnnnnnnnnnnnnnnnnnnnnnnnnnnnnnnnnnnnnnnnnnnnnnnnnnnnnnnnnnnnnnnnnnnnnnnnnnnnnnnnnnnnnnnnnnnnnnnnnnnnnnnnnnnnnnnnnnnnnnnnnnnnnnnnnnnnnnnnnnnnnnnnnnnnnnnnnnnnnnnnnnnnnnnnnnnnnnnnnnnnnnnnnnnnnnnnnnnnnnnnnnnnnnnnnnnnnnnnnnnnnnnnnnnnnnnnnnnnnnnnnnnnnnnnnnnnnnnnnnnnnnnnnnnnnnnnnnnnnnnnnnnnnnnnnnnnnnnnnnnnnnnnnnnnnnnnnnnnnnnnnnnnnnnnnnnnnnnnnnnnnnnnnnnnnnnnnnnnnnnnnnnnnnnnnnnnnnnnnnnnnnnnnnnnnnnnnnnnnnnnnnnnnnnnnnnnnnnnnnnnnnnnnnnnnnnnnnnnnnnnnnnnnnnnnnnnnnnnnnnnnnnnnnnnnnnnnnnnnnnnnnnnnnnnnnnnnnnnnnnnnnnnnnnnnnnnnnnnnnnnnnnnnnnnnnnnnnnnnnnnnnnnnnnnnnnnnnnnnnnnnnnnnnnnnnnnnnnnnnnnnnnnnnnnnnnnnnnnnnnnnnnnnnnnnnnnnnnnnnnnnnnnnnnnnnnnnnnnnnnnnnnnnnnnnnnnnnnnnnnnnnnnnnnnnnnnnnnnnnnnnnnnnnnnnnnnnnnnnnnnnnnnnnnnnnnnnnnnnnnnnnnnnnnnnnnnnnnnnnnnnnnnnnnnnnnnnnnnnnnnnnnnnnnnnnnnnnnnnnnnnnnnnnnnnnnnnnnnnnnnnnnnnnnnnnnnnnnnnnnnnnnnnnnnnnnnnnnnnnnnnnnnnnnnnnnnnnnnnnnnnnnnnnnnnnnnnnnnnnnnnnnnnnnnnnnnnnnnnnnnnnnnnnnnnnnnnnnnnnnnnnnnnnnnnnnnnnnnnnnnnnnnnnnnnnnnnnnnnnnnnnnnnnnnnnnnnnnnnnnnnnnnnnnnnnnnnnnnnnnnnnnnnnnnnnnnnnnnnnnnnnnnnnnnnnnnnnnnnnnnnnnnnnnnnnnnnnnnnnnnnnnnnnnnnnnnnnnnnnnnnnnnnnnnnnnnnnnnnnnnnnnnnnnnnnnnnnnnnnnnnnnnnnnnnnnnnnnnnnnnnnnnnnnnnnnnnnnnnnnnnnnnnnnnnnnnnnnnnnnnnnnnnnnnnnnnnnnnnnnnnnnnnnnnnnnnnnnnnnnnnnnnnnnnnnnnnnnnnnnnnnnnnnnnnnnnnnnnnnnnnnnnnnnnnnnnnnnnnnnnnnnnnnnnnnnnnnnnnnnnnnnnnnnnnnnnnnnnnnnnnnnnnnnnnnnnnnnnnnnnnnnnnnnnnnnnnnnnnnnnnnnnnnnnnnnnnnnnnnnnnnnnnnnnnnnnnnnnnnnnnnnnnnnnnnnnnnnnnnnnnnnnnnnnnnnnnnnnnnnnnnnnnnnnnnnnnnnnnnnnnnnnnnnnnnnnnnnnnnnnnnnnnnnnnnnnnnnnnnnnnnnnnnnnnnnnnnnnnnnnnnnnnnnnnnnnnnnnnnnnnnnnnnnnnnnnnnnnnnnnnnnnnnnnnnnnnnnnnnnnnnnnnnnnnnnnnnnnnnnnnnnnnnnnnnnnnnnnnnnnnnnnnnnnnnnnnnnnnnnnnnnnnnnnnnnnnnnnnnnnnnnnnnnnnnnnnnnnnnnnnnnnnnnnnnnnnnnnnnnnnnnnnnnnnnnnnnnnnnnnnnnnnnnnnnnnnnnnnnnnnnnnnnnnnnnnnnnnnnnnnnnnnnnnnnnnnnnnnnnnnnnnnnnnnnnnnnnnnnnnnnnnnnnnnnnnnnnnnnnnnnnnnnnnnnnnnnnnnnnnnnnnnnnnnnnnnnnnnnnnnnnnnnnnnnnnnnnnnnnnnnnnnnnnnnnnnnnnnnnnnnnnnnnnnnnnnnnnnnnnnnnnnnnnnnnnnnnnnnnnnnnnnnnnnnnnnnnnnnnnnnnnnnnnnnnnnnnnnnnnnnnnnnnnnnnnnnnnnnnnnnnnnnnnnnnnnnnnnnnnnnnnnnnnnnnnnnnnnnnnnnnnnnnnnnnnnnnnnnnnnnnnnnnnnnnnnnnnnnnnnnnnnnnnnnnnnnnnnnnnnnnnnnnnnnnnnnnnnnnnnnnnnnnnnnnnnnnnnnnnnnnnnnnnnnnnnnnnnnnnnnnnnnnnnnnnnnnnnnnnnnnnnnnnnnnnnnnnnnnnnnnnnnnnnnnnnnnnnnnnnnnnnnnnnnnnnnnnnnnnnnnnnnnnnnnnnnnnnnnnnnnnnnnnnnnnnnnnnnnnnnnnnnnnnnnnnnnnnnnnnnnnnnnnnnnnnnnnnnnnnnnnnnnnnnnnnnnnnnnnnnnnnnnnnnnnnnnnnnnnnnnnnnnnnnnnnnnnnnnnnnnnnnnnnnnnnnnnnnnnnnnnnnnnnnnnnnnnnnnnnnnnnnnnnnnnnnnnnnnnnnnnnnnnnnnnnnnnnnnnnnnnnnnnnnnnnnnnnnnnnnnnnnnnnnnnnnnnnnnnnnnnnnnnnnnnnnnnnnnnnnnnnnnnnnnnnnnnnnnnnnnnnnnnnnnnnnnnnnnnnnnnnnnnnnnnnnnnnnnnnnnnnnnnnnnnnnnnnnnnnnnnnnnnnnnnnnnnnnnnnnnnnnnnnnnnnnnnnnnnnnnnnnnnnnnnnnnnnnnnnnnnnnnnnnnnnnnnnnnnnnnnnnnnnnnnnnnnnnnnnnnnnnnnnnnnnnnnnnnnnnnnnnnnnnnnnnnnnnnnnnnnnnnnnnnnnnnnnnnnnnnnnnnnnnnnnnnnnnnnnnnnnnnnnnnnnnnnnnnnnnnnnnnnnnnnnnnnnnnnnnnnnnnnnnnnnnnnnnnnnnnnnnnnnnnnnnnnnnnnnnnnnnnnnnnnnnnnnnnnnnnnnnnnnnnnnnnnnnnnnnnnnnnnnnnnnnnnnnnnnnnnnnnnnnnnnnnnnnnnnnnnnnnnnnnnnnnnnnnnnnnnnnnnnnnnnnnnnnnnnnnnnnnnnnnnnnnnnnnnnnnnnnnnnnnnnnnnnnnnnnnnnnnnnnnnnnnnnnnnnnnnnnnnnnnnnnnnnnnnnnnnnnnnnnnnnnnnnnnnnnnnnnnnnnnnnnnnnnnnnnnnnnnnnnnnnnnnnnnnnnnnnnnnnnnnnnnnnnnnnnnnnnnnnnnnnnnnnnnnnnnnnnnnnnnnnnnnnnnnnnnnnnnnnnnnnnnnnnnnnnnnnnnnnnnnnnnnnnnnnnnnnnnnnnnnnnnnnnnnnnnnnnnnnnnnnnnnnnnnnnnnnnnnnnnnnnnnnnnnnnnnnnnnnnnnnnnnnnnnnnnnnnnnnnnnnnnnnnnnnnnnnnnnnnnnnnnnnnnnnnnnnnnnnnnnnnnnnnnnnnnnnnnnnnnnnnnnnnnnnnnnnnnnnnnnnnnnnnnnnnnnnnnnnnnnnnnnnnnnnnnnnnnnnnnnnnnnnnnnnnnnnnnnnnnnnnnnnnnnnnnnnnnnnnnnnnnnnnnnnnnnnnnnnnnnnnnnnnnnnnnnnnnnnnnnnnnnnnnnnnnnnnnnnnnnnnnnnnnnnnnnnnnnnnnnnnnnnnnnnnnnnnnnnnnnnnnnnnnnnnnnnnnnnnnnnnnnnnnnnnnnnnnnnnnnnnnnnnnnnnnnnnnnnnnnnnnnnnnnnnnnnnnnnnnnnnnnnnnnnnnnnnnnnnnnnnnnnnnnnnnnnnnnnnnnnnnnnnnnnnnnnnnnnnnnnnnnnnnnnnnnnnnnnnnnnnnnnnnnnnnnnnnnnnnnnnnnnnnnnnnnnnnnnnnnnnnnnnnnnnnnnnnnnnnnnnnnnnnnnnnnnnnnnnnnnnnnnnnnnnnnnnnnnnnnnnnnnnnnnnnnnnnnnnnnnnnnnnnnnnnnnnnnnnnnnnnnnnnnnnnnnnnnnnnnnnnnnnnnnnnnnnnnnnnnnnnnnnnnnnnnnnnnnnnnnnnnnnnnnnnnnnnnnnnnnnnnnnnnnnnnnnnnnnnnnnnnnnnnnnnnnnnnnnnnnnnnnnnnnnnnnnnnnnnnnnnnnnnnnnnnnnnnnnnnnnnnnnnnnnnnnnnnnnnnnnnnnnnnnnnnnnnnnnnnnnnnnnnnnnnnnnnnnnnnnnnnnnnnnnnnnnnnnnnnnnnnnnnnnnnnnnnnnnnnnnnnnnnnnnnnnnnnnnnnnnnnnnnnnnnnnnnnnnnnnnnnnnnnnnnnnnnnnnnnnnnnnnnnnnnnnnnnnnnnnnnnnnnnnnnnnnnnnnnnnnnnnnnnnnnnnnnnnnnnnnnnnnnnnnnnnnnnnnnnnnnnnnnnnnnnnnnnnnnnnnnnnnnnnnnnnnnnnnnnnnnnnnnnnnnnnnnnnnnnnnnnnnnnnnnnnnnnnnnnnnnnnnnnnnnnnnnnnnnnnnnnnnnnnnnnnnnnnnnnnnnnnnnnnnnnnnnnnnnnnnnnnnnnnnnnnnnnnnnnnnnnnnnnnnnnnnnnnnnnnnnnnnnnnnnnnnnnnnnnnnnnnnnnnnnnnnnnnnnnnnnnnnnnnnnnnnnnnnnnnnnnnnnnnnnnnnnnnnnnnnnnnnnnnnnnnnnnnnnnnnnnnnnnnnnnnnnnnnnnnnnnnnnnnnnnnnnnnnnnnnnnnnnnnnnnnnnnnnnnnnnnnnnnnnnnnnnnnnnnnnnnnnnnnnnnnnnnnnnnnnnnnnnnnnnnnnnnnnnnnnnnnnnnnnnnnnnnnnnnnnnnnnnnnnnnnnnnnnnnnnnnnnnnnnnnnnnnnnnnnnnnnnnnnnnnnnnnnnnnnnnnnnnnnnnnnnnnnnnnnnnnnnnnnnnnnnnnnnnnnnnnnnnnnnnnnnnnnnnnnnnnnnnnnnnnnnnnnnnnnnnnnnnnnnnnnnnnnnnnnnnnnnnnnnnnnnnnnnnnnnnnnnnnnnnnnnnnnnnnnnnnnnnnnnnnnnnnnnnnnnnnnnnnnnnnnnnnnnnnnnnnnnnnnnnnnnnnnnnnnnnnnnnnnnnnnnnnnnnnnnnnnnnnnnnnnnnnnnnnnnnnnnnnnnnnnnnnnnnnnnnnnnnnnnnnnnnnnnnnnnnnnnnnnnnnnnnnnnnnnnnnnnnnnnnnnnnnnnnnnnnnnnnnnnnnnnnnnnnnnnnnnnnnnnnnnnnnnnnnnnnnnnnnnnnnnnnnnnnnnnnnnnnnnnnnnnnnnnnnnnnnnnnnnnnnnnnnnnnnnnnnnnnnnnnnnnnnnnnnnnnnnnnnnnnnnnnnnnnnnnnnnnnnnnnnnnnnnnnnnnnnnnnnnnnnnnnnnnnnnnnnnnnnnnnnnnnnnnnnnnnnnnnnnnnnnnnnnnnnnnnnnnnnnnnnnnnnnnnnnnnnnnnnnnnnnnnnnnnnnnnnnnnnnnnnnnnnnnnnnnnnnnnnnnnnnnnnnnnnnnnnnnnnnnnnnnnnnnnnnnnnnnnnnnnnnnnnnnnnnnnnnnnnnnnnnnnnnnnnnnnnnnnnnnnnnnnnnnnnnnnnnnnnnnnnnnnnnnnnnnnnnnnnnnnnnnnnnnnnnnnnnnnnnnnnnnnnnnnnnnnnnnnnnnnnnnnnnnnnnnnnnnnnnnnnnnnnnnnnnnnnnnnnnnnnnnnnnnnnnnnnnnnnnnnnnnnnnnnnnnnnnnnnnnnnnnnnnnnnnnnnnnnnnnnnnnnnnnnnnnnnnnnnnnnnnnnnnnnnnnnnnnnnnnnnnnnnnnnnnnnnnnnnnnnnnnnnnnnnnnnnnnnnnnnnnnnnnnnnnnnnnnnnnnnnnnnnnnnnnnnnnnnnnnnnnnnnnnnnnnnnnnnnnnnnnnnnnnnnnnnnnnnnnnnnnnnnnnnnnnnnnnnnnnnnnnnnnnnnnnnnnnnnnnnnnnnnnnnnnnnnnnnnnnnnnnnnnnnnnnnnnnnnnnnnnnnnnnnnnnnnnnnnnnnnnnnnnnnnnnnnnnnnnnnnnnnnnnnnnnnnnnnnnnnnnnnnnnnnnnnnnnnnnnnnnnnnnnnnnnnnnnnnnnnnnnnnnnnnnnnnnnnnnnnnnnnnnnnnnnnnnnnnnnnnnnnnnnnnnnnnnnnnnnnnnnnnnnnnnnnnnnnnnnnnnnnnnnnnnnnnnnnnnnnnnnnnnnnnnnnnnnnnnnnnnnnnnnnnnnnnnnnnnnnnnnnnnnnnnnnnnnnnnnnnnnnnnnnnnnnnnnnnnnnnnnnnnnnnnnnnnnnnnnnnnnnnnnnnnnnnnnnnnnnnnnnnnnnnnnnnnnnnnnnnnnnnnnnnnnnnnnnnnnnnnnnnnnnnnnnnnnnnnnnnnnnnnnnnnnnnnnnnnnnnnnnnnnnnnnnnnnnnnnnnnnnnnnnnnnnnnnnnnnnnnnnnnnnnnnnnnnnnnnnnnnnnnnnnnnnnnnnnnnnnnnnnnnnnnnnnnnnnnnnnnnnnnnnnnnnnnnnnnnnnnnnnnnnnnnnnnnnnnnnnnnnnnnnnnnnnnnnnnnnnnnnnnnnnnnnnnnnnnnnnnnnnnnnnnnnnnnnnnnnnnnnnnnnnnnnnnnnnnnnnnnnnnnnnnnnnnnnnnnnnnnnnnnnnnnnnnnnnnnnnnnnnnnnnnnnnnnnnnnnnnnnnnnnnnnnnnnnnnnnnnnnnnnnnnnnnnnnnnnnnnnnnnnnnnnnnnnnnnnnnnnnnnnnnnnnnnnnnnnnnnnnnnnnnnnnnnnnnnnnnnnnnnnnnnnnnnnnnnnnnnnnnnnnnnnnnnnnnnnnnnnnnnnnnnnnnnnnnnnnnnnnnnnnnnnnnnnnnnnnnnnnnnnnnnnnnnnnnnnnnnnnnnnnnnnnnnnnnnnnnnnnnnnnnnnnnnnnnnnnnnnnnnnnnnnnnnnnnnnnnnnnnnnnnnnnnnnnnnnnnnnnnnnnnnnnnnnnnnnnnnnnnnnnnnnnnnnnnnnnnnnnnnnnnnnnnnnnnnnnnnnnnnnnnnnnnnnnnnnnnnnnnnnnnnnnnnnnnnnnnnnnnnnnnnnnnnnnnnnnnnnnnnnnnnnnnnnnnnnnnnnnnnnnnnnnnnnnnnnnnnnnnnnnnnnnnnnnnnnnnnnnnnnnnnnnnnnnnnnnnnnnnnnnnnnnnnnnnnnnnnnnnnnnnnnnnnnnnnnnnnnnnnnnnnnnnnnnnnnnnnnnnnnnnnnnnnnnnnnnnnnnnnnnnnnnnnnnnnnnnnnnnnnnnnnnnnnnnnnnnnnnnnnnnnnnnnnnnnnnnnnnnnnnnnnnnnnnnnnnnnnnnnnnnnnnnnnnnnnnnnnnnnnnnnnnnnnnnnnnnnnnnnnnnnnnnnnnnnnnnnnnnnnnnnnnnnnnnnnnnnnnnnnnnnnnnnnnnnnnnnnnnnnnnnnnnnnnnnnnnnnnnnnnnnnnnnnnnnnnnnnnnnnnnnnnnnnnnnnnnnnnnnnnnnnnnnnnnnnnnnnnnnnnnnnnnnnnnnnnnnnnnnnnnnnnnnnnnnnnnnnnnnnnnnnnnnnnnnnnnnnnnnnnnnnnnnnnnnnnnnnnnnnnnnnnnnnnnnnnnnnnnnnnnnnnnnnnnnnnnnnnnnnnnnnnnnnnnnnnnnnnnnnnnnnnnnnnnnnnnnnnnnnnnnnnnnnnnnnnnnnnnnnnnnnnnnnnnnnnnnnnnnnnnnnnnnnnnnnnnnnnnnnnnnnnnnnnnnnnnnnnnnnnnnnnnnnnnnnnnnnnnnnnnnnnnnnnnnnnnnnnnnnnnnnnnnnnnnnnnnnnnnnnnnnnnnnnnnnnnnnnnnnnnnnnnnnnnnnnnnnnnnnnnnnnnnnnnnnnnnnnnnnnnnnnnnnnnnnnnnnnnnnnnnnnnnnnnnnnnnnnnnnnnnnnnnnnnnnnnnnnnnnnnnnnnnnnnnnnnnnnnnnnnnnnnnnnnnnnnnnnnnnnnnnnnnnnnnnnnnnnnnnnnnnnnnnnnnnnnnnnnnnnnnnnnnnnnnnnnnnnnnnnnnnnnnnnnnnnnnnnnnnnnnnnnnnnnnnnnnnnnnnnnnnnnnnnnnnnnnnnnnnnnnnnnnnnnnnnnnnnnnnnnnnnnnnnnnnnnnnnnnnnnnnnnnnnnnnnnnnnnnnnnnnnnnnnnnnnnnnnnnnnnnnnnnnnnnnnnnnnnnnnnnnnnnnnnnnnnnnnnnnnnnnnnnnnnnnnnnnnnnnnnnnnnnnnnnnnnnnnnnnnnnnnnnnnnnnnnnnnnnnnnnnnnnnnnnnnnnnnnnnnnnnnnnnnnnnnnnnnnnnnnnnnnnnnnnnnnnnnnnnnnnnnnnnnnnnnnnnnnnnnnnnnnnnnnnnnnnnnnnnnnnnnnnnnnnnnnnnnnnnnnnnnnnnnnnnnnnnnnnnnnnnnnnnnnnnnnnnnnnnnnnnnnnnnnnnnnnnnnnnnnnnnnnnnnnnnnnnnnnnnnnnnnnnnnnnnnnnnnnnnnnnnnnnnnnnnnnnnnnnnnnnnnnnnnnnnnnnnnnnnnnnnnnnnnnnnnnnnnnnnnnnnnnnnnnnnnnnnnnnnnnnnnnnnnnnnnnnnnnnnnnnnnnnnnnnnnnnnnnnnnnnnnnnnnnnnnnnnnnnnnnnnnnnnnnnnnnnnnnnnnnnnnnnnnnnnnnnnnnnnnnnnnnnnnnnnnnnnnnnnnnnnnnnnnnnnnnnnnnnnnnnnnnnnnnnnnnnnnnnnnnnnnnnnnnnnnnnnnnnnnnnnnnnnnnnnnnnnnnnnnnnnnnnnnnnnnnnnnnnnnnnnnnnnnnnnnnnnnnnnnnnnnnnnnnnnnnnnnnnnnnnnnnnnnnnnnnnnnnnnnnnnnnnnnnnnnnnnnnnnnnnnnnnnnnnnnnnnnnnnnnnnnnnnnnnnnnnnnnnnnnnnnnnnnnnnnnnnnnnnnnnnnnnnnnnnnnnnnnnnnnnnnnnnnnnnnnnnnnnnnnnnnnnnnnnnnnnnnnnnnnnnnnnnnnnnnnnnnnnnnnnnnnnnnnnnnnnnnnnnnnnnnnnnnnnnnnnnnnnnnnnnnnnnnnnnnnnnnnnnnnnnnnnnnnnnnnnnnnnnnnnnnnnnnnnnnnnnnnnnnnnnnnnnnnnnnnnnnnnnnnnnnnnnnnnnnnnnnnnnnnnnnnnnnnnnnnnnnnnnnnnnnnnnnnnnnnnnnnnnnnnnnnnnnnnnnnnnnnnnnnnnnnnnnnnnnnnnnnnnnnnnnnnnnnnnnnnnnnnnnnnnnnnnnnnnnnnnnnnnnnnnnnnnnnnnnnnnnnnnnnnnnnnnnnnnnnnnnnnnnnnnnnnnnnnnnnnnnnnnnnnnnnnnnnnnnnnnnnnnnnnnnnnnnnnnnnnnnnnnnnnnnnnnnnnnnnnnnnnnnnnnnnnnnnnnnnnnnnnnnnnnnnnnnnnnnnnnnnnnnnnnnnnnnnnnnnnnnnnnnnnnnnnnnnnnnnnnnnnnnnnnnnnnnnnnnnnnnnnnnnnnnnnnnnnnnnnnnnnnnnnnnnnnnnnnnnnnnnnnnnnnnnnnnnnnnnnnnnnnnnnnnnnnnnnnnnnnnnnnnnnnnnnnnnnnnnnnnnnnnnnnnnnnnnnnnnnnnnnnnnnnnnnnnnnnnnnnnnnnnnnnnnnnnnnnnnnnnnnnnnnnnnnnnnnnnnnnnnnnnnnnnnnnnnnnnnnnnnnnnnnnnnnnnnnnnnnnnnnnnnnnnnnnnnnnnnnnnnnnnnnnnnnnnnnnnnnnnnnnnnnnnnnnnnnnnnnnnnnnnnnnnnnnnnnnnnnnnnnnnnnnnnnnnnnnnnnnnnnnnnnnnnnnnnnnnnnnnnnnnnnnnnnnnnnnnnnnnnnnnnnnnnnnnnnnnnnnnnnnnnnnnnnnnnnnnnnnnnnnnnnnnnnnnnnnnnnnnnnnnnnnnnnnnnnnnnnnnnnnnnnnnnnnnnnnnnnnnnnnnnnnnnnnnnnnnnnnnnnnnnnnnnnnnnnnnnnnnnnnnnnnnnnnnnnnnnnnnnnnnnnnnnnnnnnnnnnnnnnnnnnnnnnnnnnnnnnnnnnnnnnnnnnnnnnnnnnnnnnnnnnnnnnnnnnnnnnnnnnnnnnnnnnnnnnnnnnnnnnnnnnnnnnnnnnnnnnnnnnnnnnnnnnnnnnnnnnnnnnnnnnnnnnnnnnnnnnnnnnnnnnnnnnnnnnnnnnnnnnnnnnnnnnnnnnnnnnnnnnnnnnnnnnnnnnnnnnnnnnnnnnnnnnnnnnnnnnnnnnnnnnnnnnnnnnnnnnnnnnnnnnnnnnnnnnnnnnnnnnnnnnnnnnnnnnnnnnnnnnnnnnnnnnnnnnnnnnnnnnnnnnnnnnnnnnnnnnnnnnnnnnnnnnnnnnnnnnnnnnnnnnnnnnnnnnnnnnnnnnnnnnnnnnnnnnnnnnnnnnnnnnnnnnnnnnnnnnnnnnnnnnnnnnnnnnnnnnnnnnnnnnnnnnnnnnnnnnnnnnnnnnnnnnnnnnnnnnnnnnnnnnnnnnnnnnnnnnnnnnnnnnnnnnnnnnnnnnnnnnnnnnnnnnnnnnnnnnnnnnnnnnnnnnnnnnnnnnnnnnnnnnnnnnnnnnnnnnnnnnnnnnnnnnnnnnnnnnnnnnnnnnnnnnnnnnnnnnnnnnnnnnnnnnnnnnnnnnnnnnnnnnnnnnnnnnnnnnnnnnnnnnnnnnnnnnnnnnnnnnnnnnnnnnnnnnnnnnnnnnnnnnnnnnnnnnnnnnnnnnnnnnnnnnnnnnnnnnnnnnnnnnnnnnnnnnnnnnnnnnnnnnnnnnnnnnnnnnnnnnnnnnnnnnnnnnnnnnnnnnnnnnnnnnnnnnnnnnnnnnnnnnnnnnnnnnnnnnnnnnnnnnnnnnnnnnnnnnnnnnnnnnnnnnnnnnnnnnnnnnnnnnnnnnnnnnnnnnnnnnnnnnnnnnnnnnnnnnnnnnnnnnnnnnnnnnnnnnnnnnnnnnnnnnnnnnnnnnnnnnnnnnnnnnnnnnnnnnnnnnnnnnnnnnnnnnnnnnnnnnnnnnnnnnnnnnnnnnnnnnnnnnnnnnnnnnnnnnnnnnnnnnnnnnnnnnnnnnnnnnnnnnnnnnnnnnnnnnnnnnnnnnnnnnnnnnnnnnnnnnnnnnnnnnnnnnnnnnnnnnnnnnnnnnnnnnnnnnnnnnnnnnnnnnnnnnnnnnnnnnnnnnnnnnnnnnnnnnnnnnnnnnnnnnnnnnnnnnnnnnnnnnnnnnnnnnnnnnnnnnnnnnnnnnnnnnnnnnnnnnnnnnnnnnnnnnnnnnnnnnnnnnnnnnnnnnnnnnnnnnnnnnnnnnnnnnnnnnnnnnnnnnnnnnnnnnnnnnnnnnnnnnnnnnnnnnnnnnnnnnnnnnnnnnnnnnnnnnnnnnnnnnnnnnnnnnnnnnnnnnnnnnnnnnnnnnnnnnnnnnnnnnnnnnnnnnnnnnnnnnnnnnnnnnnnnnnnnnnnnnnnnnnnnnnnnnnnnnnnnnnnnnnnnnnnnnnnnnnnnnnnnnnnnnnnnnnnnnnnnnnnnnnnnnnnnnnnnnnnnnnnnnnnnnnnnnnnnnnnnnnnnnnnnnnnnnnnnnnnnnnnnnnnnnnnnnnnnnnnnnnnnnnnnnnnnnnnnnnnnnnnnnnnnnnnnnnnnnnnnnnnnnnnnnnnnnnnnnnnnnnnnnnnnnnnnnnnnnnnnnnnnnnnnnnnnnnnnnnnnnnnnnnnnnnnnnnnnnnnnnnnnnnnnnnnnnnnnnnnnnnnnnnnnnnnnnnnnnnnnnnnnnnnnnnnnnnnnnnnnnnnnnnnnnnnnnnnnnnnnnnnnnnnnnnnnnnnnnnnnnnnnnnnnnnnnnnnnnnnnnnnnnnnnnnnnnnnnnnnnnnnnnnnnnnnnnnnnnnnnnnnnnnnnnnnnnnnnnnnnnnnnnnnnnnnnnnnnnnnnnnnnnnnnnnnnnnnnnnnnnnnnnnnnnnnnnnnnnnnnnnnnnnnnnnnnnnnnnnnnnnnnnnnnnnnnnnnnnnnnnnnnnnnnnnnnnnnnnnnnnnnnnnnnnnnnnnnnnnnnnnnnnnnnnnnnnnnnnnnnnnnnnnnnnnnnnnnnnnnnnnnnnnnnnnnnnnnnnnnnnnnnnnnnnnnnnnnnnnnnnnnnnnnnnnnnnnnnnnnnnnnnnnnnnnnnnnnnnnnnnnnnnnnnnnnnnnnnnnnnnnnnnnnnnnnnnnnnnnnnnnnnnnnnnnnnnnnnnnnnnnnnnnnnnnnnnnnnnnnnnnnnnnnnnnnnnnnnnnnnnnnnnnnnnnnnnnnnnnnnnnnnnnnnnnnnnnnnnnnnnnnnnnnnnnnnnnnnnnnnnnnnnnnnnnnnnnnnnnnnnnnnnnnnnnnnnnnnnnnnnnnnnnnnnnnnnnnnnnnnnnnnnnnnnnnnnnnnnnnnnnnnnnnnnnnnnnnnnnnnnnnnnnnnnnnnnnnnnnnnnnnnnnnnnnnnnnnnnnnnnnnnnnnnnnnnnnnnnnnnnnnnnnnnnnnnnnnnnnnnnnnnnnnnnnnnnnnnnnnnnnnnnnnnnnnnnnnnnnnnnnnnnnnnnnnnnnnnnnnnnnnnnnnnnnnnnnnnnnnnnnnnnnnnnnnnnnnnnnnnnnnnnnnnnnnnnnnnnnnnnnnnnnnnnnnnnnnnnnnnnnnnnnnnnnnnnnnnnnnnnnnnnnnnnnnnnnnnnnnnnnnnnnnnnnnnnnnnnnnnnnnnnnnnnnnnnnnnnnnnnnnnnnnnnnnnnnnnnnnnnnnnnnnnnnnnnnnnnnnnnnnnnnnnnnnnnnnnnnnnnnnnnnnnnnnnnnnnnnnnnnnnnnnnnnnnnnnnnnnnnnnnnnnnnnnnnnnnnnnnnnnnnnnnnnnnnnnnnnnnnnnnnnnnnnnnnnnnnnnnnnnnnnnnnnnnnnnnnnnnnnnnnnnnnnnnnnnnnnnnnnnnnnnnnnnnnnnnnnnnnnnnnnnnnnnnnnnnnnnnnnnnnnnnnnnnnnnnnnnnnnnnnnnnnnnnnnnnnnnnnnnnnnnnnnnnnnnnnnnnnnnnnnnnnnnnnnnnnnnnnnnnnnnnnnnnnnnnnnnnnnnnnnnnnnnnnnnnnnnnnnnnnnnnnnnnnnnnnnnnnnnnnnnnnnnnnnnnnnnnnnnnnnnnnnnnnnnnnnnnnnnnnnnnnnnnnnnnnnnnnnnnnnnnnnnnnnnnnnnnnnnnnnnnnnnnnnnnnnnnnnnnnnnnnnnnnnnnnnnnnnnnnnnnnnnnnnnnnnnnnnnnnnnnnnnnnnnnnnnnnnnnnnnnnnnnnnnnnnnnnnnnnnnnnnnnnnnnnnnnnnnnnnnnnnnnnnnnnnnnnnnnnnnnnnnnnnnnnnnnnnnnnnnnnnnnnnnnnnnnnnnnnnnnnnnnnnnnnnnnnnnnnnnnnnnnnnnnnnnnnnnnnnnnnnnnnnnnnnnnnnnnnnnnnnnnnnnnnnnnnnnnnnnnnnnnnnnnnnnnnnnnnnnnnnnnnnnnnnnnnnnnnnnnnnnnnnnnnnnnnnnnnnnnnnnnnnnnnnnnnnnnnnnnnnnnnnnnnnnnnnnnnnnnnnnnnnnnnnnnnnnnnnnnnnnnnnnnnnnnnnnnnnnnnnnnnnnnnnnnnnnnnnnnnnnnnnnnnnnnnnnnnnnnnnnnnnnnnnnnnnnnnnnnnnnnnnnnnnnnnnnnnnnnnnnnnnnnnnnnnnnnnnnnnnnnnnnnnnnnnnnnnnnnnnnnnnnnnnnnnnnnnnnnnnnnnnnnnnnnnnnnnnnnnnnnnnnnnnnnnnnnnnnnnnnnnnnnnnnnnnnnnnnnnnnnnnnnnnnnnnnnnnnnnnnnnnnnnnnnnnnnnnnnnnnnnnnnnnnnnnnnnnnnnnnnnnnnnnnnnnnnnnnnnnnnnnnnnnnnnnnnnnnnnnnnnnnnnnnnnnnnnnnnnnnnnnnnnnnnnnnnnnnnnnnnnnnnnnnnnnnnnnnnnnnnnnnnnnnnnnnnnnnnnnnnnnnnnnnnnnnnnnnnnnnnnnnnnnnnnnnnnnnnnnnnnnnnnnnnnnnnnnnnnnnnnnnnnnnnnnnnnnnnnnnnnnnnnnnnnnnnnnnnnnnnnnnnnnnnnnnnnnnnnnnnnnnnnnnnnnnnnnnnnnnnnnnnnnnnnnnnnnnnnnnnnnnnnnnnnnnnnnnnnnnnnnnnnnnnnnnnnnnnnnnnnnnnnnnnnnnnnnnnnnnnnnnnnnnnnnnnnnnnnnnnnnnnnnnnnnnnnnnnnnnnnnnnnnnnnnnnnnnnnnnnnnnnnnnnnnnnnnnnnnnnnnnnnnnnnnnnnnnnnnnnnnnnnnnnnnnnnnnnnnnnnnnnnnnnnnnnnnnnnnnnnnnnnnnnnnnnnnnnnnnnnnnnnnnnnnnnnnnnnnnnnnnnnnnnnnnnnnnnnnnnnnnnnnnnnnnnnnnnnnnnnnnnnnnnnnnnnnnnnnnnnnnnnnnnnnnnnnnnnnnnnnnnnnnnnnnnnnnnnnnnnnnnnnnnnnnnnnnnnnnnnnnnnnnnnnnnnnnnnnnnnnnnnnnnnnnnnnnnnnnnnnnnnnnnnnnnnnnnnnnnnnnnnnnnnnnnnnnnnnnnnnnnnnnnnnnnnnnnnnnnnnnnnnnnnnnnnnnnnnnnnnnnnnnnnnnnnnnnnnnnnnnnnnnnnnnnnnnnnnnnnnnnnnnnnnnnnnnnnnnnnnnnnnnnnnnnnnnnnnnnnnnnnnnnnnnnnnnnnnnnnnnnnnnnnnnnnnnnnnnnnnnnnnnnnnnnnnnnnnnnnnnnnnnnnnnnnnnnnnnnnnnnnnnnnnnnnnnnnnnnnnnnnnnnnnnnnnnnnnnnnnnnnnnnnnnnnnnnnnnnnnnnnnnnnnnnnnnnnnnnnnnnnnnnnnnnnnnnnnnnnnnnnnnnnnnnnnnnnnnnnnnnnnnnnnnnnnnnnnnnnnnnnnnnnnnnnnnnnnnnnnnnnnnnnnnnnnnnnnnnnnnnnnnnnnnnnnnnnnnnnnnnnnnnnnnnnnnnnnnnnnnnnnnnnnnnnnnnnnnnnnnnnnnnnnnnnnnnnnnnnnnnnnnnnnnnnnnnnnnnnnnnnnnnnnnnnnnnnnnnnnnnnnnnnnnnnnnnnnnnnnnnnnnnnnnnnnnnnnnnnnnnnnnnnnnnnnnnnnnnnnnnnnnnnnnnnnnnnnnnnnnnnnnnnnnnnnnnnnnnnnnnnnnnnnnnnnnnnnnnnnnnnnnnnnnnnnnnnnnnnnnnnnnnnnnnnnnnnnnnnnnnnnnnnnnnnnnnnnnnnnnnnnnnnnnnnnnnnnnnnnnnnnnnnnnnnnnnnnnnnnnnnnnnnnnnnnnnnnnnnnnnnnnnnnnnnnnnnnnnnnnnnnnnnnnnnnnnnnnnnnnnnnnnnnnnnnnnnnnnnnnnnnnnnnnnnnnnnnnnnnnnnnnnnnnnnnnnnnnnnnnnnnnnnnnnnnnnnnnnnnnnnnnnnnnnnnnnnnnnnnnnnnnnnnnnnnnnnnnnnnnnnnnnnnnnnnnnnnnnnnnnnnnnnnnnnnnnnnnnnnnnnnnnnnnnnnnnnnnnnnnnnnnnnnnnnnnnnnnnnnnnnnnnnnnnnnnnnnnnnnnnnnnnnnnnnnnnnnnnnnnnnnnnnnnnnnnnnnnnnnnnnnnnnnnnnnnnnnnnnnnnnnnnnnnnnnnnnnnnnnnnnnnnnnnnnnnnnnnnnnnnnnnnnnnnnnnnnnnnnnnnnnnnnnnnnnnnnnnnnnnnnnnnnnnnnnnnnnnnnnnnnnnnnnnnnnnnnnnnnnnnnnnnnnnnnnnnnnnnnnnnnnnnnnnnnnnnnnnnnnnnnnnnnnnnnnnnnnnnnnnnnnnnnnnnnnnnnnnnnnnnnnnnnnnnnnnnnnnnnnnnnnnnnnnnnnnnnnnnnnnnnnnnnnnnnnnnnnnnnnnnnnnnnnnnnnnnnnnnnnnnnnnnnnnnnnnnnnnnnnnnnnnnnnnnnnnnnnnnnnnnnnnnnnnnnnnnnnnnnnnnnnnnnnnnnnnnnnnnnnnnnnnnnnnnnnnnnnnnnnnnnnnnnnnnnnnnnnnnnnnnnnnnnnnnnnnnnnnnnnnnnnnnnnnnnnnnnnnnnnnnnnnnnnnnnnnnnnnnnnnnnnnnnnnnnnnnnnnnnnnnnnnnnnnnnnnnnnnnnnnnnnnnnnnnnnnnnnnnnnnnnnnnnnnnnnnnnnnnnnnnnnnnnnnnnnnnnnnnnnnnnnnnnnnnnnnnnnnnnnnnnnnnnnnnnnnnnnnnnnnnnnnnnnnnnnnnnnnnnnnnnnnnnnnnnnnnnnnnnnnnnnnnnnnnnnnnnnnnnnnnnnnnnnnnnnnnnnnnnnnnnnnnnnnnnnnnnnnnnnnnnnnnnnnnnnnnnnnnnnnnnnnnnnnnnnnnnnnnnnnnnnnnnnnnnnnnnnnnnnnnnnnnnnnnnnnnnnnnnnnnnnnnnnnnnnnnnnnnnnnnnnnnnnnnnnnnnnnnnnnnnnnnnnnnnnnnnnnnnnnnnnnnnnnnnnnnnnnnnnnnnnnnnnnnnnnnnnnnnnnnnnnnnnnnnnnnnnnnnnnnnnnnnnnnnnnnnnnnnnnnnnnnnnnnnnnnnnnnnnnnnnnnnnnnnnnnnnnnnnnnnnnnnnnnnnnnnnnnnnnnnnnnnnnnnnnnnnnnnnnnnnnnnnnnnnnnnnnnnnnnnnnnnnnnnnnnnnnnnnnnnnnnnnnnnnnnnnnnnnnnnnnnnnnnnnnnnnnnnnnnnnnnnnnnnnnnnnnnnnnnnnnnnnnnnnnnnnnnnnnnnnnnnnnnnnnnnnnnnnnnnnnnnnnnnnnnnnnnnnnnnnnnnnnnnnnnnnnnnnnnnnnnnnnnnnnnnnnnnnnnnnnnnnnnnnnnnnnnnnnnnnnnnnnnnnnnnnnnnnnnnnnnnnnnnnnnnnnnnnnnnnnnnnnnnnnnnnnnnnnnnnnnnnnnnnnnnnnnnnnnnnnnnnnnnnnnnnnnnnnnnnnnnnnnnnnnnnnnnnnnnnnnnnnnnnnnnnnnnnnnnnnnnnnnnnnnnnnnnnnnnnnnnnnnnnnnnnnnnnnnnnnnnnnnnnnnnnnnnnnnnnnnnnnnnnnnnnnnnnnnnnnnnnnnnnnnnnnnnnnnnnnnnnnnnnnnnnnnnnnnnnnnnnnnnnnnnnnnnnnnnnnnnnnnnnnnnnnnnnnnnnnnnnnnnnnnnnnnnnnnnnnnnnnnnnnnnnnnnnnnnnnnnnnnnnnnnnnnnnnnnnnnnnnnnnnnnnnnnnnnnnnnnnnnnnnnnnnnnnnnnnnnnnnnnnnnnnnnnnnnnnnnnnnnnnnnnnnnnnnnnnnnnnnnnnnnnnnnnnnnnnnnnnnnnnnnnnnnnnnnnnnnnnnnnnnnnnnnnnnnnnnnnnnnnnnnnnnnnnnnnnnnnnnnnnnnnnnnnnnnnnnnnnnnnnnnnnnnnnnnnnnnnnnnnnnnnnnnnnnnnnnnnnnnnnnnnnnnnnnnnnnnnnnnnnnnnnnnnnnnnnnnnnnnnnnnnnnnnnnnnnnnnnnnnnnnnnnnnnnnnnnnnnnnnnnnnnnnnnnnnnnnnnnnnnnnnnnnnnnnnnnnnnnnnnnnnnnnnnnnnnnnnnnnnnnnnnnnnnnnnnnnnnnnnnnnnnnnnnnnnnnnnnnnnnnnnnnnnnnnnnnnnnnnnnnnnnnnnnnnnnnnnnnnnnnnnnnnnnnnnnnnnnnnnnnnnnnnnnnnnnnnnnnnnnnnnnnnnnnnnnnnnnnnnnnnnnnnnnnnnnnnnnnnnnnnnnnnnnnnnnnnnnnnnnnnnnnnnnnnnnnnnnnnnnnnnnnnnnnnnnnnnnnnnnnnnnnnnnnnnnnnnnnnnnnnnnnnnnnnnnnnnnnnnnnnnnnnnnnnnnnnnnnnnnnnnnnnnnnnnnnnnnnnnnnnnnnnnnnnnnnnnnnnnnnnnnnnnnnnnnnnnnnnnnnnnnnnnnnnnnnnnnnnnnnnnnnnnnnnnnnnnnnnnnnnnnnnnnnnnnnnnnnnnnnnnnnnnnnnnnnnnnnnnnnnnnnnnnnnnnnnnnnnnnnnnnnnnnnnnnnnnnnnnnnnnnnnnnnnnnnnnnnnnnnnnnnnnnnnnnnnnnnnnnnnnnnnnnnnnnnnnnnnnnnnnnnnnnnnnnnnnnnnnnnnnnnnnnnnnnnnnnnnnnnnnnnnnnnnnnnnnnnnnnnnnnnnnnnnnnnnnnnnnnnnnnnnnnnnnnnnnnnnnnnnnnnnnnnnnnnnnnnnnnnnnnnnnnnnnnnnnnnnnnnnnnnnnnnnnnnnnnnnnnnnnnnnnnnnnnnnnnnnnnnnnnnnnnnnnnnnnnnnnnnnnnnnnnnnnnnnnnnnnnnnnnnnnnnnnnnnnnnnnnnnnnnnnnnnnnnnnnnnnnnnnnnnnnnnnnnnnnnnnnnnnnnnnnnnnnnnnnnnnnnnnnnnnnnnnnnnnnnnnnnnnnnnnnnnnnnnnnnnnnnnnnnnnnnnnnnnnnnnnnnnnnnnnnnnnnnnnnnnnnnnnnnnnnnnnnnnnnnnnnnnnnnnnnnnnnnnnnnnnnnnnnnnnnnnnnnnnnnnnnnnnnnnnnnnnnnnnnnnnnnnnnnnnnnnnnnnnnnnnnnnnnnnnnnnnnnnnnnnnnnnnnnnnnnnnnnnnnnnnnnnnnnnnnnnnnnnnnnnnnnnnnnnnnnnnnnnnnnnnnnnnnnnnnnnnnnnnnnnnnnnnnnnnnnnnnnnnnnnnnnnnnnnnnnnnnnnnnnnnnnnnnnnnnnnnnnnnnnnnnnnnnnnnnnnnnnnnnnnnnnnnnnnnnnnnnnnnnnnnnnnnnnnnnnnnnnnnnnnnnnnnnnnnnnnnnnnnnnnnnnnnnnnnnnnnnnnnnnnnnnnnnnnnnnnnnnnnnnnnnnnnnnnnnnnnnnnnnnnnnnnnnnnnnnnnnnnnnnnnnnnnnnnnnnnnnnnnnnnnnnnnnnnnnnnnnnnnnnnnnnnnnnnnnnnnnnnnnnnnnnnnnnnnnnnnnnnnnnnnnnnnnnnnnnnnnnnnnnnnnnnnnnnnnnnnnnnnnnnnnnnnnnnnnnnnnnnnnnnnnnnnnnnnnnnnnnnnnnnnnnnnnnnnnnnnnnnnnnnnnnnnnnnnnnnnnnnnnnnnnnnnnnnnnnnnnnnnnnnnnnnnnnnnnnnnnnnnnnnnnnnnnnnnnnnnnnnnnnnnnnnnnnnnnnnnnnnnnnnnnnnnnnnnnnnnnnnnnnnnnnnnnnnnnnnnnnnnnnnnnnnnnnnnnnnnnnnnnnnnnnnnnnnnnnnnnnnnnnnnnnnnnnnnnnnnnnnnnnnnnnnnnnnnnnnnnnnnnnnnnnnnnnnnnnnnnnnnnnnnnnnnnnnnnnnnnnnnnnnnnnnnnnnnnnnnnnnnnnnnnnnnnnnnnnnnnnnnnnnnnnnnnnnnnnnnnnnnnnnnnnnnnnnnnnnnnnnnnnnnnnnnnnnnnnnnnnnnnnnnnnnnnnnnnnnnnnnnnnnnnnnnnnnnnnnnnnnnnnnnnnnnnnnnnnnnnnnnnnnnnnnnnnnnnnnnnnnnnnnnnnnnnnnnnnnnnnnnnnnnnnnnnnnnnnnnnnnnnnnnnnnnnnnnnnnnnnnnnnnnnnnnnnnnnnnnnnnnnnnnnnnnnnnnnnnnnnnnnnnnnnnnnnnnnnnnnnnnnnnnnnnnnnnnnnnnnnnnnnnnnnnnnnnnnnnnnnnnnnnnnnnnnnnnnnnnnnnnnnnnnnnnnnnnnnnnnnnnnnnnnnnnnnnnnnnnnnnnnnnnnnnnnnnnnnnnnnnnnnnnnnnnnnnnnnnnnnnnnnnnnnnnnnnnnnnnnnnnnnnnnnnnnnnnnnnnnnnnnnnnnnnnnnnnnnnnnnnnnnnnnnnnnnnnnnnnnnnnnnnnnnnnnnnnnnnnnnnnnnnnnnnnnnnnnnnnnnnnnnnnnnnnnnnnnnnnnnnnnnnnnnnnnnnnnnnnnnnnnnnnnnnnnnnnnnnnnnnnnnnnnnnnnnnnnnnnnnnnnnnnnnnnnnnnnnnnnnnnnnnnnnnnnnnnnnnnnnnnnnnnnnnnnnnnnnnnnnnnnnnnnnnnnnnnnnnnnnnnnnnnnnnnnnnnnnnnnnnnnnnnnnnnnnnnnnnnnnnnnnnnnnnnnnnnnnnnnnnnnnnnnnnnnnnnnnnnnnnnnnnnnnnnnnnnnnnnnnnnnnnnnnnnnnnnnnnnnnnnnnnnnnnnnnnnnnnnnnnnnnnnnnnnnnnnnnnnnnnnnnnnnnnnnnnnnnnnnnnnnnnnnnnnnnnnnnnnnnnnnnnnnnnnnnnnnnnnnnnnnnnnnnnnnnnnnnnnnnnnnnnnnnnnnnnnnnnnnnnnnnnnnnnnnnnnnnnnnnnnnnnnnnnnnnnnnnnnnnnnnnnnnnnnnnnnnnnnnnnnnnnnnnnnnnnnnnnnnnnnnnnnnnnnnnnnnnnnnnnnnnnnnnnnnnnnnnnnnnnnnnnnnnnnnnnnnnnnnnnnnnnnnnnnnnnnnnnnnnnnnnnnnnnnnnnnnnnnnnnnnnnnnnnnnnnnnnnnnnnnnnnnnnnnnnnnnnnnnnnnnnnnnnnnnnnnnnnnnnnnnnnnnnnnnnnnnnnnnnnnnnnnnnnnnnnnnnnnnnnnnnnnnnnnnnnnnnnnnnnnnnnnnnnnnnnnnnnnnnnnnnnnnnnnnnnnnnnnnnnnnnnnnnnnnnnnnnnnnnnnnnnnnnnnnnnnnnnnnnnnnnnnnnnnnnnnnnnnnnnnnnnnnnnnnnnnnnnnnnnnnnnnnnnnnnnnnnnnnnnnnnnnnnnnnnnnnnnnnnnnnnnnnnnnnnnnnnnnnnnnnnnnnnnnnnnnnnnnnnnnnnnnnnnnnnnnnnnnnnnnnnnnnnnnnnnnnnnnnnnnnnnnnnnnnnnnnnnnnnnnnnnnnnnnnnnnnnnnnnnnnnnnnnnnnnnnnnnnnnnnnnnnnnnnnnnnnnnnnnnnnnnnnnnnnnnnnnnnnnnnnnnnnnnnnnnnnnnnnnnnnnnnnnnnnnnnnnnnnnnnnnnnnnnnnnnnnnnnnnnnnnnnnnnnnnnnnnnnnnnnnnnnnnnnnnnnnnnnnnnnnnnnnnnnnnnnnnnnnnnnnnnnnnnnnnnnnnnnnnnnnnnnnnnnnnnnnnnnnnnnnnnnnnnnnnnnnnnnnnnnnnnnnnnnnnnnnnnnnnnnnnnnnnnnnnnnnnnnnnnnnnnnnnnnnnnnnnnnnnnnnnnnnnnnnnnnnnnnnnnnnnnnnnnnnnnnnnnnnnnnnnnnnnnnnnnnnnnnnnnnnnnnnnnnnnnnnnnnnnnnnnnnnnnnnnnnnnnnnnnnnnnnnnnnnnnnnnnnnnnnnnnnnnnnnnnnnnnnnnnnnnnnnnnnnnnnnnnnnnnnnnnnnnnnnnnnnnnnnnnnnnnnnnnnnnnnnnnnnnnnnnnnnnnnnnnnnnnnnnnnnnnnnnnnnnnnnnnnnnnnnnnnnnnnnnnnnnnnnnnnnnnnnnnnnnnnnnnnnnnnnnnnnnnnnnnnnnnnnnnnnnnnnnnnnnnnnnnnnnnnnnnnnnnnnnnnnnnnnnnnnnnnnnnnnnnnnnnnnnnnnnnnnnnnnnnnnnnnnnnnnnnnnnnnnnnnnnnnnnnnnnnnnnnnnnnnnnnnnnnnnnnnnnnnnnnnnnnnnnnnnnnnnnnnnnnnnnnnnnnnnnnnnnnnnnnnnnnnnnnnnnnnnnnnnnnnnnnnnnnnnnnnnnnnnnnnnnnnnnnnnnnnnnnnnnnnnnnnnnnnnnnnnnnnnnnnnnnnnnnnnnnnnnnnnnnnnnnnnnnnnnnnnnnnnnnnnnnnnnnnnnnnnnnnnnnnnnnnnnnnnnnnnnnnnnnnnnnnnnnnnnnnnnnnnnnnnnnnnnnnnnnnnnnnnnnnnnnnnnnnnnnnnnnnnnnnnnnnnnnnnnnnnnnnnnnnnnnnnnnnnnnnnnnnnnnnnnnnnnnnnnnnnnnnnnnnnnnnnnnnnnnnnnnnnnnnnnnnnnnnnnnnnnnnnnnnnnnnnnnnnnnnnnnnnnnnnnnnnnnnnnnnnnnnnnnnnnnnnnnnnnnnnnnnnnnnnnnnnnnnnnnnnnnnnnnnnnnnnnnnnnnnnnnnnnnnnnnnnnnnnnnnnnnnnnnnnnnnnnnnnnnnnnnnnnnnnnnnnnnnnnnnnnnnnnnnnnnnnnnnnnnnnnnnnnnnnnnnnnnnnnnnnnnnnnnnnnnnnnnnnnnnnnnnnnnnnnnnnnnnnnnnnnnnnnnnnnnnnnnnnnnnnnnnnnnnnnnnnnnnnnnnnnnnnnnnnnnnnnnnnnnnnnnnnnnnnnnnnnnnnnnnnnnnnnnnnnnnnnnnnnnnnnnnnnnnnnnnnnnnnnnnnnnnnnnnnnnnnnnnnnnnnnnnnnnnnnnnnnnnnnnnnnnnnnnnnnnnnnnnnnnnnnnnnnnnnnnnnnnnnnnnnnnnnnnnnnnnnnnnnnnnnnnnnnnnnnnnnnnnnnnnnnnnnnnnnnnnnnnnnnnnnnnnnnnnnnnnnnnnnnnnnnnnnnnnnnnnnnnnnnnnnnnnnnnnnnnnnnnnnnnnnnnnnnnnnnnnnnnnnnnnnnnnnnnnnnnnnnnnnnnnnnnnnnnnnnnnnnnnnnnnnnnnnnnnnnnnnnnnnnnnnnnnnnnnnnnnnnnnnnnnnnnnnnnnnnnnnnnnnnnnnnnnnnnnnnnnnnnnnnnnnnnnnnnnnnnnnnnnnnnnnnnnnnnnnnnnnnnnnnnnnnnnnnnnnnnnnnnnnnnnnnnnnnnnnnnnnnnnnnnnnnnnnnnnnnnnnnnnnnnnnnnnnnnnnnnnnnnnnnnnnnnnnnnnnnnnnnnnnnnnnnnnnnnnnnnnnnnnnnnnnnnnnnnnnnnnnnnnnnnnnnnnnnnnnnnnnnnnnnnnnnnnnnnnnnnnnnnnnnnnnnnnnnnnnnnnnnnnnnnnnnnnnnnnnnnnnnnnnnnnnnnnnnnnnnnnnnnnnnnnnnnnnnnnnnnnnnnnnnnnnnnnnnnnnnnnnnnnnnnnnnnnnnnnnnnnnnnnnnnnnnnnnnnnnnnnnnnnnnnnnnnnnnnnnnnnnnnnnnnnnnnnnnnnnnnnnnnnnnnnnnnnnnnnnnnnnnnnnnnnnnnnnnnnnnnnnnnnnnnnnnnnnnnnnnnnnnnnnnnnnnnnnnnnnnnnnnnnnnnnnnnnnnnnnnnnnnnnnnnnnnnnnnnnnnnnnnnnnnnnnnnnnnnnnnnnnnnnnnnnnnnnnnnnnnnnnnnnnnnnnnnnnnnnnnnnnnnnnnnnnnnnnnnnnnnnnnnnnnnnnnnnnnnnnnnnnnnnnnnnnnnnnnnnnnnnnnnnnnnnnnnnnnnnnnnnnnnnnnnnnnnnnnnnnnnnnnnnnnnnnnnnnnnnnnnnnnnnnnnnnnnnnnnnnnnnnnnnnnnnnnnnnnnnnnnnnnnnnnnnnnnnnnnnnnnnnnnnnnnnnnnnnnnnnnnnnnnnnnnnnnnnnnnnnnnnnnnnnnnnnnnnnnnnnnnnnnnnnnnnnnnnnnnnnnnnnnnnnnnnnnnnnnnnnnnnnnnnnnnnnnnnnnnnnnnnnnnnnnnnnnnnnnnnnnnnnnnnnnnnnnnnnnnnnnnnnnnnnnnnnnnnnnnnnnnnnnnnnnnnnnnnnnnnnnnnnnnnnnnnnnnnnnnnnnnnnnnnnnnnnnnnnnnnnnnnnnnnnnnnnnnnnnnnnnnnnnnnnnnnnnnnnnnnnnnnnnnnnnnnnnnnnnnnnnnnnnnnnnnnnnnnnnnnnnnnnnnnnnnnnnnnnnnnnnnnnnnnnnnnnnnnnnnnnnnnnnnnnnnnnnnnnnnnnnnnnnnnnnnnnnnnnnnnnnnnnnnnnnnnnnnnnnnnnnnnnnnnnnnnnnnnnnnnnnnnnnnnnnnnnnnnnnnnnnnnnnnnnnnnnnnnnnnnnnnnnnnnnnnnnnnnnnnnnnnnnnnnnnnnnnnnnnnnnnnnnnnnnnnnnnnnnnnnnnnnnnnnnnnnnnnnnnnnnnnnnnnnnnnnnnnnnnnnnnnnnnnnnnnnnnnnnnnnnnnnnnnnnnnnnnnnnnnnnnnnnnnnnnnnnnnnnnnnnnnnnnnnnnnnnnnnnnnnnnnnnnnnnnnnnnnnnnnnnnnnnnnnnnnnnnnnnnnnnnnnnnnnnnnnnnnnnnnnnnnnnnnnnnnnnnnnnnnnnnnnnnnnnnnnnnnnnnnnnnnnnnnnnnnnnnnnnnnnnnnnnnnnnnnnnnnnnnnnnnnnnnnnnnnnnnnnnnnnnnnnnnnnnnnnnnnnnnnnnnnnnnnnnnnnnnnnnnnnnnnnnnnnnnnnnnnnnnnnnnnnnnnnnnnnnnnnnnnnnnnnnnnnnnnnnnnnnnnnnnnnnnnnnnnnnnnnnnnnnnnnnnnnnnnnnnnnnnnnnnnnnnnnnnnnnnnnnnnnnnnnnnnnnnnnnnnnnnnnnnnnnnnnnnnnnnnnnnnnnnnnnnnnnnnnnnnnnnnnnnnnnnnnnnnnnnnnnnnnnnnnnnnnnnnnnnnnnnnnnnnnnnnnnnnnnnnnnnnnnnnnnnnnnnnnnnnnnnnnnnnnnnnnnnnnnnnnnnnnnnnnnnnnnnnnnnnnnnnnnnnnnnnnnnnnnnnnnnnnnnnnnnnnnnnnnnnnnnnnnnnnnnnnnnnnnnnnnnnnnnnnnnnnnnnnnnnnnnnnnnnnnnnnnnnnnnnnnnnnnnnnnnnnnnnnnnnnnnnnnnnnnnnnnnnnnnnnnnnnnnnnnnnnnnnnnnnnnnnnnnnnnnnnnnnnnnnnnnnnnnnnnnnnnnnnnnnnnnnnnnnnnnnnnnnnnnnnnnnnnnnnnnnnnnnnnnnnnnnnnnnnnnnnnnnnnnnnnnnnnnnnnnnnnnnnnnnnnnnnnnnnnnnnnnnnnnnnnnnnnnnnnnnnnnnnnnnnnnnnnnnnnnnnnnnnnnnnnnnnnnnnnnnnnnnnnnnnnnnnnnnnnnnnnnnnnnnnnnnnnnnnnnnnnnnnnnnnnnnnnnnnnnnnnnnnnnnnnnnnnnnnnnnnnnnnnnnnnnnnnnnnnnnnnnnnnnnnnnnnnnnnnnnnnnnnnnnnnnnnnnnnnnnnnnnnnnnnnnnnnnnnnnnnnnnnnnnnnnnnnnnnnnnnnnnnnnnnnnnnnnnnnnnnnnnnnnnnnnnnnnnnnnnnnnnnnnnnnnnnnnnnnnnnnnnnnnnnnnnnnnnnnnnnnnnnnnnnnnnnnnnnnnnnnnnnnnnnnnnnnnnnnnnnnnnnnnnnnnnnnnnnnnnnnnnnnnnnnnnnnnnnnnnnnnnnnnnnnnnnnnnnnnnnnnnnnnnnnnnnnnnnnnnnnnnnnnnnnnnnnnnnnnnnnnnnnnnnnnnnnnnnnnnnnnnnnnnnnnnnnnnnnnnnnnnnnnnnnnnnnnnnnnnnnnnnnnnnnnnnnnnnnnnnnnnnnnnnnnnnnnnnnnnnnnnnnnnnnnnnnnnnnnnnnnnnnnnnnnnnnnnnnnnnnnnnnnnnnnnnnnnnnnnnnnnnnnnnnnnnnnnnnnnnnnnnnnnnnnnnnnnnnnnnnnnnnnnnnnnnnnnnnnnnnnnnnnnnnnnnnnnnnnnnnnnnnnnnnnnnnnnnnnnnnnnnnnnnnnnnnnnnnnnnnnnnnnnnnnnnnnnnnnnnnnnnnnnnnnnnnnnnnnnnnnnnnnnnnnnnnnnnnnnnnnnnnnnnnnnnnnnnnnnnnnnnnnnnnnnnnnnnnnnnnnnnnnnnnnnnnnnnnnnnnnnnnnnnnnnnnnnnnnnnnnnnnnnnnnnnnnnnnnnnnnnnnnnnnnnnnnnnnnnnnnnnnnnnnnnnnnnnnnnnnnnnnnnnnnnnnnnnnnnnnnnnnnnnnnnnnnnnnnnnnnnnnnnnnnnnnnnnnnnnnnnnnnnnnnnnnnnnnnnnnnnnnnnnnnnnnnnnnnnnnnnnnnnnnnnnnnnnnnnnnnnnnnnnnnnnnnnnnnnnnnnnnnnnnnnnnnnnnnnnnnnnnnnnnnnnnnnnnnnnnnnnnnnnnnnnnnnnnnnnnnnnnnnnnnnnnnnnnnnnnnnnnnnnnnnnnnnnnnnnnnnnnnnnnnnnnnnnnnnnnnnnnnnnnnnnnnnnnnnnnnnnnnnnnnnnnnnnnnnnnnnnnnnnnnnnnnnnnnnnnnnnnnnnnnnnnnnnnnnnnnnnnnnnnnnnnnnnnnnnnnnnnnnnnnnnnnnnnnnnnnnnnnnnnnnnnnnnnnnnnnnnnnnnnnnnnnnnnnnnnnnnnnnnnnnnnnnnnnnnnnnnnnnnnnnnnnnnnnnnnnnnnnnnnnnnnnnnnnnnnnnnnnnnnnnnnnnnnnnnnnnnnnnnnnnnnnnnnnnnnnnnnnnnnnnnnnnnnnnnnnnnnnnnnnnnnnnnnnnnnnnnnnnnnnnnnnnnnnnnnnnnnnnnnnnnnnnnnnnnnnnnnnnnnnnnnnnnnnnnnnnnnnnnnnnnnnnnnnnnnnnnnnnnnnnnnnnnnnnnnnnnnnnnnnnnnnnnnnnnnnnnnnnnnnnnnnnnnnnnnnnnnnnnnnnnnnnnnnnnnnnnnnnnnnnnnnnnnnnnnnnnnnnnnnnnnnnnnnnnnnnnnnnnnnnnnnnnnnnnnnnnnnnnnnnnnnnnnnnnnnnnnnnnnnnnnnnnnnnnnnnnnnnnnnnnnnnnnnnnnnnnnnnnnnnnnnnnnnnnnnnnnnnnnnnnnnnnnnnnnnnnnnnnnnnnnnnnnnnnnnnnnnnnnnnnnnnnnnnnnnnnnnnnnnnnnnnnnnnnnnnnnnnnnnnnnnnnnnnnnnnnnnnnnnnnnnnnnnnnnnnnnnnnnnnnnnnnnnnnnnnnnnnnnnnnnnnnnnnnnnnnnnnnnnnnnnnnnnnnnnnnnnnnnnnnnnnnnnnnnnnnnnnnnnnnnnnnnnnnnnnnnnnnnnnnnnnnnnnnnnnnnnnnnnnnnnnnnnnnnnnnnnnnnnnnnnnnnnnnnnnnnnnnnnnnnnnnnnnnnnnnnnnnnnnnnnnnnnnnnnnnnnnnnnnnnnnnnnnnnnnnnnnnnnnnnnnnnnnnnnnnnnnnnnnnnnnnnnnnnnnnnnnnnnnnnnnnnnnnnnnnnnnnnnnnnnnnnnnnnnnnnnnnnnnnnnnnnnnnnnnnnnnnnnnnnnnnnnnnnnnnnnnnnnnnnnnnnnnnnnnnnnnnnnnnnnnnnnnnnnnnnnnnnnnnnnnnnnnnnnnnnnnnnnnnnnnnnnnnnnnnnnnnnnnnnnnnnnnnnnnnnnnnnnnnnnnnnnnnnnnnnnnnnnnnnnnnnnnnnnnnnnnnnnnnnnnnnnnnnnnnnnnnnnnnnnnnnnnnnnnnnnnnnnnnnnnnnnnnnnnnnnnnnnnnnnnnnnnnnnnnnnnnnnnnnnnnnnnnnnnnnnnnnnnnnnnnnnnnnnnnnnnnnnnnnnnnnnnnnnnnnnnnnnnnnnnnnnnnnnnnnnnnnnnnnnnnnnnnnnnnnnnnnnnnnnnnnnnnnnnnnnnnnnnnnnnnnnnnnnnnnnnnnnnnnnnnnnnnnnnnnnnnnnnnnnnnnnnnnnnnnnnnnnnnnnnnnnnnnnnnnnnnnnnnnnnnnnnnnnnnnnnnnnnnnnnnnnnnnnnnnnnnnnnnnnnnnnnnnnnnnnnnnnnnnnnnnnnnnnnnnnnnnnnnnnnnnnnnnnnnnnnnnnnnnnnnnnnnnnnnnnnnnnnnnnnnnnnnnnnnnnnnnnnnnnnnnnnnnnnnnnnnnnnnnnnnnnnnnnnnnnnnnnnnnnnnnnnnnnnnnnnnnnnnnnnnnnnnnnnnnnnnnnnnnnnnnnnnnnnnnnnnnnnnnnnnnnnnnnnnnnnnnnnnnnnnnnnnnnnnnnnnnnnnnnnnnnnnnnnnnnnnnnnnnnnnnnnnnnnnnnnnnnnnnnnnnnnnnnnnnnnnnnnnnnnnnnnnnnnnnnnnnnnnnnnnnnnnnnnnnnnnnnnnnnnnnnnnnnnnnnnnnnnnnnnnnnnnnnnnnnnnnnnnnnnnnnnnnnnnnnnnnnnnnnnnnnnnnnnnnnnnnnnnnnnnnnnnnnnnnnnnnnnnnnnnnnnnnnnnnnnnnnnnnnnnnnnnnnnnnnnnnnnnnnnnnnnnnnnnnnnnnnnnnnnnnnnnnnnnnnnnnnnnnnnnnnnnnnnnnnnnnnnnnnnnnnnnnnnnnnnnnnnnnnnnnnnnnnnnnnnnnnnnnnnnnnnnnnnnnnnnnnnnnnnnnnnnnnnnnnnnnnnnnnnnnnnnnnnnnnnnnnnnnnnnnnnnnnnnnnnnnnnnnnnnnnnnnnnnnnnnnnnnnnnnnnnnnnnnnnnnnnnnnnnnnnnnnnnnnnnnnnnnnnnnnnnnnnnnnnnnnnnnnnnnnnnnnnnnnnnnnnnnnnnnnnnnnnnnnnnnnnnnnnnnnnnnnnnnnnnnnnnnnnnnnnnnnnnnnnnnnnnnnnnnnnnnnnnnnnnnnnnnnnnnnnnnnnnnnnnnnnnnnnnnnnnnnnnnnnnnnnnnnnnnnnnnnnnnnnnnnnnnnnnnnnnnnnnnnnnnnnnnnnnnnnnnnnnnnnnnnnnnnnnnnnnnnnnnnnnnnnnnnnnnnnnnnnnnnnnnnnnnnnnnnnnnnnnnnnnnnnnnnnnnnnnnnnnnnnnnnnnnnnnnnnnnnnnnnnnnnnnnnnnnnnnnnnnnnnnnnnnnnnnnnnnnnnnnnnnnnnnnnnnnnnnnnnnnnnnnnnnnnnnnnnnnnnnnnnnnnnnnnnnnnnnnnnnnnnnnnnnnnnnnnnnnnnnnnnnnnnnnnnnnnnnnnnnnnnnnnnnnnnnnnnnnnnnnnnnnnnnnnnnnnnnnnnnnnnnnnnnnnnnnnnnnnnnnnnnnnnnnnnnnnnnnnnnnnnnnnnnnnnnnnnnnnnnnnnnnnnnnnnnnnnnnnnnnnnnnnnnnnnnnnnnnnnnnnnnnnnnnnnnnnnnnnnnnnnnnnnnnnnnnnnnnnnnnnnnnnnnnnnnnnnnnnnnnnnnnnnnnnnnnnnnnnnnnnnnnnnnnnnnnnnnnnnnnnnnnnnnnnnnnnnnnnnnnnnnnnnnnnnnnnnnnnnnnnnnnnnnnnnnnnnnnnnnnnnnnnnnnnnnnnnnnnnnnnnnnnnnnnnnnnnnnnnnnnnnnnnnnnnnnnnnnnnnnnnnnnnnnnnnnnnnnnnnnnnnnnnnnnnnnnnnnnnnnnnnnnnnnnnnnnnnnnnnnnnnnnnnnnnnnnnnnnnnnnnnnnnnnnnnnnnnnnnnnnnnnnnnnnnnnnnnnnnnnnnnnnnnnnnnnnnnnnnnnnnnnnnnnnnnnnnnnnnnnnnnnnnnnnnnnnnnnnnnnnnnnnnnnnnnnnnnnnnnnnnnnnnnnnnnnnnnnnnnnnnnnnnnnnnnnnnnnnnnnnnnnnnnnnnnnnnnnnnnnnnnnnnnnnnnnnnnnnnnnnnnnnnnnnnnnnnnnnnnnnnnnnnnnnnnnnnnnnnnnnnnnnnnnnnnnnnnnnnnnnnnnnnnnnnnnnnnnnnnnnnnnnnnnnnnnnnnnnnnnnnnnnnnnnnnnnnnnnnnnnnnnnnnnnnnnnnnnnnnnnnnnnnnnnnnnnnnnnnnnnnnnnnnnnnnnnnnnnnnnnnnnnnnnnnnnnnnnnnnnnnnnnnnnnnnnnnnnnnnnnnnnnnnnnnnnnnnnnnnnnnnnnnnnnnnnnnnnnnnnnnnnnnnnnnnnnnnnnnnnnnnnnnnnnnnnnnnnnnnnnnnnnnnnnnnnnnnnnnnnnnnnnnnnnnnnnnnnnnnnnnnnnnnnnnnnnnnnnnnnnnnnnnnnnnnnnnnnnnnnnnnnnnnnnnnnnnnnnnnnnnnnnnnnnnnnnnnnnnnnnnnnnnnnnnnnnnnnnnnnnnnnnnnnnnnnnnnnnnnnnnnnnnnnnnnnnnnnnnnnnnnnnnnnnnnnnnnnnnnnnnnnnnnnnnnnnnnnnnnnnnnnnnnnnnnnnnnnnnnnnnnnnnnnnnnnnnnnnnnnnnnnnnnnnnnnnnnnnnnnnnnnnnnnnnnnnnnnnnnnnnnnnnnnnnnnnnnnnnnnnnnnnnnnnnnnnnnnnnnnnnnnnnnnnnnnnnnnnnnnnnnnnnnnnnnnnnnnnnnnnnnnnnnnnnnnnnnnnnnnnnnnnnnnnnnnnnnnnnnnnnnnnnnnnnnnnnnnnnnnnnnnnnnnnnnnnnnnnnnnnnnnnnnnnnnnnnnnnnnnnnnnnnnnnnnnnnnnnnnnnnnnnnnnnnnnnnnnnnnnnnnnnnnnnnnnnnnnnnnnnnnnnnnnnnnnnnnnnnnnnnnnnnnnnnnnnnnnnnnnnnnnnnnnnnnnnnnnnnnnnnnnnnnnnnnnnnnnnnnnnnnnnnnnnnnnnnnnnnnnnnnnnnnnnnnnnnnnnnnnnnnnnnnnnnnnnnnnnnnnnnnnnnnnnnnnnnnnnnnnnnnnnnnnnnnnnnnnnnnnnnnnnnnnnnnnnnnnnnnnnnnnnnnnnnnnnnnnnnnnnnnnnnnnnnnnnnnnnnnnnnnnnnnnnnnnnnnnnnnnnnnnnnnnnnnnnnnnnnnnnnnnnnnnnnnnnnnnnnnnnnnnnnnnnnnnnnnnnnnnnnnnnnnnnnnnnnnnnnnnnnnnnnnnnnnnnnnnnnnnnnnnnnnnnnnnnnnnnnnnnnnnnnnnnnnnnnnnnnnnnnnnnnnnnnnnnnnnnnnnnnnnnnnnnnnnnnnnnnnnnnnnnnnnnnnnnnnnnnnnnnnnnnnnnnnnnnnnnnnnnnnnnnnnnnnnnnnnnnnnnnnnnnnnnnnnnnnnnnnnnnnnnnnnnnnnnnnnnnnnnnnnnnnnnnnnnnnnnnnnnnnnnnnnnnnnnnnnnnnnnnnnnnnnnnnnnnnnnnnnnnnnnnnnnnnnnnnnnnnnnnnnnnnnnnnnnnnnnnnnnnnnnnnnnnnnnnnnnnnnnnnnnnnnnnnnnnnnnnnnnnnnnnnnnnnnnnnnnnnnnnnnnnnnnnnnnnnnnnnnnnnnnnnnnnnnnnnnnnnnnnnnnnnnnnnnnnnnnnnnnnnnnnnnnnnnnnnnnnnnnnnnnnnnnnnnnnnnnnnnnnnnnnnnnnnnnnnnnnnnnnnnnnnnnnnnnnnnnnnnnnnnnnnnnnnnnnnnnnnnnnnnnnnnnnnnnnnnnnnnnnnnnnnnnnnnnnnnnnnnnnnnnnnnnnnnnnnnnnnnnnnnnnnnnnnnnnnnnnnnnnnnnnnnnnnnnnnnnnnnnnnnnnnnnnnnnnnnnnnnnnnnnnnnnnnnnnnnnnnnnnnnnnnnnnnnnnnnnnnnnnnnnnnnnnnnnnnnnnnnnnnnnnnnnnnnnnnnnnnnnnnnnnnnnnnnnnnnnnnnnnnnnnnnnnnnnnnnnnnnnnnnnnnnnnnnnnnnnnnnnnnnnnnnnnnnnnnnnnnnnnnnnnnnnnnnnnnnnnnnnnnnnnnnnnnnnnnnnnnnnnnnnnnnnnnnnnnnnnnnnnnnnnnnnnnnnnnnnnnnnnnnnnnnnnnnnnnnnnnnnnnnnnnnnnnnnnnnnnnnnnnnnnnnnnnnnnnnnnnnnnnnnnnnnnnnnnnnnnnnnnnnnnnnnnnnnnnnnnnnnnnnnnnnnnnnnnnnnnnnnnnnnnnnnnnnnnnnnnnnnnnnnnnnnnnnnnnnnnnnnnnnnnnnnnnnnnnnnnnnnnnnnnnnnnnnnnnnnnnnnnnnnnnnnnnnnnnnnnnnnnnnnnnnnnnnnnnnnnnnnnnnnnnnnnnnnnnnnnnnnnnnnnnnnnnnnnnnnnnnnnnnnnnnnnnnnnnnnnnnnnnnnnnnnnnnnnnnnnnnnnnnnnnnnnnnnnnnnnnnnnnnnnnnnnnnnnnnnnnnnnnnnnnnnnnnnnnnnnnnnnnnnnnnnnnnnnnnnnnnnnnnnnnnnnnnnnnnnnnnnnnnnnnnnnnnnnnnnnnnnnnnnnnnnnnnnnnnnnnnnnnnnnnnnnnnnnnnnnnnnnnnnnnnnnnnnnnnnnnnnnnnnnnnnnnnnnnnnnnnnnnnnnnnnnnnnnnnnnnnnnnnnnnnnnnnnnnnnnnnnnnnnnnnnnnnnnnnnnnnnnnnnnnnnnnnnnnnnnnnnnnnnnnnnnnnnnnnnnnnnnnnnnnnnnnnnnnnnnnnnnnnnnnnnnnnnnnnnnnnnnnnnnnnnnnnnnnnnnnnnnnnnnnnnnnnnnnnnnnnnnnnnnnnnnnnnnnnnnnnnnnnnnnnnnnnnnnnnnnnnnnnnnnnnnnnnnnnnnnnnnnnnnnnnnnnnnnnnnnnnnnnnnnnnnnnnnnnnnnnnnnnnnnnnnnnnnnnnnnnnnnnnnnnnnnnnnnnnnnnnnnnnnnnnnnnnnnnnnnnnnnnnnnnnnnnnnnnnnnnnnnnnnnnnnnnnnnnnnnnnnnnnnnnnnnnnnnnnnnnnnnnnnnnnnnnnnnnnnnnnnnnnnnnnnnnnnnnnnnnnnnnnnnnnnnnnnnnnnnnnnnnnnnnnnnnnnnnnnnnnnnnnnnnnnnnnnnnnnnnnnnnnnnnnnnnnnnnnnnnnnnnnnnnnnnnnnnnnnnnnnnnnnnnnnnnnnnnnnnnnnnnnnnnnnnnnnnnnnnnnnnnnnnnnnnnnnnnnnnnnnnnnnnnnnnnnnnnnnnnnnnnnnnnnnnnnnnnnnnnnnnnnnnnnnnnnnnnnnnnnnnnnnnnnnnnnnnnnnnnnnnnnnnnnnnnnnnnnnnnnnnnnnnnnnnnnnnnnnnnnnnnnnnnnnnnnnnnnnnnnnnnnnnnnnnnnnnnnnnnnnnnnnnnnnnnnnnnnnnnnnnnnnnnnnnnnnnnnnnnnnnnnnnnnnnnnnnnnnnnnnnnnnnnnnnnnnnnnnnnnnnnnnnnnnnnnnnnnnnnnnnnnnnnnnnnnnnnnnnnnnnnnnnnnnnnnnnnnnnnnnnnnnnnnnnnnnnnnnnnnnnnnnnnnnnnnnnnnnnnnnnnnnnnnnnnnnnnnnnnnnnnnnnnnnnnnnnnnnnnnnnnnnnnnnnnnnnnnnnnnnnnnnnnnnnnnnnnnnnnnnnnnnnnnnnnnnnnnnnnnnnnnnnnnnnnnnnnnnnnnnnnnnnnnnnnnnnnnnnnnnnnnnnnnnnnnnnnnnnnnnnnnnnnnnnnnnnnnnnnnnnnnnnnnnnnnnnnnnnnnnnnnnnnnnnnnnnnnnnnnnnnnnnnnnnnnnnnnnnnnnnnnnnnnnnnnnnnnnnnnnnnnnnnnnnnnnnnnnnnnnnnnnnnnnnnnnnnnnnnnnnnnnnnnnnnnnnnnnnnnnnnnnnnnnnnnnnnnnnnnnnnnnnnnnnnnnnnnnnnnnnnnnnnnnnnnnnnnnnnnnnnnnnnnnnnnnnnnnnnnnnnnnnnnnnnnnnnnnnnnnnnnnnnnnnnnnnnnnnnnnnnnnnnnnnnnnnnnnnnnnnnnnnnnnnnnnnnnnnnnnnnnnnnnnnnnnnnnnnnnnnnnnnnnnnnnnnnnnnnnnnnnnnnnnnnnnnnnnnnnnnnnnnnnnnnnnnnnnnnnnnnnnnnnnnnnnnnnnnnnnnnnnnnnnnnnnnnnnnnnnnnnnnnnnnnnnnnnnnnnnnnnnnnnnnnnnnnnnnnnnnnnnnnnnnnnnnnnnnnnnnnnnnnnnnnnnnnnnnnnnnnnnnnnnnnnnnnnnnnnnnnnnnnnnnnnnnnnnnnnnnnnnnnnnnnnnnnnnnnnnnnnnnnnnnnnnnnnnnnnnnnnnnnnnnnnnnnnnnnnnnnnnnnnnnnnnnnnnnnnnnnnnnnnnnnnnnnnnnnnnnnnnnnnnnnnnnnnnnnnnnnnnnnnnnnnnnnnnnnnnnnnnnnnnnnnnnnnnnnnnnnnnnnnnnnnnnnnnnnnnnnnnnnnnnnnnnnnnnnnnnnnnnnnnnnnnnnnnnnnnnnnnnnnnnnnnnnnnnnnnnnnnnnnnnnnnnnnnnnnnnnnnnnnnnnnnnnnnnnnnnnnnnnnnnnnnnnnnnnnnnnnnnnnnnnnnnnnnnnnnnnnnnnnnnnnnnnnnnnnnnnnnnnnnnnnnnnnnnnnnnnnnnnnnnnnnnnnnnnnnnnnnnnnnnnnnnnnnnnnnnnnnnnnnnnnnnnnnnnnnnnnnnnnnnnnnnnnnnnnnnnnnnnnnnnnnnnnnnnnnnnnnnnnnnnnnnnnnnnnnnnnnnnnnnnnnnnnnnnnnnnnnnnnnnnnnnnnnnnnnnnnnnnnnnnnnnnnnnnnnnnnnnnnnnnnnnnnnnnnnnnnnnnnnnnnnnnnnnnnnnnnnnnnnnnnnnnnnnnnnnnnnnnnnnnnnnnnnnnnnnnnnnnnnnnnnnnnnnnnnnnnnnnnnnnnnnnnnnnnnnnnnnnnnnnnnnnnnnnnnnnnnnnnnnnnnnnnnnnnnnnnnnnnnnnnnnnnnnnnnnnnnnnnnnnnnnnnnnnnnnnnnnnnnnnnnnnnnnnnnnnnnnnnnnnnnnnnnnnnnnnnnnnnnnnnnnnnnnnnnnnnnnnnnnnnnnnnnnnnnnnnnnnnnnnnnnnnnnnnnnnnnnnnnnnnnnnnnnnnnnnnnnnnnnnnnnnnnnnnnnnnnnnnnnnnnnnnnnnnnnnnnnnnnnnnnnnnnnnnnnnnnnnnnnnnnnnnnnnnnnnnnnnnnnnnnnnnnnnnnnnnnnnnnnnnnnnnnnnnnnnnnnnnnnnnnnnnnnnnnnnnnnnnnnnnnnnnnnnnnnnnnnnnnnnnnnnnnnnnnnnnnnnnnnnnnnnnnnnnnnnnnnnnnnnnnnnnnnnnnnnnnnnnnnnnnnnnnnnnnnnnnnnnnnnnnnnnnnnnnnnnnnnnnnnnnnnnnnnnnnnnnnnnnnnnnnnnnnnnnnnnnnnnnnnnnnnnnnnnnnnnnnnnnnnnnnnnnnnnnnnnnnnnnnnnnnnnnnnnnnnnnnnnnnnnnnnnnnnnnnnnnnnnnnnnnnnnnnnnnnnnnnnnnnnnnnnnnnnnnnnnnnnnnnnnnnnnnnnnnnnnnnnnnnnnnnnnnnnnnnnnnnnnnnnnnnnnnnnnnnnnnnnnnnnnnnnnnnnnnnnnnnnnnnnnnnnnnnnnnnnnnnnnnnnnnnnnnnnnnnnnnnnnnnnnnnnnnnnnnnnnnnnnnnnnnnnnnnnnnnnnnnnnnnnnnnnnnnnnnnnnnnnnnnnnnnnnnnnnnnnnnnnnnnnnnnnnnnnnnnnnnnnnnnnnnnnnnnnnnnnnnnnnnnnnnnnnnnnnnnnnnnnnnnnnnnnnnnnnnnnnnnnnnnnnnnnnnnnnnnnnnnnnnnnnnnnnnnnnnnnnnnnnnnnnnnnnnnnnnnnnnnnnnnnnnnnnnnnnnnnnnnnnnnnnnnnnnnnnnnnnnnnnnnnnnnnnnnnnnnnnnnnnnnnnnnnnnnnnnnnnnnnnnnnnnnnnnnnnnnnnnnnnnnnnnnnnnnnnnnnnnnnnnnnnnnnnnnnnnnnnnnnnnnnnnnnnnnnnnnnnnnnnnnnnnnnnnnnnnnnnnnnnnnnnnnnnnnnnnnnnnnnnnnnnnnnnnnnnnnnnnnnnnnnnnnnnnnnnnnnnnnnnnnnnnnnnnnnnnnnnnnnnnnnnnnnnnnnnnnnnnnnnnnnnnnnnnnnnnnnnnnnnnnnnnnnnnnnnnnnnnnnnnnnnnnnnnnnnnnnnnnnnnnnnnnnnnnnnnnnnnnnnnnnnnnnnnnnnnnnnnnnnnnnnnnnnnnnnnnnnnnnnnnnnnnnnnnnnnnnnnnnnnnnnnnnnnnnnnnnnnnnnnnnnnnnnnnnnnnnnnnnnnnnnnnnnnnnnnnnnnnnnnnnnnnnnnnnnnnnnnnnnnnnnnnnnnnnnnnnnnnnnnnnnnnnnnnnnnnnnnnnnnnnnnnnnnnnnnnnnnnnnnnnnnnnnnnnnnnnnnnnnnnnnnnnnnnnnnnnnnnnnnnnnnnnnnnnnnnnnnnnnnnnnnnnnnnnnnnnnnnnnnnnnnnnnnnnnnnnnnnnnnnnnnnnnnnnnnnnnnnnnnnnnnnnnnnnnnnnnnnnnnnnnnnnnnnnnnnnnnnnnnnnnnnnnnnnnnnnnnnnnnnnnnnnnnnnnnnnnnnnnnnnnnnnnnnnnnnnnnnnnnnnnnnnnnnnnnnnnnnnnnnnnnnnnnnnnnnnnnnnnnnnnnnnnnnnnnnnnnnnnnnnnnnnnnnnnnnnnnnnnnnnnnnnnnnnnnnnnnnnnnnnnnnnnnnnnnnnnnnnnnnnnnnnnnnnnnnnnnnnnnnnnnnnnnnnnnnnnnnnnnnnnnnnnnnnnnnnnnnnnnnnnnnnnnnnnnnnnnnnnnnnnnnnnnnnnnnnnnnnnnnnnnnnnnnnnnnnnnnnnnnnnnnnnnnnnnnnnnnnnnnnnnnnnnnnnnnnnnnnnnnnnnnnnnnnnnnnnnnnnnnnnnnnnnnnnnnnnnnnnnnnnnnnnnnnnnnnnnnnnnnnnnnnnnnnnnnnnnnnnnnnnnnnnnnnnnnnnnnnnnnnnnnnnnnnnnnnnnnnnnnnnnnnnnnnnnnnnnnnnnnnnnnnnnnnnnnnnnnnnnnnnnnnnnnnnnnnnnnnnnnnnnnnnnnnnnnnnnnnnnnnnnnnnnnnnnnnnnnnnnnnnnnnnnnnnnnnnnnnnnnnnnnnnnnnnnnnnnnnnnnnnnnnnnnnnnnnnnnnnnnnnnnnnnnnnnnnnnnnnnnnnnnnnnnnnnnnnnnnnnnnnnnnnnnnnnnnnnnnnnnnnnnnnnnnnnnnnnnnnnnnnnnnnnnnnnnnnnnnnnnnnnnnnnnnnnnnnnnnnnnnnnnnnnnnnnnnnnnnnnnnnnnnnnnnnnnnnnnnnnnnnnnnnnnnnnnnnnnnnnnnnnnnnnnnnnnnnnnnnnnnnnnnnnnnnnnnnnnnnnnnnnnnnnnnnnnnnnnnnnnnnnnnnnnnnnnnnnnnnnnnnnnnnnnnnnnnnnnnnnnnnnnnnnnnnnnnnnnnnnnnnnnnnnnnnnnnnnnnnnnnnnnnnnnnnnnnnnnnnnnnnnnnnnnnnnnnnnnnnnnnnnnnnnnnnnnnnnnnnnnnnnnnnnnnnnnnnnnnnnnnnnnnnnnnnnnnnnnnnnnnnnnnnnnnnnnnnnnnnnnnnnnnnnnnnnnnnnnnnnnnnnnnnnnnnnnnnnnnnnnnnnnnnnnnnnnnnnnnnnnnnnnnnnnnnnnnnnnnnnnnnnnnnnnnnnnnnnnnnnnnnnnnnnnnnnnnnnnnnnnnnnnnnnnnnnnnnnnnnnnnnnnnnnnnnnnnnnnnnnnnnnnnnnnnnnnnnnnnnnnnnnnnnnnnnnnnnnnnnnnnnnnnnnnnnnnnnnnnnnnnnnnnnnnnnnnnnnnnnnnnnnnnnnnnnnnnnnnnnnnnnnnnnnnnnnnnnnnnnnnnnnnnnnnnnnnnnnnnnnnnnnnnnnnnnnnnnnnnnnnnnnnnnnnnnnnnnnnnnnnnnnnnnnnnnnnnnnnnnnnnnnnnnnnnnnnnnnnnnnnnnnnnnnnnnnnnnnnnnnnnnnnnnnnnnnnnnnnnnnnnnnnnnnnnnnnnnnnnnnnnnnnnnnnnnnnnnnnnnnnnnnnnnnnnnnnnnnnnnnnnnnnnnnnnnnnnnnnnnnnnnnnnnnnnnnnnnnnnnnnnnnnnnnnnnnnnnnnnnnnnnnnnnnnnnnnnnnnnnnnnnnnnnnnnnnnnnnnnnnnnnnnnnnnnnnnnnnnnnnnnnnnnnnnnnnnnnnnnnnnnnnnnnnnnnnnnnnnnnnnnnnnnnnnnnnnnnnnnnnnnnnnnnnnnnnnnnnnnnnnnnnnnnnnnnnnnnnnnnnnnnnnnnnnnnnnnnnnnnnnnnnnnnnnnnnnnnnnnnnnnnnnnnnnnnnnnnnnnnnnnnnnnnnnnnnnnnnnnnnnnnnnnnnnnnnnnnnnnnnnnnnnnnnnnnnnnnnnnnnnnnnnnnnnnnnnnnnnnnnnnnnnnnnnnnnnnnnnnnnnnnnnnnnnnnnnnnnnnnnnnnnnnnnnnnnnnnnnnnnnnnnnnnnnnnnnnnnnnnnnnnnnnnnnnnnnnnnnnnnnnnnnnnnnnnnnnnnnnnnnnnnnnnnnnnnnnnnnnnnnnnnnnnnnnnnnnnnnnnnnnnnnnnnnnnnnnnnnnnnnnnnnnnnnnnnnnnnnnnnnnnnnnnnnnnnnnnnnnnnnnnnnnnnnnnnnnnnnnnnnnnnnnnnnnnnnnnnnnnnnnnnnnnnnnnnnnnnnnnnnnnnnnnnnnnnnnnnnnnnnnnnnnnnnnnnnnnnnnnnnnnnnnnnnnnnnnnnnnnnnnnnnnnnnnnnnnnnnnnnnnnnnnnnnnnnnnnnnnnnnnnnnnnnnnnnnnnnnnnnnnnnnnnnnnnnnnnnnnnnnnnnnnnnnnnnnnnnnnnnnnnnnnnnnnnnnnnnnnnnnnnnnnnnnnnnnnnnnnnnnnnnnnnnnnnnnnnnnnnnnnnnnnnnnnnnnnnnnnnnnnnnnnnnnnnnnnnnnnnnnnnnnnnnnnnnnnnnnnnnnnnnnnnnnnnnnnnnnnnnnnnnnnnnnnnnnnnnnnnnnnnnnnnnnnnnnnnnnnnnnnnnnnnnnnnnnnnnnnnnnnnnnnnnnnnnnnnnnnnnnnnnnnnnnnnnnnnnnnnnnnnnnnnnnnnnnnnnnnnnnnnnnnnnnnnnnnnnnnnnnnnnnnnnnnnnnnnnnnnnnnnnnnnnnnnnnnnnnnnnnnnnnnnnnnnnnnnnnnnnnnnnnnnnnnnnnnnnnnnnnnnnnnnnnnnnnnnnnnnnnnnnnnnnnnnnnnnnnnnnnnnnnnnnnnnnnnnnnnnnnnnnnnnnnnnnnnnnnnnnnnnnnnnnnnnnnnnnnnnnnnnnnnnnnnnnnnnnnnnnnnnnnnnnnnnnnnnnnnnnnnnnnnnnnnnnnnnnnnnnnnnnnnnnnnnnnnnnnnnnnnnnnnnnnnnnnnnnnnnnnnnnnnnnnnnnnnnnnnnnnnnnnnnnnnnnnnnnnnnnnnnnnnnnnnnnnnnnnnnnnnnnnnnnnnnnnnnnnnnnnnnnnnnnnnnnnnnnnnnnnnnnnnnnnnnnnnnnnnnnnnnnnnnnnnnnnnnnnnnnnnnnnnnnnnnnnnnnnnnnnnnnnnnnnnnnnnnnnnnnnnnnnnnnnnnnnnnnnnnnnnnnnnnnnnnnnnnnnnnnnnnnnnnnnnnnnnnnnnnnnnnnnnnnnnnnnnnnnnnnnnnnnnnnnnnnnnnnnnnnnnnnnnnnnnnnnnnnnnnnnnnnnnnnnnnnnnnnnnnnnnnnnnnnnnnnnnnnnnnnnnnnnnnnnnnnnnnnnnnnnnnnnnnnnnnnnnnnnnnnnnnnnnnnnnnnnnnnnnnnnnnnnnnnnnnnnnnnnnnnnnnnnnnnnnnnnnnnnnnnnnnnnnnnnnnnnnnnnnnnnnnnnnnnnnnnnnnnnnnnnnnnnnnnnnnnnnnnnnnnnnnnnnnnnnnnnnnnnnnnnnnnnnnnnnnnnnnnnnnnnnnnnnnnnnnnnnnnnnnnnnnnnnnnnnnnnnnnnnnnnnnnnnnnnnnnnnnnnnnnnnnnnnnnnnnnnnnnnnnnnnnnnnnnnnnnnnnnnnnnnnnnnnnnnnnnnnnnnnnnnnnnnnnnnnnnnnnnnnnnnnnnnnnnnnnnnnnnnnnnnnnnnnnnnnnnnnnnnnnnnnnnnnnnnnnnnnnnnnnnnnnnnnnnnnnnnnnnnnnnnnnnnnnnnnnnnnnnnnnnnnnnnnnnnnnnnnnnnnnnnnnnnnnnnnnnnnnnnnnnnnnnnnnnnnnnnnnnnnnnnnnnnnnnnnnnnnnnnnnnnnnnnnnnnnnnnnnnnnnnnnnnnnnnnnnnnnnnnnnnnnnnnnnnnnnnnnnnnnnnnnnnnnnnnnnnnnnnnnnnnnnnnnnnnnnnnnnnnnnnnnnnnnnnnnnnnnnnnnnnnnnnnnnnnnnnnnnnnnnnnnnnnnnnnnnnnnnnnnnnnnnnnnnnnnnnnnnnnnnnnnnnnnnnnnnnnnnnnnnnnnnnnnnnnnnnnnnnnnnnnnnnnnnnnnnnnnnnnnnnnnnnnnnnnnnnnnnnnnnnnnnnnnnnnnnnnnnnnnnnnnnnnnnnnnnnnnnnnnnnnnnnnnnnnnnnnnnnnnnnnnnnnnnnnnnnnnnnnnnnnnnnnnnnnnnnnnnnnnnnnnnnnnnnnnnnnnnnnnnnnnnnnnnnnnnnnnnnnnnnnnnnnnnnnnnnnnnnnnnnnnnnnnnnnnnnnnnnnnnnnnnnnnnnnnnnnnnnnnnnnnnnnnnnnnnnnnnnnnnnnnnnnnnnnnnnnnnnnnnnnnnnnnnnnnnnnnnnnnnnnnnnnnnnnnnnnnnnnnnnnnnnnnnnnnnnnnnnnnnnnnnnnnnnnnnnnnnnnnnnnnnnnnnnnnnnnnnnnnnnnnnnnnnnnnnnnnnnnnnnnnnnnnnnnnnnnnnnnnnnnnnnnnnnnnnnnnnnnnnnnnnnnnnnnnnnnnnnnnnnnnnnnnnnnnnnnnnnnnnnnnnnnnnnnnnnnnnnnnnnnnnnnnnnnnnnnnnnnnnnnnnnnnnnnnnnnnnnnnnnnnnnnnnnnnnnnnnnnnnnnnnnnnnnnnnnnnnnnnnnnnnnnnnnnnnnnnnnnnnnnnnnnnnnnnnnnnnnnnnnnnnnnnnnnnnnnnnnnnnnnnnnnnnnnnnnnnnnnnnnnnnnnnnnnnnnnnnnnnnnnnnnnnnnnnnnnnnnnnnnnnnnnnnnnnnnnnnnnnnnnnnnnnnnnnnnnnnnnnnnnnnnnnnnnnnnnnnnnnnnnnnnnnnnnnnnnnnnnnnnnnnnnnnnnnnnnnnnnnnnnnnnnnnnnnnnnnnnnnnnnnnnnnnnnnnnnnnnnnnnnnnnnnnnnnnnnnnnnnnnnnnnnnnnnnnnnnnnnnnnnnnnnnnnnnnnnnnnnnnnnnnnnnnnnnnnnnnnnnnnnnnnnnnnnnnnnnnnnnnnnnnnnnnnnnnnnnnnnnnnnnnnnnnnnnnnnnnnnnnnnnnnnnnnnnnnnnnnnnnnnnnnnnnnnnnnnnnnnnnnnnnnnnnnnnnnnnnnnnnnnnnnnnnnnnnnnnnnnnnnnnnnnnnnnnnnnnnnnnnnnnnnnnnnnnnnnnnnnnnnnnnnnnnnnnnnnnnnnnnnnnnnnnnnnnnnnnnnnnnnnnnnnnnnnnnnnnnnnnnnnnnnnnnnnnnnnnnnnnnnnnnnnnnnnnnnnnnnnnnnnnnnnnnnnnnnnnnnnnnnnnnnnnnnnnnnnnnnnnnnnnnnnnnnnnnnnnnnnnnnnnnnnnnnnnnnnnnnnnnnnnnnnnnnnnnnnnnnnnnnnnnnnnnnnnnnnnnnnnnnnnnnnnnnnnnnnnnnnnnnnnnnnnnnnnnnnnnnnnnnnnnnnnnnnnnnnnnnnnnnnnnnnnnnnnnnnnnnnnnnnnnnnnnnnnnnnnnnnnnnnnnnnnnnnnnnnnnnnnnnnnnnnnnnnnnnnnnnnnnnnnnnnnnnnnnnnnnnnnnnnnnnnnnnnnnnnnnnnnnnnnnnnnnnnnnnnnnnnnnnnnnnnnnnnnnnnnnnnnnnnnnnnnnnnnnnnnnnnnnnnnnnnnnnnnnnnnnnnnnnnnnnnnnnnnnnnnnnnnnnnnnnnnnnnnnnnnnnnnnnnnnnnnnnnnnnnnnnnnnnnnnnnnnnnnnnnnnnnnnnnnnnnnnnnnnnnnnnnnnnnnnnnnnnnnnnnnnnnnnnnnnnnnnnnnnnnnnnnnnnnnnnnnnnnnnnnnnnnnnnnnnnnnnnnnnnnnnnnnnnnnnnnnnnnnnnnnnnnnnnnnnnnnnnnnnnnnnnnnnnnnnnnnnnnnnnnnnnnnnnnnnnnnnnnnnnnnnnnnnnnnnnnnnnnnnnnnnnnnnnnnnnnnnnnnnnnnnnnnnnnnnnnnnnnnnnnnnnnnnnnnnnnnnnnnnnnnnnnnnnnnnnnnnnnnnnnnnnnnnnnnnnnnnnnnnnnnnnnnnnnnnnnnnnnnnnnnnnnnnnnnnnnnnnnnnnnnnnnnnnnnnnnnnnnnnnnnnnnnnnnnnnnnnnnnnnnnnnnnnnnnnnnnnnnnnnnnnnnnnnnnnnnnnnnnnnnnnnnnnnnnnnnnnnnnnnnnnnnnnnnnnnnnnnnnnnnnnnnnnnnnnnnnnnnnnnnnnnnnnnnnnnnnnnnnnnnnnnnnnnnnnnnnnnnnnnnnnnnnnnnnnnnnnnnnnnnnnnnnnnnnnnnnnnnnnnnnnnnnnnnnnnnnnnnnnnnnnnnnnnnnnnnnnnnnnnnnnnnnnnnnnnnnnnnnnnnnnnnnnnnnnnnnnnnnnnnnnnnnnnnnnnnnnnnnnnnnnnnnnnnnnnnnnnnnnnnnnnnnnnnnnnnnnnnnnnnnnnnnnnnnnnnnnnnnnnnnnnnnnnnnnnnnnnnnnnnnnnnnnnnnnnnnnnnnnnnnnnnnnnnnnnnnnnnnnnnnnnnnnnnnnnnnnnnnnnnnnnnnnnnnnnnnnnnnnnnnnnnnnnnnnnnnnnnnnnnnnnnnnnnnnnnnnnnnnnnnnnnnnnnnnnnnnnnnnnnnnnnnnnnnnnnnnnnnnnnnnnnnnnnnnnnnnnnnnnnnnnnnnnnnnnnnnnnnnnnnnnnnnnnnnnnnnnnnnnnnnnnnnnnnnnnnnnnnnnnnnnnnnnnnnnnnnnnnnnnnnnnnnnnnnnnnnnnnnnnnnnnnnnnnnnnnnnnnnnnnnnnnnnnnnnnnnnnnnnnnnnnnnnnnnnnnnnnnnnnnnnnnnnnnnnnnnnnnnnnnnnnnnnnnnnnnnnnnnnnnnnnnnnnnnnnnnnnnnnnnnnnnnnnnnnnnnnnnnnnnnnnnnnnnnnnnnnnnnnnnnnnnnnnnnnnnnnnnnnnnnnnnnnnnnnnnnnnnnnnnnnnnnnnnnnnnnnnnnnnnnnnnnnnnnnnnnnnnnnnnnnnnnnnnnnnnnnnnnnnnnnnnnnnnnnnnnnnnnnnnnnnnnnnnnnnnnnnnnnnnnnnnnnnnnnnnnnnnnnnnnnnnnnnnnnnnnnnnnnnnnnnnnnnnnnnnnnnnnnnnnnnnnnnnnnnnnnnnnnnnnnnnnnnnnnnnnnnnnnnnnnnnnnnnnnnnnnnnnnnnnnnnnnnnnnnnnnnnnnnnnnnnnnnnnnnnnnnnnnnnnnnnnnnnnnnnnnnnnnnnnnnnnnnnnnnnnnnnnnnnnnnnnnnnnnnnnnnnnnnnnnnnnnnnnnnnnnnnnnnnnnnnnnnnnnnnnnnnnnnnnnnnnnnnnnnnnnnnnnnnnnnnnnnnnnnnnnnnnnnnnnnnnnnnnnnnnnnnnnnnnnnnnnnnnnnnnnnnnnnnnnnnnnnnnnnnnnnnnnnnnnnnnnnnnnnnnnnnnnnnnnnnnnnnnnnnnnnnnnnnnnnnnnnnnnnnnnnnnnnnnnnnnnnnnnnnnnnnnnnnnnnnnnnnnnnnnnnnnnnnnnnnnnnnnnnnnnnnnnnnnnnnnnnnnnnnnnnnnnnnnnnnnnnnnnnnnnnnnnnnnnnnnnnnnnnnnnnnnnnnnnnnnnnnnnnnnnnnnnnnnnnnnnnnnnnnnnnnnnnnnnnnnnnnnnnnnnnnnnnnnnnnnnnnnnnnnnnnnnnnnnnnnnnnnnnnnnnnnnnnnnnnnnnnnnnnnnnnnnnnnnnnnnnnnnnnnnnnnnnnnnnnnnnnnnnnnnnnnnnnnnnnnnnnnnnnnnnnnnnnnnnnnnnnnnnnnnnnnnnnnnnnnnnnnnnnnnnnnnnnnnnnnnnnnnnnnnnnnnnnnnnnnnnnnnnnnnnnnnnnnnnnnnnnnnnnnnnnnnnnnnnnnnnnnnnnnnnnnnnnnnnnnnnnnnnnnnnnnnnnnnnnnnnnnnnnnnnnnnnnnnnnnnnnnnnnnnnnnnnnnnnnnnnnnnnnnnnnnnnnnnnnnnnnnnnnnnnnnnnnnnnnnnnnnnnnnnnnnnnnnnnnnnnnnnnnnnnnnnnnnnnnnnnnnnnnnnnnnnnnnnnnnnnnnnnnnnnnnnnnnnnnnnnnnnnnnnnnnnnnnnnnnnnnnnnnnnnnnnnnnnnnnnnnnnnnnnnnnnnnnnnnnnnnnnnnnnnnnnnnnnnnnnnnnnnnnnnnnnnnnnnnnnnnnnnnnnnnnnnnnnnnnnnnnnnnnnnnnnnnnnnnnnnnnnnnnnnnnnnnnnnnnnnnnnnnnnnnnnnnnnnnnnnnnnnnnnnnnnnnnnnnnnnnnnnnnnnnnnnnnnnnnnnnnnnnnnnnnnnnnnnnnnnnnnnnnnnnnnnnnnnnnnnnnnnnnnnnnnnnnnnnnnnnnnnnnnnnnnnnnnnnnnnnnnnnnnnnnnnnnnnnnnnnnnnnnnnnnnnnnnnnnnnnnnnnnnnnnnnnnnnnnnnnnnnnnnnnnnnnnnnnnnnnnnnnnnnnnnnnnnnnnnnnnnnnnnnnnnnnnnnnnnnnnnnnnnnnnnnnnnnnnnnnnnnnnnnnnnnnnnnnnnnnnnnnnnnnnnnnnnnnnnnnnnnnnnnnnnnnnnnnnnnnnnnnnnnnnnnnnnnnnnnnnnnnnnnnnnnnnnnnnnnnnnnnnnnnnnnnnnnnnnnnnnnnnnnnnnnnnnnnnnnnnnnnnnnnnnnnnnnnnnnnnnnnnnnnnnnnnnnnnnnnnnnnnnnnnnnnnnnnnnnnnnnnnnnnnnnnnnnnnnnnnnnnnnnnnnnnnnnnnnnnnnnnnnnnnnnnnnnnnnnnnnnnnnnnnnnnnnnnnnnnnnnnnnnnnnnnnnnnnnnnnnnnnnnnnnnnnnnnnnnnnnnnnnnnnnnnnnnnnnnnnnnnnnnnnnnnnnnnnnnnnnnnnnnnnnnnnnnnnnnnnnnnnnnnnnnnnnnnnnnnnnnnnnnnnnnnnnnnnnnnnnnnnnnnnnnnnnnnnnnnnnnnnnnnnnnnnnnnnnnnnnnnnnnnnnnnnnnnnnnnnnnnnnnnnnnnnnnnnnnnnnnnnnnnnnnnnnnnnnnnnnnnnnnnnnnnnnnnnnnnnnnnnnnnnnnnnnnnnnnnnnnnnnnnnnnnnnnnnnnnnnnnnnnnnnnnnnnnnnnnnnnnnnnnnnnnnnnnnnnnnnnnnnnnnnnnnnnnnnnnnnnnnnnnnnnnnnnnnnnnnnnnnnnnnnnnnnnnnnnnnnnnnnnnnnnnnnnnnnnnnnnnnnnnnnnnnnnnnnnnnnnnnnnnnnnnnnnnnnnnnnnnnnnnnnnnnnnnnnnnnnnnnnnnnnnnnnnnnnnnnnnnnnnnnnnnnnnnnnnnnnnnnnnnnnnnnnnnnnnnnnnnnnnnnnnnnnnnnnnnnnnnnnnnnnnnnnnnnnnnnnnnnnnnnnnnnnnnnnnnnnnnnnnnnnnnnnnnnnnnnnnnnnnnnnnnnnnnnnnnnnnnnnnnnnnnnnnnnnnnnnnnnnnnnnnnnnnnnnnnnnnnnnnnnnnnnnnnnnnnnnnnnnnnnnnnnnnnnnnnnnnnnnnnnnnnnnnnnnnnnnnnnnnnnnnnnnnnnnnnnnnnnnnnnnnnnnnnnnnnnnnnnnnnnnnnnnnnnnnnnnnnnnnnnnnnnnnnnnnnnnnnnnnnnnnnnnnnnnnnnnnnnnnnnnnnnnnnnnnnnnnnnnnnnnnnnnnnnnnnnnnnnnnnnnnnnnnnnnnnnnnnnnnnnnnnnnnnnnnnnnnnnnnnnnnnnnnnnnnnnnnnnnnnnnnnnnnnnnnnnnnnnnnnnnnnnnnnnnnnnnnnnnnnnnnnnnnnnnnnnnnnnnnnnnnnnnnnnnnnnnnnnnnnnnnnnnnnnnnnnnnnnnnnnnnnnnnnnnnnnnnnnnnnnnnnnnnnnnnnnnnnnnnnnnnnnnnnnnnnnnnnnnnnnnnnnnnnnnnnnnnnnnnnnnnnnnnnnnnnnnnnnnnnnnnnnnnnnnnnnnnnnnnnnnnnnnnnnnnnnnnnnnnnnnnnnnnnnnnnnnnnnnnnnnnnnnnnnnnnnnnnnnnnnnnnnnnnnnnnnnnnnnnnnnnnnnnnnnnnnnnnnnnnnnnnnnnnnnnnnnnnnnnnnnnnnnnnnnnnnnnnnnnnnnnnnnnnnnnnnnnnnnnnnnnnnnnnnnnnnnnnnnnnnnnnnnnnnnnnnnnnnnnnnnnnnnnnnnnnnnnnnnnnnnnnnnnnnnnnnnnnnnnnnnnnnnnnnnnnnnnnnnnnnnnnnnnnnnnnnnnnnnnnnnnnnnnnnnnnnnnnnnnnnnnnnnnnnnnnnnnnnnnnnnnnnnnnnnnnnnnnnnnnnnnnnnnnnnnnnnnnnnnnnnnnnnnnnnnnnnnnnnnnnnnnnnnnnnnnnnnnnnnnnnnnnnnnnnnnnnnnnnnnnnnnnnnnnnnnnnnnnnnnnnnnnnnnnnnnnnnnnnnnnnnnnnnnnnnnnnnnnnnnnnnnnnnnnnnnnnnnnnnnnnnnnnnnnnnnnnnnnnnnnnnnnnnnnnnnnnnnnnnnnnnnnnnnnnnnnnnnnnnnnnnnnnnnnnnnnnnnnnnnnnnnnnnnnnnnnnnnnnnnnnnnnnnnnnnnnnnnnnnnnnnnnnnnnnnnnnnnnnnnnnnnnnnnnnnnnnnnnnnnnnnnnnnnnnnnnnnnnnnnnnnnnnnnnnnnnnnnnnnnnnnnnnnnnnnnnnnnnnnnnnnnnnnnnnnnnnnnnnnnnnnnnnnnnnnnnnnnnnnnnnnnnnnnnnnnnnnnnnnnnnnnnnnnnnnnnnnnnnnnnnnnnnnnnnnnnnnnnnnnnnnnnnnnnnnnnnnnnnnnnnnnnnnnnnnnnnnnnnnnnnnnnnnnnnnnnnnnnnnnnnnnnnnnnnnnnnnnnnnnnnnnnnnnnnnnnnnnnnnnnnnnnnnnnnnnnnnnnnnnnnnnnnnnnnnnnnnnnnnnnnnnnnnnnnnnnnnnnnnnnnnnnnnnnnnnnnnnnnnnnnnnnnnnnnnnnnnnnnnnnnnnnnnnnnnnnnnnnnnnnnnnnnnnnnnnnnnnnnnnnnnnnnnnnnnnnnnnnnnnnnnnnnnnnnnnnnnnnnnnnnnnnnnnnnnnnnnnnnnnnnnnnnnnnnnnnnnnnnnnnnnnnnnnnnnnnnnnnnnnnnnnnnnnnnnnnnnnnnnnnnnnnnnnnnnnnnnnnnnnnnnnnnnnnnnnnnnnnnnnnnnnnnnnnnnnnnnnnnnnnnnnnnnnnnnnnnnnnnnnnnnnnnnnnnnnnnnnnnnnnnnnnnnnnnnnnnnnnnnnnnnnnnnnnnnnnnnnnnnnnnnnnnnnnnnnnnnnnnnnnnnnnnnnnnnnnnnnnnnnnnnnnnnnnnnnnnnnnnnnnnnnnnnnnnnnnnnnnnnnnnnnnnnnnnnnnnnnnnnnnnnnnnnnnnnnnnnnnnnnnnnnnnnnnnnnnnnnnnnnnnnnnnnnnnnnnnnnnnnnnnnnnnnnnnnnnnnnnnnnnnnnnnnnnnnnnnnnnnnnnnnnnnnnnnnnnnnnnnnnnnnnnnnnnnnnnnnnnnnnnnnnnnnnnnnnnnnnnnnnnnnnnnnnnnnnnnnnnnnnnnnnnnnnnnnnnnnnnnnnnnnnnnnnnnnnnnnnnnnnnnnnnnnnnnnnnnnnnnnnnnnnnnnnnnnnnnnnnnnnnnnnnnnnnnnnnnnnnnnnnnnnnnnnnnnnnnnnnnnnnnnnnnnnnnnnnnnnnnnnnnnnnnnnnnnnnnnnnnnnnnnnnnnnnnnnnnnnnnnnnnnnnnnnnnnnnnnnnnnnnnnnnnnnnnnnnnnnnnnnnnnnnnnnnnnnnnnnnnnnnnnnnnnnnnnnnnnnnnnnnnnnnnnnnnnnnnnnnnnnnnnnnnnnnnnnnnnnnnnnnnnnnnnnnnnnnnnnnnnnnnnnnnnnnnnnnnnnnnnnnnnnnnnnnnnnnnnnnnnnnnnnnnnnnnnnnnnnnnnnnnnnnnnnnnnnnnnnnnnnnnnnnnnnnnnnnnnnnnnnnnnnnnnnnnnnnnnnnnnnnnnnnnnnnnnnnnnnnnnnnnnnnnnnnnnnnnnnnnnnnnnnnnnnnnnnnnnnnnnnnnnnnnnnnnnnnnnnnnnnnnnnnnnnnnnnnnnnnnnnnnnnnnnnnnnnnnnnnnnnnnnnnnnnnnnnnnnnnnnnnnnnnnnnnnnnnnnnnnnnnnnnnnnnnnnnnnnnnnnnnnnnnnnnnnnnnnnnnnnnnnnnnnnnnnnnnnnnnnnnnnnnnnnnnnnnnnnnnnnnnnnnnnnnnnnnnnnnnnnnnnnnnnnnnnnnnnnnnnnnnnnnnnnnnnnnnnnnnnnnnnnnnnnnnnnnnnnnnnnnnnnnnnnnnnnnnnnnnnnnnnnnnnnnnnnnnnnnnnnnnnnnnnnnnnnnnnnnnnnnnnnnnnnnnnnnnnnnnnnnnnnnnnnnnnnnnnnnnnnnnnnnnnnnnnnnnnnnnnnnnnnnnnnnnnnnnnnnnnnnnnnnnnnnnnnnnnnnnnnnnnnnnnnnnnnnnnnnnnnnnnnnnnnnnnnnnnnnnnnnnnnnnnnnnnnnnnnnnnnnnnnnnnnnnnnnnnnnnnnnnnnnnnnnnnnnnnnnnnnnnnnnnnnnnnnnnnnnnnnnnnnnnnnnnnnnnnnnnnnnnnnnnnnnnnnnnnnnnnnnnnnnnnnnnnnnnnnnnnnnnnnnnnnnnnnnnnnnnnnnnnnnnnnnnnnnnnnnnnnnnnnnnnnnnnnnnnnnnnnnnnnnnnnnnnnnnnnnnnnnnnnnnnnnnnnnnnnnnnnnnnnnnnnnnnnnnnnnnnnnnnnnnnnnnnnnnnnnnnnnnnnnnnnnnnnnnnnnnnnnnnnnnnnnnnnnnnnnnnnnnnnnnnnnnnnnnnnnnnnnnnnnnnnnnnnnnnnnnnnnnnnnnnnnnnnnnnnnnnnnnnnnnnnnnnnnnnnnnnnnnnnnnnnnnnnnnnnnnnnnnnnnnnnnnnnnnnnnnnnnnnnnnnnnnnnnnnnnnnnnnnnnnnnnnnnnnnnnnnnnnnnnnnnnnnnnnnnnnnnnnnnnnnnnnnnnnnnnnnnnnnnnnnnnnnnnnnnnnnnnnnnnnnnnnnnnnnnnnnnnnnnnnnnnnnnnnnnnnnnnnnnnnnnnnnnnnnnnnnnnnnnnnnnnnnnnnnnnnnnnnnnnnnnnnnnnnnnnnnnnnnnnnnnnnnnnnnnnnnnnnnnnnnnnnnnnnnnnnnnnnnnnnnnnnnnnnnnnnnnnnnnnnnnnnnnnnnnnnnnnnnnnnnnnnnnnnnnnnnnnnnnnnnnnnnnnnnnnnnnnnnnnnnnnnnnnnnnnnnnnnnnnnnnnnnnnnnnnnnnnnnnnnnnnnnnnnnnnnnnnnnnnnnnnnnnnnnnnnnnnnnnnnnnnnnnnnnnnnnnnnnnnnnnnnnnnnnnnnnnnnnnnnnnnnnnnnnnnnnnnnnnnnnnnnnnnnnnnnnnnnnnnnnnnnnnnnnnnnnnnnnnnnnnnnnnnnnnnnnnnnnnnnnnnnnnnnnnnnnnnnnnnnnnnnnnnnnnnnnnnnnnnnnnnnnnnnnnnnnnnnnnnnnnnnnnnnnnnnnnnnnnnnnnnnnnnnnnnnnnnnnnnnnnnnnnnnnnnnnnnnnnnnnnnnnnnnnnnnnnnnnnnnnnnnnnnnnnnnnnnnnnnnnnnnnnnnnnnnnnnnnnnnnnnnnnnnnnnnnnnnnnnnnnnnnnnnnnnnnnnnnnnnnnnnnnnnnnnnnnnnnnnnnnnnnnnnnnnnnnnnnnnnnnnnnnnnnnnnnnnnnnnnnnnnnnnnnnnnnnnnnnnnnnnnnnnnnnnnnnnnnnnnnnnnnnnnnnnnnnnnnnnnnnnnnnnnnnnnnnnnnnnnnnnnnnnnnnnnnnnnnnnnnnnnnnnnnnnnnnnnnnnnnnnnnnnnnnnnnnnnnnnnnnnnnnnnnnnnnnnnnnnnnnnnnnnnnnnnnnnnnnnnnnnnnnnnnnnnnnnnnnnnnnnnnnnnnnnnnnnnnnnnnnnnnnnnnnnnnnnnnnnnnnnnnnnnnnnnnnnnnnnnnnnnnnnnnnnnnnnnnnnnnnnnnnnnnnnnnnnnnnnnnnnnnnnnnnnnnnnnnnnnnnnnnnnnnnnnnnnnnnnnnnnnnnnnnnnnnnnnnnnnnnnnnnnnnnnnnnnnnnnnnnnnnnnnnnnnnnnnnnnnnnnnnnnnnnnnnnnnnnnnnnnnnnnnnnnnnnnnnnnnnnnnnnnnnnnnnnnnnnnnnnnnnnnnnnnnnnnnnnnnnnnnnnnnnnnnnnnnnnnnnnnnnnnnnnnnnnnnnnnnnnnnnnnnnnnnnnnnnnnnnnnnnnnnnnnnnnnnnnnnnnnnnnnnnnnnnnnnnnnnnnnnnnnnnnnnnnnnnnnnnnnnnnnnnnnnnnnnnnnnnnnnnnnnnnnnnnnnnnnnnnnnnnnnnnnnnnnnnnnnnnnnnnnnnnnnnnnnnnnnnnnnnnnnnnnnnnnnnnnnnnnnnnnnnnnnnnnnnnnnnnnnnnnnnnnnnnnnnnnnnnnnnnnnnnnnnnnnnnnnnnnnnnnnnnnnnnnnnnnnnnnnnnnnnnnnnnnnnnnnnnnnnnnnnnnnnnnnnnnnnnnnnnnnnnnnnnnnnnnnnnnnnnnnnnnnnnnnnnnnnnnnnnnnnnnnnnnnnnnnnnnnnnnnnnnnnnnnnnnnnnnnnnnnnnnnnnnnnnnnnnnnnnnnnnnnnnnnnnnnnnnnnnnnnnnnnnnnnnnnnnnnnnnnnnnnnnnnnnnnnnnnnnnnnnnnnnnnnnnnnnnnnnnnnnnnnnnnnnnnnnnnnnnnnnnnnnnnnnnnnnnnnnnnnnnnnnnnnnnnnnnnnnnnnnnnnnnnnnnnnnnnnnnnnnnnnnnnnnnnnnnnnnnnnnnnnnnnnnnnnnnnnnnnnnnnnnnnnnnnnnnnnnnnnnnnnnnnnnnnnnnnnnnnnnnnnnnnnnnnnnnnnnnnnnnnnnnnnnnnnnnnnnnnnnnnnnnnnnnnnnnnnnnnnnnnnnnnnnnnnnnnnnnnnnnnnnnnnnnnnnnnnnnnnnnnnnnnnnnnnnnnnnnnnnnnnnnnnnnnnnnnnnnnnnnnnnnnnnnnnnnnnnnnnnnnnnnnnnnnnnnnnnnnnnnnnnnnnnnnnnnnnnnnnnnnnnnnnnnnnnnnnnnnnnnnnnnnnnnnnnnnnnnnnnnnnnnnnnnnnnnnnnnnnnnnnnnnnnnnnnnnnnnnnnnnnnnnnnnnnnnnnnnnnnnnnnnnnnnnnnnnnnnnnnnnnnnnnnnnnnnnnnnnnnnnnnnnnnnnnnnnnnnnnnnnnnnnnnnnnnnnnnnnnnnnnnnnnnnnnnnnnnnnnnnnnnnnnnnnnnnnnnnnnnnnnnnnnnnnnnnnnnnnnnnnnnnnnnnnnnnnnnnnnnnnnnnnnnnnnnnnnnnnnnnnnnnnnnnnnnnnnnnnnnnnnnnnnnnnnnnnnnnnnnnnnnnnnnnnnnnnnnnnnnnnnnnnnnnnnnnnnnnnnnnnnnnnnnnnnnnnnnnnnnnnnnnnnnnnnnnnnnnnnnnnnnnnnnnnnnnnnnnnnnnnnnnnnnnnnnnnnnnnnnnnnnnnnnnnnnnnnnnnnnnnnnnnnnnnnnnnnnnnnnnnnnnnnnnnnnnnnnnnnnnnnnnnnnnnnnnnnnnnnnnnnnnnnnnnnnnnnnnnnnnnnnnnnnnnnnnnnnnnnnnnnnnnnnnnnnnnnnnnnnnnnnnnnnnnnnnnnnnnnnnnnnnnnnnnnnnnnnnnnnnnnnnnnnnnnnnnnnnnnnnnnnnnnnnnnnnnnnnnnnnnnnnnnnnnnnnnnnnnnnnnnnnnnnnnnnnnnnnnnnnnnnnnnnnnnnnnnnnnnnnnnnnnnnnnnnnnnnnnnnnnnnnnnnnnnnnnnnnnnnnnnnnnnnnnnnnnnnnnnnnnnnnnnnnnnnnnnnnnnnnnnnnnnnnnnnnnnnnnnnnnnnnnnnnnnnnnnnnnnnnnnnnnnnnnnnnnnnnnnnnnnnnnnnnnnnnnnnnnnnnnnnnnnnnnnnnnnnnnnnnnnnnnnnnnnnnnnnnnnnnnnnnnnnnnnnnnnnnnnnnnnnnnnnnnnnnnnnnnnnnnnnnnnnnnnnnnnnnnnnnnnnnnnnnnnnnnnnnnnnnnnnnnnnnnnnnnnnnnnnnnnnnnnnnnnnnnnnnnnnnnnnnnnnnnnnnnnnnnnnnnnnnnnnnnnnnnnnnnnnnnnnnnnnnnnnnnnnnnnnnnnnnnnnnnnnnnnnnnnnnnnnnnnnnnnnnnnnnnnnnnnnnnnnnnnnnnnnnnnnnnnnnnnnnnnnnnnnnnnnnnnnnnnnnnnnnnnnnnnnnnnnnnnnnnnnnnnnnnnnnnnnnnnnnnnnnnnnnnnnnnnnnnnnnnnnnnnnnnnnnnnnnnnnnnnnnnnnnnnnnnnnnnnnnnnnnnnnnnnnnnnnnnnnnnnnnnnnnnnnnnnnnnnnnnnnnnnnnnnnnnnnnnnnnnnnnnnnnnnnnnnnnnnnnnnnnnnnnnnnnnnnnnnnnnnnnnnnnnnnnnnnnnnnnnnnnnnnnnnnnnnnnnnnnnnnnnnnnnnnnnnnnnnnnnnnnnnnnnnnnnnnnnnnnnnnnnnnnnnnnnnnnnnnnnnnnnnnnnnnnnnnnnnnnnnnnnnnnnnnnnnnnnnnnnnnnnnnnnnnnnnnnnnnnnnnnnnnnnnnnnnnnnnnnnnnnnnnnnnnnnnnnnnnnnnnnnnnnnnnnnnnnnnnnnnnnnnnnnnnnnnnnnnnnnnnnnnnnnnnnnnnnnnnnnnnnnnnnnnnnnnnnnnnnnnnnnnnnnnnnnnnnnnnnnnnnnnnnnnnnnnnnnnnnnnnnnnnnnnnnnnnnnnnnnnnnnnnnnnnnnnnnnnnnnnnnnnnnnnnnnnnnnnnnnnnnnnnnnnnnnnnnnnnnnnnnnnnnnnnnnnnnnnnnnnnnnnnnnnnnnnnnnnnnnnnnnnnnnnnnnnnnnnnnnnnnnnnnnnnnnnnnnnnnnnnnnnnnnnnnnnnnnnnnnnnnnnnnnnnnnnnnnnnnnnnnnnnnnnnnnnnnnnnnnnnnnnnnnnnnnnnnnnnnnnnnnnnnnnnnnnnnnnnnnnnnnnnnnnnnnnnnnnnnnnnnnnnnnnnnnnnnnnnnnnnnnnnnnnnnnnnnnnnnnnnnnnnnnnnnnnnnnnnnnnnnnnnnnnnnnnnnnnnnnnnnnnnnnnnnnnnnnnnnnnnnnnnnnnnnnnnnnnnnnnnnnnnnnnnnnnnnnnnnnnnnnnnnnnnnnnnnnnnnnnnnnnnnnnnnnnnnnnnnnnnnnnnnnnnnnnnnnnnnnnnnnnnnnnnnnnnnnnnnnnnnnnnnnnnnnnnnnnnnnnnnnnnnnnnnnnnnnnnnnnnnnnnnnnnnnnnnnnnnnnnnnnnnnnnnnnnnnnnnnnnnnnnnnnnnnnnnnnnnnnnnnnnnnnnnnnnnnnnnnnnnnnnnnnnnnnnnnnnnnnnnnnnnnnnnnnnnnnnnnnnnnnnnnnnnnnnnnnnnnnnnnnnnnnnnnnnnnnnnnnnnnnnnnnnnnnnnnnnnnnnnnnnnnnnnnnnnnnnnnnnnnnnnnnnnnnnnnnnnnnnnnnnnnnnnnnnnnnnnnnnnnnnnnnnnnnnnnnnnnnnnnnnnnnnnnnnnnnnnnnnnnnnnnnnnnnnnnnnnnnnnnnnnnnnnnnnnnnnnnnnnnnnnnnnnnnnnnnnnnnnnnnnnnnnnnnnnnnnnnnnnnnnnnnnnnnnnnnnnnnnnnnnnnnnnnnnnnnnnnnnnnnnnnnnnnnnnnnnnnnnnnnnnnnnnnnnnnnnnnnnnnnnnnnnnnnnnnnnnnnnnnnnnnnnnnnnnnnnnnnnnnnnnnnnnnnnnnnnnnnnnnnnnnnnnnnnnnnnnnnnnnnnnnnnnnnnnnnnnnnnnnnnnnnnnnnnnnnnnnnnnnnnnnnnnnnnnnnnnnnnnnnnnnnnnnnnnnnnnnnnnnnnnnnnnnnnnnnnnnnnnnnnnnnnnnnnnnnnnnnnnnnnnnnnnnnnnnnnnnnnnnnnnnnnnnnnnnnnnnnnnnnnnnnnnnnnnnnnnnnnnnnnnnnnnnnnnnnnnnnnnnnnnnnnnnnnnnnnnnnnnnnnnnnnnnnnnnnnnnnnnnnnnnnnnnnnnnnnnnnnnnnnnnnnnnnnnnnnnnnnnnnnnnnnnnnnnnnnnnnnnnnnnnnnnnnnnnnnnnnnnnnnnnnnnnnnnnnnnnnnnnnnnnnnnnnnnnnnnnnnnnnnnnnnnnnnnnnnnnnnnnnnnnnnnnnnnnnnnnnnnnnnnnnnnnnnnnnnnnnnnnnnnnnnnnnnnnnnnnnnnnnnnnnnnnnnnnnnnnnnnnnnnnnnnnnnnnnnnnnnnnnnnnnnnnnnnnnnnnnnnnnnnnnnnnnnnnnnnnnnnnnnnnnnnnnnnnnnnnnnnnnnnnnnnnnnnnnnnnnnnnnnnnnnnnnnnnnnnnnnnnnnnnnnnnnnnnnnnnnnnnnnnnnnnnnnnnnnnnnnnnnnnnnnnnnnnnnnnnnnnnnnnnnnnnnnnnnnnnnnnnnnnnnnnnnnnnnnnnnnnnnnnnnnnnnnnnnnnnnnnnnnnnnnnnnnnnnnnnnnnnnnnnnnnnnnnnnnnnnnnnnnnnnnnnnnnnnnnnnnnnnnnnnnnnnnnnnnnnnnnnnnnnnnnnnnnnnnnnnnnnnnnnnnnnnnnnnnnnnnnnnnnnnnnnnnnnnnnnnnnnnnnnnnnnnnnnnnnnnnnnnnnnnnnnnnnnnnnnnnnnnnnnnnnnnnnnnnnnnnnnnnnnnnnnnnnnnnnnnnnnnnnnnnnnnnnnnnnnnnnnnnnnnnnnnnnnnnnnnnnnnnnnnnnnnnnnnnnnnnnnnnnnnnnnnnnnnnnnnnnnnnnnnnnnnnnnnnnnnnnnnnnnnnnnnnnnnnnnnnnnnnnnnnnnnnnnnnnnnnnnnnnnnnnnnnnnnnnnnnnnnnnnnnnnnnnnnnnnnnnnnnnnnnnnnnnnnnnnnnnnnnnnnnnnnnnnnnnnnnnnnnnnnnnnnnnnnnnnnnnnnnnnnnnnnnnnnnnnnnnnnnnnnnnnnnnnnnnnnnnnnnnnnnnnnnnnnnnnnnnnnnnnnnnnnnnnnnnnnnnnnnnnnnnnnnnnnnnnnnnnnnnnnnnnnnnnnnnnnnnnnnnnnnnnnnnnnnnnnnnnnnnnnnnnnnnnnnnnnnnnnnnnnnnnnnnnnnnnnnnnnnnnnnnnnnnnnnnnnnnnnnnnnnnnnnnnnnnnnnnnnnnnnnnnnnnnnnnnnnnnnnnnnnnnnnnnnnnnnnnnnnnnnnnnnnnnnnnnnnnnnnnnnnnnnnnnnnnnnnnnnnnnnnnnnnnnnnnnnnnnnnnnnnnnnnnnnnnnnnnnnnnnnnnnnnnnnnnnnnnnnnnnnnnnnnnnnnnnnnnnnnnnnnnnnnnnnnnnnnnnnnnnnnnnnnnnnnnnnnnnnnnnnnnnnnnnnnnnnnnnnnnnnnnnnnnnnnnnnnnnnnnnnnnnnnnnnnnnnnnnnnnnnnnnnnnnnnnnnnnnnnnnnnnnnnnnnnnnnnnnnnnnnnnnnnnnnnnnnnnnnnnnnnnnnnnnnnnnnnnnnnnnnnnnnnnnnnnnnnnnnnnnnnnnnnnnnnnnnnnnnnnnnnnnnnnnnnnnnnnnnnnnnnnnnnnnnnnnnnnnnnnnnnnnnnnnnnnnnnnnnnnnnnnnnnnnnnnnnnnnnnnnnnnnnnnnnnnnnnnnnnnnnnnnnnnnnnnnnnnnnnnnnnnnnnnnnnnnnnnnnnnnnnnnnnnnnnnnnnnnnnnnnnnnnnnnnnnnnnnnnnnnnnnnnnnnnnnnnnnnnnnnnnnnnnnnnnnnnnnnnnnnnnnnnnnnnnnnnnnnnnnnnnnnnnnnnnnnnnnnnnnnnnnnnnnnnnnnnnnnnnnnnnnnnnnnnnnnnnnnnnnnnnnnnnnnnnnnnnnnnnnnnnnnnnnnnnnnnnnnnnnnnnnnnnnnnnnnnnnnnnnnnnnnnnnnnnnnnnnnnnnnnnnnnnnnnnnnnnnnnnnnnnnnnnnnnnnnnnnnnnnnnnnnnnnnnnnnnnnnnnnnnnnnnnnnnnnnnnnnnnnnnnnnnnnnnnnnnnnnnnnnnnnnnnnnnnnnnnnnnnnnnnnnnnnnnnnnnnnnnnnnnnnnnnnnnnnnnnnnnnnnnnnnnnnnnnnnnnnnnnnnnnnnnnnnnnnnnnnnnnnnnnnnnnnnnnnnnnnnnnnnnnnnnnnnnnnnnnnnnnnnnnnnnnnnnnnnnnnnnnnnnnnnnnnnnnnnnnnnnnnnnnnnnnnnnnnnnnnnnnnnnnnnnnnnnnnnnnnnnnnnnnnnnnnnnnnnnnnnnnnnnnnnnnnnnnnnnnnnnnnnnnnnnnnnnnnnnnnnnnnnnnnnnnnnnnnnnnnnnnnnnnnnnnnnnnnnnnnnnnnnnnnnnnnnnnnnnnnnnnnnnnnnnnnnnnnnnnnnnnnnnnnnnnnnnnnnnnnnnnnnnnnnnnnnnnnnnnnnnnnnnnnnnnnnnnnnnnnnnnnnnnnnnnnnnnnnnnnnnnnnnnnnnnnnnnnnnnnnnnnnnnnnnnnnnnnnnnnnnnnnnnnnnnnnnnnnnnnnnnnnnnnnnnnnnnnnnnnnnnnnnnnnnnnnnnnnnnnnnnnnnnnnnnnnnnnnnnnnnnnnnnnnnnnnnnnnnnnnnnnnnnnnnnnnnnnnnnnnnnnnnnnnnnnnnnnnnnnnnnnnnnnnnnnnnnnnnnnnnnnnnnnnnnnnnnnnnnnnnnnnnnnnnnnnnnnnnnnnnnnnnnnnnnnnnnnnnnnnnnnnnnnnnnnnnnnnnnnnnnnnnnnnnnnnnnnnnnnnnnnnnnnnnnnnnnnnnnnnnnnnnnnnnnnnnnnnnnnnnnnnnnnnnnnnnnnnnnnnnnnnnnnnnnnnnnnnnnnnnnnnnnnnnnnnnnnnnnnnnnnnnnnnnnnnnnnnnnnnnnnnnnnnnnnnnnnnnnnnnnnnnnnnnnnnnnnnnnnnnnnnnnnnnnnnnnnnnnnnnnnnnnnnnnnnnnnnnnnnnnnnnnnnnnnnnnnnnnnnnnnnnnnnnnnnnnnnnnnnnnnnnnnnnnnnnnnnnnnnnnnnnnnnnnnnnnnnnnnnnnnnnnnnnnnnnnnnnnnnnnnnnnnnnnnnnnnnnnnnnnnnnnnnnnnnnnnnnnnnnnnnnnnnnnnnnnnnnnnnnnnnnnnnnnnnnnnnnnnnnnnnnnnnnnnnnnnnnnnnnnnnnnnnnnnnnnnnnnnnnnnnnnnnnnnnnnnnnnnnnnnnnnnnnnnnnnnnnnnnnnnnnnnnnnnnnnnnnnnnnnnnnnnnnnnnnnnnnnnnnnnnnnnnnnnnnnnnnnnnnnnnnnnnnnnnnnnnnnnnnnnnnnnnnnnnnnnnnnnnnnnnnnnnnnnnnnnnnnnnnnnnnnnnnnnnnnnnnnnnnnnnnnnnnnnnnnnnnnnnnnnnnnnnnnnnnnnnnnnnnnnnnnnnnnnnnnnnnnnnnnnnnnnnnnnnnnnnnnnnnnnnnnnnnnnnnnnnnnnnnnnnnnnnnnnnnnnnnnnnnnnnnnnnnnnnnnnnnnnnnnnnnnnnnnnnnnnnnnnnnnnnnnnnnnnnnnnnnnnnnnnnnnnnnnnnnnnnnnnnnnnnnnnnnnnnnnnnnnnnnnnnnnnnnnnnnnnnnnnnnnnnnnnnnnnnnnnnnnnnnnnnnnnnnnnnnnnnnnnnnnnnnnnnnnnnnnnnnnnnnnnnnnnnnnnnnnnnnnnnnnnnnnnnnnnnnnnnnnnnnnnnnnnnnnnnnnnnnnnnnnnnnnnnnnnnnnnnnnnnnnnnnnnnnnnnnnnnnnnnnnnnnnnnnnnnnnnnnnnnnnnnnnnnnnnnnnnnnnnnnnnnnnnnnnnnnnnnnnnnnnnnnnnnnnnnnnnnnnnnnnnnnnnnnnnnnnnnnnnnnnnnnnnnnnnnnnnnnnnnnnnnnnnnnnnnnnnnnnnnnnnnnnnnnnnnnnnnnnnnnnnnnnnnnnnnnnnnnnnnnnnnnnnnnnnnnnnnnnnnnnnnnnnnnnnnnnnnnnnnnnnnnnnnnnnnnnnnnnnnnnnnnnnnnnnnnnnnnnnnnnnnnnnnnnnnnnnnnnnnnnnnnnnnnnnnnnnnnnnnnnnnnnnnnnnnnnnnnnnnnnnnnnnnnnnnnnnnnnnnnnnnnnnnnnnnnnnnnnnnnnnnnnnnnnnnnnnnnnnnnnnnnnnnnnnnnnnnnnnnnnnnnnnnnnnnnnnnnnnnnnnnnnnnnnnnnnnnnnnnnnnnnnnnnnnnnnnnnnnnnnnnnnnnnnnnnnnnnnnnnnnnnnnnnnnnnnnnnnnnnnnnnnnnnnnnnnnnnnnnnnnnnnnnnnnnnnnnnnnnnnnnnnnnnnnnnnnnnnnnnnnnnnnnnnnnnnnnnnnnnnnnnnnnnnnnnnnnnnnnnnnnnnnnnnnnnnnnnnnnnnnnnnnnnnnnnnnnnnnnnnnnnnnnnnnnnnnnnnnnnnnnnnnnnnnnnnnnnnnnnnnnnnnnnnnnnnnnnnnnnnnnnnnnnnnnnnnnnnnnnnnnnnnnnnnnnnnnnnnnnnnnnnnnnnnnnnnnnnnnnnnnnnnnnnnnnnnnnnnnnnnnnnnnnnnnnnnnnnnnnnnnnnnnnnnnnnnnnnnnnnnnnnnnnnnnnnnnnnnnnnnnnnnnnnnnnnnnnnnnnnnnnnnnnnnnnnnnnnnnnnnnnnnnnnnnnnnnnnnnnnnnnnnnnnnnnnnnnnnnnnnnnnnnnnnnnnnnnnnnnnnnnnnnnnnnnnnnnnnnnnnnnnnnnnnnnnnnnnnnnnnnnnnnnnnnnnnnnnnnnnnnnnnnnnnnnnnnnnnnnnnnnnnnnnnnnnnnnnnnnnnnnnnnnnnnnnnnnnnnnnnnnnnnnnnnnnnnnnnnnnnnnnnnnnnnnnnnnnnnnnnnnnnnnnnnnnnnnnnnnnnnnnnnnnnnnnnnnnnnnnnnnnnnnnnnnnnnnnnnnnnnnnnnnnnnnnnnnnnnnnnnnnnnnnnnnnnnnnnnnnnnnnnnnnnnnnnnnnnnnnnnnnnnnnnnnnnnnnnnnnnnnnnnnnnnnnnnnnnnnnnnnnnnnnnnnnnnnnnnnnnnnnnnnnnnnnnnnnnnnnnnnnnnnnnnnnnnnnnnnnnnnnnnnnnnnnnnnnnnnnnnnnnnnnnnnnnnnnnnnnnnnnnnnnnnnnnnnnnnnnnnnnnnnnnnnnnnnnnnnnnnnnnnnnnnnnnnnnnnnnnnnnnnnnnnnnnnnnnnnnnnnnnnnnnnnnnnnnnnnnnnnnnnnnnnnnnnnnnnnnnnnnnnnnnnnnnnnnnnnnnnnnnnnnnnnnnnnnnnnnnnnnnnnnnnnnnnnnnnnnnnnnnnnnnnnnnnnnnnnnnnnnnnnnnnnnnnnnnnnnnnnnnnnnnnnnnnnnnnnnnnnnnnnnnnnnnnnnnnnnnnnnnnnnnnnnnnnnnnnnnnnnnnnnnnnnnnnnnnnnnnnnnnnnnnnnnnnnnnnnnnnnnnnnnnnnnnnnnnnnnnnnnnnnnnnnnnnnnnnnnnnnnnnnnnnnnnnnnnnnnnnnnnnnnnnnnnnnnnnnnnnnnnnnnnnnnnnnnnnnnnnnnnnnnnnnnnnnnnnnnnnnnnnnnnnnnnnnnnnnnnnnnnnnnnnnnnnnnnnnnnnnnnnnnnnnnnnnnnnnnnnnnnnnnnnnnnnnnnnnnnnnnnnnnnnnnnnnnnnnnnnnnnnnnnnnnnnnnnnnnnnnnnnnnnnnnnnnnnnnnnnnnnnnnnnnnnnnnnnnnnnnnnnnnnnnnnnnnnnnnnnnnnnnnnnnnnnnnnnnnnnnnnnnnnnnnnnnnnnnnnnnnnnnnnnnnnnnnnnnnnnnnnnnnnnnnnnnnnnnnnnnnnnnnnnnnnnnnnnnnnnnnnnnnnnnnnnnnnnnnnnnnnnnnnnnnnnnnnnnnnnnnnnnnnnnnnnnnnnnnnnnnnnnnnnnnnnnnnnnnnnnnnnnnnnnnnnnnnnnnnnnnnnnnnnnnnnnnnnnnnnnnnnnnnnnnnnnnnnnnnnnnnnnnnnnnnnnnnnnnnnnnnnnnnnnnnnnnnnnnnnnnnnnnnnnnnnnnnnnnnnnnnnnnnnnnnnnnnnnnnnnnnnnnnnnnnnnnnnnnnnnnnnnnnnnnnnnnnnnnnnnnnnnnnnnnnnnnnnnnnnnnnnnnnnnnnnnnnnnnnnnnnnnnnnnnnnnnnnnnnnnnnnnnnnnnnnnnnnnnnnnnnnnnnnnnnnnnnnnnnnnnnnnnnnnnnnnnnnnnnnnnnnnnnnnnnnnnnnnnnnnnnnnnnnnnnnnnnnnnnnnnnnnnnnnnnnnnnnnnnnnnnnnnnnnnnnnnnnnnnnnnnnnnnnnnnnnnnnnnnnnnnnnnnnnnnnnnnnnnnnnnnnnnnnnnnnnnnnnnnnnnnnnnnnnnnnnnnnnnnnnnnnnnnnnnnnnnnnnnnnnnnnnnnnnnnnnnnnnnnnnnnnnnnnnnnnnnnnnnnnnnnnnnnnnnnnnnnnnnnnnnnnnnnnnnnnnnnnnnnnnnnnnnnnnnnnnnnnnnnnnnnnnnnnnnnnnnnnnnnnnnnnnnnnnnnnnnnnnnnnnnnnnnnnnnnnnnnnnnnnnnnnnnnnnnnnnnnnnnnnnnnnnnnnnnnnnnnnnnnnnnnnnnnnnnnnnnnnnnnnnnnnnnnnnnnnnnnnnnnnnnnnnnnnnnnnnnnnnnnnnnnnnnnnnnnnnnnnnnnnnnnnnnnnnnnnnnnnnnnnnnnnnnnnnnnnnnnnnnnnnnnnnnnnnnnnnnnnnnnnnnnnnnnnnnnnnnnnnnnnnnnnnnnnnnnnnnnnnnnnnnnnnnnnnnnnnnnnnnnnnnnnnnnnnnnnnnnnnnnnnnnnnnnnnnnnnnnnnnnnnnnnnnnnnnnnnnnnnnnnnnnnnnnnnnnnnnnnnnnnnnnnnnnnnnnnnnnnnnnnnnnnnnnnnnnnnnnnnnnnnnnnnnnnnnnnnnnnnnnnnnnnnnnnnnnnnnnnnnnnnnnnnnnnnnnnnnnnnnnnnnnnnnnnnnnnnnnnnnnnnnnnnnnnnnnnnnnnnnnnnnnnnnnnnnnnnnnnnnnnnnnnnnnnnnnnnnnnnnnnnnnnnnnnnnnnnnnnnnnnnnnnnnnnnnnnnnnnnnnnnnnnnnnnnnnnnnnnnnnnnnnnnnnnnnnnnnnnnnnnnnnnnnnnnnnnnnnnnnnnnnnnnnnnnnnnnnnnnnnnnnnnnnnnnnnnnnnnnnnnnnnnnnnnnnnnnnnnnnnnnnnnnnnnnnnnnnnnnnnnnnnnnnnnnnnnnnnnnnnnnnnnnnnnnnnnnnnnnnnnnnnnnnnnnnnnnnnnnnnnnnnnnnnnnnnnnnnnnnnnnnnnnnnnnnnnnnnnnnnnnnnnnnnnnnnnnnnnnnnnnnnnnnnnnnnnnnnnnnnnnnnnnnnnnnnnnnnnnnnnnnnnnnnnnnnnnnnnnnnnnnnnnnnnnnnnnnnnnnnnnnnnnnnnnnnnnnnnnnnnnnnnnnnnnnnnnnnnnnnnnnnnnnnnnnnnnnnnnnnnnnnnnnnnnnnnnnnnnnnnnnnnnnnnnnnnnnnnnnnnnnnnnnnnnnnnnnnnnnnnnnnnnnnnnnnnnnnnnnnnnnnnnnnnnnnnnnnnnnnnnnnnnnnnnnnnnnnnnnnnnnnnnnnnnnnnnnnnnnnnnnnnnnnnnnnnnnnnnnnnnnnnnnnnnnnnnnnnnnnnnnnnnnnnnnnnnnnnnnnnnnnnnnnnnnnnnnnnnnnnnnnnnnnnnnnnnnnnnnnnnnnnnnnnnnnnnnnnnnnnnnnnnnnnnnnnnnnnnnnnnnnnnnnnnnnnnnnnnnnnnnnnnnnnnnnnnnnnnnnnnnnnnnnnnnnnnnnnnnnnnnnnnnnnnnnnnnnnnnnnnnnnnnnnnnnnnnnnnnnnnnnnnnnnnnnnnnnnnnnnnnnnnnnnnnnnnnnnnnnnnnnnnnnnnnnnnnnnnnnnnnnnnnnnnnnnnnnnnnnnnnnnnnnnnnnnnnnnnnnnnnnnnnnnnnnnnnnnnnnnnnnnnnnnnnnnnnnnnnnnnnnnnnnnnnnnnnnnnnnnnnnnnnnnnnnnnnnnnnnnnnnnnnnnnnnnnnnnnnnnnnnnnnnnnnnnnnnnnnnnnnnnnnnnnnnnnnnnnnnnnnnnnnnnnnnnnnnnnnnnnnnnnnnnnnnnnnnnnnnnnnnnnnnnnnnnnnnnnnnnnnnnnnnnnnnnnnnnnnnnnnnnnnnnnnnnnnnnnnnnnnnnnnnnnnnnnnnnnnnnnnnnnnnnnnnnnnnnnnnnnnnnnnnnnnnnnnnnnnnnnnnnnnnnnnnnnnnnnnnnnnnnnnnnnnnnnnnnnnnnnnnnnnnnnnnnnnnnnnnnnnnnnnnnnnnnnnnnnnnnnnnnnnnnnnnnnnnnnnnnnnnnnnnnnnnnnnnnnnnnnnnnnnnnnnnnnnnnnnnnnnnnnnnnnnnnnnnnnnnnnnnnnnnnnnnnnnnnnnnnnnnnnnnnnnnnnnnnnnnnnnnnnnnnnnnnnnnnnnnnnnnnnnnnnnnnnnnnnnnnnnnnnnnnnnnnnnnnnnnnnnnnnnnnnnnnnnnnnnnnnnnnnnnnnnnnnnnnnnnnnnnnnnnnnnnnnnnnnnnnnnnnnnnnnnnnnnnnnnnnnnnnnnnnnnnnnnnnnnnnnnnnnnnnnnnnnnnnnnnnnnnnnnnnnnnnnnnnnnnnnnnnnnnnnnnnnnnnnnnnnnnnnnnnnnnnnnnnnnnnnnnnnnnnnnnnnnnnnnnnnnnnnnnnnnnnnnnnnnnnnnnnnnnnnnnnnnnnnnnnnnnnnnnnnnnnnnnnnnnnnnnnnnnnnnnnnnnnnnnnnnnnnnnnnnnnnnnnnnnnnnnnnnnnnnnnnnnnnnnnnnnnnnnnnnnnnnnnnnnnnnnnnnnnnnnnnnnnnnnnnnnnnnnnnnnnnnnnnnnnnnnnnnnnnnnnnnnnnnnnnnnnnnnnnnnnnnnnnnnnnnnnnnnnnnnnnnnnnnnnnnnnnnnnnnnnnnnnnnnnnnnnnnnnnnnnnnnnnnnnnnnnnnnnnnnnnnnnnnnnnnnnnnnnnnnnnnnnnnnnnnnnnnnnnnnnnnnnnnnnnnnnnnnnnnnnnnnnnnnnnnnnnnnnnnnnnnnnnnnnnnnnnnnnnnnnnnnnnnnnnnnnnnnnnnnnnnnnnnnnnnnnnnnnnnnnnnnnnnnnnnnnnnnnnnnnnnnnnnnnnnnnnnnnnnnnnnnnnnnnnnnnnnnnnnnnnnnnnnnnnnnnnnnnnnnnnnnnnnnnnnnnnnnnnnnnnnnnnnnnnnnnnnnnnnnnnnnnnnnnnnnnnnnnnnnnnnnnnnnnnnnnnnnnnnnnnnnnnnnnnnnnnnnnnnnnnnnnnnnnnnnnnnnnnnnnnnnnnnnnnnnnnnnnnnnnnnnnnnnnnnnnnnnnnnnnnnnnnnnnnnnnnnnnnnnnnnnnnnnnnnnnnnnnnnnnnnnnnnnnnnnnnnnnnnnnnnnnnnnnnnnnnnnnnnnnnnnnnnnnnnnnnnnnnnnnnnnnnnnnnnnnnnnnnnnnnnnnnnnnnnnnnnnnnnnnnnnnnnnnnnnnnnnnnnnnnnnnnnnnnnnnnnnnnnnnnnnnnnnnnnnnnnnnnnnnnnnnnnnnnnnnnnnnnnnnnnnnnnnnnnnnnnnnnnnnnnnnnnnnnnnnnnnnnnnnnnnnnnnnnnnnnnnnnnnnnnnnnnnnnnnnnnnnnnnnnnnnnnnnnnnnnnnnnnnnnnnnnnnnnnnnnnnnnnnnnnnnnnnnnnnnnnnnnnnnnnnnnnnnnnnnnnnnnnnnnnnnnnnnnnnnnnnnnnnnnnnnnnnnnnnnnnnnnnnnnnnnnnnnnnnnnnnnnnnnnnnnnnnnnnnnnnnnnnnnnnnnnnnnnnnnnnnnnnnnnnnnnnnnnnnnnnnnnnnnnnnnnnnnnnnnnnnnnnnnnnnnnnnnnnnnnnnnnnnnnnnnnnnnnnnnnnnnnnnnnnnnnnnnnnnnnnnnnnnnnnnnnnnnnnnnnnnnnnnnnnnnnnnnnnnnnnnnnnnnnnnnnnnnnnnnnnnnnnnnnnnnnnnnnnnnnnnnnnnnnnnnnnnnnnnnnnnnnnnnnnnnnnnnnnnnnnnnnnnnnnnnnnnnnnnnnnnnnnnnnnnnnnnnnnnnnnnnnnnnnnnnnnnnnnnnnnnnnnnnnnnnnnnnnnnnnnnnnnnnnnnnnnnnnnnnnnnnnnnnnnnnnnnnnnnnnnnnnnnnnnnnnnnnnnnnnnnnnnnnnnnnnnnnnnnnnnnnnnnnnnnnnnnnnnnnnnnnnnnnnnnnnnnnnnnnnnnnnnnnnnnnnnnnnnnnnnnnnnnnnnnnnnnnnnnnnnnnnnnnnnnnnnnnnnnnnnnnnnnnnnnnnnnnnnnnnnnnnnnnnnnnnnnnnnnnnnnnnnnnnnnnnnnnnnnnnnnnnnnnnnnnnnnnnnnnnnnnnnnnnnnnnnnnnnnnnnnnnnnnnnnnnnnnnnnnnnnnnnnnnnnnnnnnnnnnnnnnnnnnnnnnnnnnnnnnnnnnnnnnnnnnnnnnnnnnnnnnnnnnnnnnnnnnnnnnnnnnnnnnnnnnnnnnnnnnnnnnnnnnnnnnnnnnnnnnnnnnnnnnnnnnnnnnnnnnnnnnnnnnnnnnnnnnnnnnnnnnnnnnnnnnnnnnnnnnnnnnnnnnnnnnnnnnnnnnnnnnnnnnnnnnnnnnnnnnnnnnnnnnnnnnnnnnnnnnnnnnnnnnnnnnnnnnnnnnnnnnnnnnnnnnnnnnnnnnnnnnnnnnnnnnnnnnnnnnnnnnnnnnnnnnnnnnnnnnnnnnnnnnnnnnnnnnnnnnnnnnnnnnnnnnnnnnnnnnnnnnnnnnnnnnnnnnnnnnnnnnnnnnnnnnnnnnnnnnnnnnnnnnnnnnnnnnnnnnnnnnnnnnnnnnnnnnnnnnnnnnnnnnnnnnnnnnnnnnnnnnnnnnnnnnnnnnnnnnnnnnnnnnnnnnnnnnnnnnnnnnnnnnnnnnnnnnnnnnnnnnnnnnnnnnnnnnnnnnnnnnnnnnnnnnnnnnnnnnnnnnnnnnnnnnnnnnnnnnnnnnnnnnnnnnnnnnnnnnnnnnnnnnnnnnnnnnnnnnnnnnnnnnnnnnnnnnnnnnnnnnnnnnnnnnnnnnnnnnnnnnnnnnnnnnnnnnnnnnnnnnnnnnnnnnnnnnnnnnnnnnnnnnnnnnnnnnnnnnnnnnnnnnnnnnnnnnnnnnnnnnnnnnnnnnnnnnnnnnnnnnnnnnnnnnnnnnnnnnnnnnnnnnnnnnnnnnnnnnnnnnnnnnnnnnnnnnnnnnnnnnnnnnnnnnnnnnnnnnnnnnnnnnnnnnnnnnnnnnnnnnnnnnnnnnnnnnnnnnnnnnnnnnnnnnnnnnnnnnnnnnnnnnnnnnnnnnnnnnnnnnnnnnnnnnnnnnnnnnnnnnnnnnnnnnnnnnnnnnnnnnnnnnnnnnnnnnnnnnnnnnnnnnnnnnnnnnnnnnnnnnnnnnnnnnnnnnnnnnnnnnnnnnnnnnnnnnnnnnnnnnnnnnnnnnnnnnnnnnnnnnnnnnnnnnnnnnnnnnnnnnnnnnnnnnnnnnnnnnnnnnnnnnnnnnnnnnnnnnnnnnnnnnnnnnnnnnnnnnnnnnnnnnnnnnnnnnnnnnnnnnnnnnnnnnnnnnnnnnnnnnnnnnnnnnnnnnnnnnnnnnnnnnnnnnnnnnnnnnnnnnnnnnnnnnnnnnnnnnnnnnnnnnnnnnnnnnnnnnnnnnnnnnnnnnnnnnnnnnnnnnnnnnnnnnnnnnnnnnnnnnnnnnnnnnnnnnnnnnnnnnnnnnnnnnnnnnnnnnnnnnnnnnnnnnnnnnnnnnnnnnnnnnnnnnnnnnnnnnnnnnnnnnnnnnnnnnnnnnnnnnnnnnnnnnnnnnnnnnnnnnnnnnnnnnnnnnnnnnnnnnnnnnnnnnnnnnnnnnnnnnnnnnnnnnnnnnnnnnnnnnnnnnnnnnnnnnnnnnnnnnnnnnnnnnnnnnnnnnnnnnnnnnnnnnnnnnnnnnnnnnnnnnnnnnnnnnnnnnnnnnnnnnnnnnnnnnnnnnnnnnnnnnnnnnnnnnnnnnnnnnnnnnnnnnnnnnnnnnnnnnnnnnnnnnnnnnnnnnnnnnnnnnnnnnnnnnnnnnnnnnnnnnnnnnnnnnnnnnnnnnnnnnnnnnnnnnnnnnnnnnnnnnnnnnnnnnnnnnnnnnnnnnnnnnnnnnnnnnnnnnnnnnnnnnnnnnnnnnnnnnnnnnnnnnnnnnnnnnnnnnnnnnnnnnnnnnnnnnnnnnnnnnnnnnnnnnnnnnnnnnnnnnnnnnnnnnnnnnnnnnnnnnnnnnnnnnnnnnnnnnnnnnnnnnnnnnnnnnnnnnnnnnnnnnnnnnnnnnnnnnnnnnnnnnnnnnnnnnnnnnnnnnnnnnnnnnnnnnnnnnnnnnnnnnnnnnnnnnnnnnnnnnnnnnnnnnnnnnnnnnnnnnnnnnnnnnnnnnnnnnnnnnnnnnnnnnnnnnnnnnnnnnnnnnnnnnnnnnnnnnnnnnnnnnnnnnnnnnnnnnnnnnnnnnnnnnnnnnnnnnnnnnnnnnnnnnnnnnnnnnnnnnnnnnnnnnnnnnnnnnnnnnnnnnnnnnnnnnnnnnnnnnnnnnnnnnnnnnnnnnnnnnnnnnnnnnnnnnnnnnnnnnnnnnnnnnnnnnnnnnnnnnnnnnnnnnnnnnnnnnnnnnnnnnnnnnnnnnnnnnnnnnnnnnnnnnnnnnnnnnnnnnnnnnnnnnnnnnnnnnnnnnnnnnnnnnnnnnnnnnnnnnnnnnnnnnnnnnnnnnnnnnnnnnnnnnnnnnnnnnnnnnnnnnnnnnnnnnnnnnnnnnnnnnnnnnnnnnnnnnnnnnnnnnnnnnnnnnnnnnnnnnnnnnnnnnnnnnnnnnnnnnnnnnnnnnnnnnnnnnnnnnnnnnnnnnnnnnnnnnnnnnnnnnnnnnnnnnnnnnnnnnnnnnnnnnnnnnnnnnnnnnnnnnnnnnnnnnnnnnnnnnnnnnnnnnnnnnnnnnnnnnnnnnnnnnnnnnnnnnnnnnnnnnnnnnnnnnnnnnnnnnnnnnnnnnnnnnnnnnnnnnnnnnnnnnnnnnnnnnnnnnnnnnnnnnnnnnnnnnnnnnnnnnnnnnnnnnnnnnnnnnnnnnnnnnnnnnnnnnnnnnnnnnnnnnnnnnnnnnnnnnnnnnnnnnnnnnnnnnnnnnnnnnnnnnnnnnnnnnnnnnnnnnnnnnnnnnnnnnnnnnnnnnnnnnnnnnnnnnnnnnnnnnnnnnnnnnnnnnnnnnnnnnnnnnnnnnnnnnnnnnnnnnnnnnnnnnnnnnnnnnnnnnnnnnnnnnnnnnnnnnnnnnnnnnnnnnnnnnnnnnnnnnnnnnnnnnnnnnnnnnnnnnnnnnnnnnnnnnnnnnnnnnnnnnnnnnnnnnnnnnnnnnnnnnnnnnnnnnnnnnnnnnnnnnnnnnnnnnnnnnnnnnnnnnnnnnnnnnnnnnnnnnnnnnnnnnnnnnnnnnnnnnnnnnnnnnnnnnnnnnnnnnnnnnnnnnnnnnnnnnnnnnnnnnnnnnnnnnnnnnnnnnnnnnnnnnnnnnnnnnnnnnnnnnnnnnnnnnnnnnnnnnnnnnnnnnnnnnnnnnnnnnnnnnnnnnnnnnnnnnnnnnnnnnnnnnnnnnnnnnnnnnnnnnnnnnnnnnnnnnnnnnnnnnnnnnnnnnnnnnnnnnnnnnnnnnnnnnnnnnnnnnnnnnnnnnnnnnnnnnnnnnnnnnnnnnnnnnnnnnnnnnnnnnnnnnnnnnnnnnnnnnnnnnnnnnnnnnnnnnnnnnnnnnnnnnnnnnnnnnnnnnnnnnnnnnnnnnnnnnnnnnnnnnnnnnnnnnnnnnnnnnnnnnnnnnnnnnnnnnnnnnnnnnnnnnnnnnnnnnnnnnnnnnnnnnnnnnnnnnnnnnnnnnnnnnnnnnnnnnnnnnnnnnnnnnnnnnnnnnnnnnnnnnnnnnnnnnnnnnnnnnnnnnnnnnnnnnnnnnnnnnnnnnnnnnnnnnnnnnnnnnnnnnnnnnnnnnnnnnnnnnnnnnnnnnnnnnnnnnnnnnnnnnnnnnnnnnnnnnnnnnnnnnnnnnnnnnnnnnnnnnnnnnnnnnnnnnnnnnnnnnnnnnnnnnnnnnnnnnnnnnnnnnnnnnnnnnnnnnnnnnnnnnnnnnnnnnnnnnnnnnnnnnnnnnnnnnnnnnnnnnnnnnnnnnnnnnnnnnnnnnnnnnnnnnnnnnnnnnnnnnnnnnnnnnnnnnnnnnnnnnnnnnnnnnnnnnnnnnnnnnnnnnnnnnnnnnnnnnnnnnnnnnnnnnnnnnnnnnnnnnnnnnnnnnnnnnnnnnnnnnnnnnnnnnnnnnnnnnnnnnnnnnnnnnnnnnnnnnnnnnnnnnnnnnnnnnnnnnnnnnnnnnnnnnnnnnnnnnnnnnnnnnnnnnnnnnnnnnnnnnnnnnnnnnnnnnnnnnnnnnnnnnnnnnnnnnnnnnnnnnnnnnnnnnnnnnnnnnnnnnnnnnnnnnnnnnnnnnnnnnnnnnnnnnnnnnnnnnnnnnnnnnnnnnnnnnnnnnnnnnnnnnnnnnnnnnnnnnnnnnnnnnnnnnnnnnnnnnnnnnnnnnnnnnnnnnnnnnnnnnnnnnnnnnnnnnnnnnnnnnnnnnnnnnnnnnnnnnnnnnnnnnnnnnnnnnnnnnnnnnnnnnnnnnnnnnnnnnnnnnnnnnnnnnnnnnnnnnnnnnnnnnnnnnnnnnnnnnnnnnnnnnnnnnnnnnnnnnnnnnnnnnnnnnnnnnnnnnnnnnnnnnnnnnnnnnnnnnnnnnnnnnnnnnnnnnnnnnnnnnnnnnnnnnnnnnnnnnnnnnnnnnnnnnnnnnnnnnnnnnnnnnnnnnnnnnnnnnnnnnnnnnnnnnnnnnnnnnnnnnnnnnnnnnnnnnnnnnnnnnnnnnnnnnnnnnnnnnnnnnnnnnnnnnnnnnnnnnnnnnnnnnnnnnnnnnnnnnnnnnnnnnnnnnnnnnnnnnnnnnnnnnnnnnnnnnnnnnnnnnnnnnnnnnnnnnnnnnnnnnnnnnnnnnnnnnnnnnnnnnnnnnnnnnnnnnnnnnnnnnnnnnnnnnnnnnnnnnnnnnnnnnnnnnnnnnnnnnnnnnnnnnnnnnnnnnnnnnnnnnnnnnnnnnnnnnnnnnnnnnnnnnnnnnnnnnnnnnnnnnnnnnnnnnnnnnnnnnnnnnnnnnnnnnnnnnnnnnnnnnnnnnnnnnnnnnnnnnnnnnnnnnnnnnnnnnnnnnnnnnnnnnnnnnnnnnnnnnnnnnnnnnnnnnnnnnnnnnnnnnnnnnnnnnnnnnnnnnnnnnnnnnnnnnnnnnnnnnnnnnnnnnnnnnnnnnnnnnnnnnnnnnnnnnnnnnnnnnnnnnnnnnnnnnnnnnnnnnnnnnnnnnnnnnnnnnnnnnnnnnnnnnnnnnnnnnnnnnnnnnnnnnnnnnnnnnnnnnnnnnnnnnnnnnnnnnnnnnnnnnnnnnnnnnnnnnnnnnnnnnnnnnnnnnnnnnnnnnnnnnnnnnnnnnnnnnnnnnnnnnnnnnnnnnnnnnnnnnnnnnnnnnnnnnnnnnnnnnnnnnnnnnnnnnnnnnnnnnnnnnnnnnnnnnnnnnnnnnnnnnnnnnnnnnnnnnnnnnnnnnnnnnnnnnnnnnnnnnnnnnnnnnnnnnnnnnnnnnnnnnnnnnnnnnnnnnnnnnnnnnnnnnnnnnnnnnnnnnnnnnnnnnnnnnnnnnnnnnnnnnnnnnnnnnnnnnnnnnnnnnnnnnnnnnnnnnnnnnnnnnnnnnnnnnnnnnnnnnnnnnnnnnnnnnnnnnnnnnnnnnnnnnnnnnnnnnnnnnnnnnnnnnnnnnnnnnnnnnnnnnnnnnnnnnnnnnnnnnnnnnnnnnnnnnnnnnnnnnnnnnnnnnnnnnnnnnnnnnnnnnnnnnnnnnnnnnnnnnnnnnnnnnnnnnnnnnnnnnnnnnnnnnnnnnnnnnnnnnnnnnnnnnnnnnnnnnnnnnnnnnnnnnnnnnnnnnnnnnnnnnnnnnnnnnnnnnnnnnnnnnnnnnnnnnnnnnnnnnnnnnnnnnnnnnnnnnnnnnnnnnnnnnnnnnnnnnnnnnnnnnnnnnnnnnnnnnnnnnnnnnnnnnnnnnnnnnnnnnnnnnnnnnnnnnnnnnnnnnnnnnnnnnnnnnnnnnnnnnnnnnnnnnnnnnnnnnnnnnnnnnnnnnnnnnnnnnnnnnnnnnnnnnnnnnnnnnnnnnnnnnnnnnnnnnnnnnnnnnnnnnnnnnnnnnnnnnnnnnnnnnnnnnnnnnnnnnnnnnnnnnnnnnnnnnnnnnnnnnnnnnnnnnnnnnnnnnnnnnnnnnnnnnnnnnnnnnnnnnnnnnnnnnnnnnnnnnnnnnnnnnnnnnnnnnnnnnnnnnnnnnnnnnnnnnnnnnnnnnnnnnnnnnnnnnnnnnnnnnnnnnnnnnnnnnnnnnnnnnnnnnnnnnnnnnnnnnnnnnnnnnnnnnnnnnnnnnnnnnnnnnnnnnnnnnnnnnnnnnnnnnnnnnnnnnnnnnnnnnnnnnnnnnnnnnnnnnnnnnnnnnnnnnnnnnnnnnnnnnnnnnnnnnnnnnnnnnnnnnnnnnnnnnnnnnnnnnnnnnnnnnnnnnnnnnnnnnnnnnnnnnnnnnnnnnnnnnnnnnnnnnnnnnnnnnnnnnnnnnnnnnnnnnnnnnnnnnnnnnnnnnnnnnnnnnnnnnnnnnnnnnnnnnnnnnnnnnnnnnnnnnnnnnnnnnnnnnnnnnnnnnnnnnnnnnnnnnnnnnnnnnnnnnnnnnnnnnnnnnnnnnnnnnnnnnnnnnnnnnnnnnnnnnnnnnnnnnnnnnnnnnnnnnnnnnnnnnnnnnnnnnnnnnnnnnnnnnnnnnnnnnnnnnnnnnnnnnnnnnnnnnnnnnnnnnnnnnnnnnnnnnnnnnnnnnnnnnnnnnnnnnnnnnnnnnnnnnnnnnnnnnnnnnnnnnnnnnnnnnnnnnnnnnnnnnnnnnnnnnnnnnnnnnnnnnnnnnnnnnnnnnnnnnnnnnnnnnnnnnnnnnnnnnnnnnnnnnnnnnnnnnnnnnnnnnnnnnnnnnnnnnnnnnnnnnnnnnnnnnnnnnnnnnnnnnnnnnnnnnnnnnnnnnnnnnnnnnnnnnnnnnnnnnnnnnnnnnnnnnnnnnnnnnnnnnnnnnnnnnnnnnnnnnnnnnnnnnnnnnnnnnnnnnnnnnnnnnnnnnnnnnnnnnnnnnnnnnnnnnnnnnnnnnnnnnnnnnnnnnnnnnnnnnnnnnnnnnnnnnnnnnnnnnnnnnnnnnnnnnnnnnnnnnnnnnnnnnnnnnnnnnnnnnnnnnnnnnnnnnnnnnnnnnnnnnnnnnnnnnnnnnnnnnnnnnnnnnnnnnnnnnnnnnnnnnnnnnnnnnnnnnnnnnnnnnnnnnnnnnnnnnnnnnnnnnnnnnnnnnnnnnnnnnnnnnnnnnnnnnnnnnnnnnnnnnnnnnnnnnnnnnnnnnnnnnnnnnnnnnnnnnnnnnnnnnnnnnnnnnnnnnnnnnnnnnnnnnnnnnnnnnnnnnnnnnnnnnnnnnnnnnnnnnnnnnnnnnnnnnnnnnnnnnnnnnnnnnnnnnnnnnnnnnnnnnnnnnnnnnnnnnnnnnnnnnnnnnnnnnnnnnnnnnnnnnnnnnnnnnnnnnnnnnnnnnnnnnnnnnnnnnnnnnnnnnnnnnnnnnnnnnnnnnnnnnnnnnnnnnnnnnnnnnnnnnnnnnnnnnnnnnnnnnnnnnnnnnnnnnnnnnnnnnnnnnnnnnnnnnnnnnnnnnnnnnnnnnnnnnnnnnnnnnnnnnnnnnnnnnnnnnnnnnnnnnnnnnnnnnnnnnnnnnnnnnnnnnnnnnnnnnnnnnnnnnnnnnnnnnnnnnnnnnnnnnnnnnnnnnnnnnnnnnnnnnnnnnnnnnnnnnnnnnnnnnnnnnnnnnnnnnnnnnnnnnnnnnnnnnnnnnnnnnnnnnnnnnnnnnnnnnnnnnnnnnnnnnnnnnnnnnnnnnnnnnnnnnnnnnnnnnnnnnnnnnnnnnnnnnnnnnnnnnnnnnnnnnnnnnnnnnnnnnnnnnnnnnnnnnnnnnnnnnnnnnnnnnnnnnnnnnnnnnnnnnnnnnnnnnnnnnnnnnnnnnnnnnnnnnnnnnnnnnnnnnnnnnnnnnnnnnnnnnnnnnnnnnnnnnnnnnnnnnnnnnnnnnnnnnnnnnnnnnnnnnnnnnnnnnnnnnnnnnnnnnnnnnnnnnnnnnnnnnnnnnnnnnnnnnnnnnnnnnnnnnnnnnnnnnnnnnnnnnnnnnnnnnnnnnnnnnnnnnnnnnnnnnnnnnnnnnnnnnnnnnnnnnnnnnnnnnnnnnnnnnnnnnnnnnnnnnnnnnnnnnnnnnnnnnnnnnnnnnnnnnnnnnnnnnnnnnnnnnnnnnnnnnnnnnnnnnnnnnnnnnnnnnnnnnnnnnnnnnnnnnnnnnnnnnnnnnnnnnnnnnnnnnnnnnnnnnnnnnnnnnnnnnnnnnnnnnnnnnnnnnnnnnnnnnnnnnnnnnnnnnnnnnnnnnnnnnnnnnnnnnnnnnnnnnnnnnnnnnnnnnnnnnnnnnnnnnnnnnnnnnnnnnnnnnnnnnnnnnnnnnnnnnnnnnnnnnnnnnnnnnnnnnnnnnnnnnnnnnnnnnnnnnnnnnnnnnnnnnnnnnnnnnnnnnnnnnnnnnnnnnnnnnnnnnnnnnnnnnnnnnnnnnnnnnnnnnnnnnnnnnnnnnnnnnnnnnnnnnnnnnnnnnnnnnnnnnnnnnnnnnnnnnnnnnnnnnnnnnnnnnnnnnnnnnnnnnnnnnnnnnnnnnnnnnnnnnnnnnnnnnnnnnnnnnnnnnnnnnnnnnnnnnnnnnnnnnnnnnnnnnnnnnnnnnnnnnnnnnnnnnnnnnnnnnnnnnnnnnnnnnnnnnnnnnnnnnnnnnnnnnnnnnnnnnnnnnnnnnnnnnnnnnnnnnnnnnnnnnnnnnnnnnnnnnnnnnnnnnnnnnnnnnnnnnnnnnnnnnnnnnnnnnnnnnnnnnnnnnnnnnnnnnnnnnnnnnnnnnnnnnnnnnnnnnnnnnnnnnnnnnnnnnnnnnnnnnnnnnnnnnnnnnnnnnnnnnnnnnnnnnnnnnnnnnnnnnnnnnnnnnnnnnnnnnnnnnnnnnnnnnnnnnnnnnnnnnnnnnnnnnnnnnnnnnnnnnnnnnnnnnnnnnnnnnnnnnnnnnnnnnnnnnnnnnnnnnnnnnnnnnnnnnnnnnnnnnnnnnnnnnnnnnnnnnnnnnnnnnnnnnnnnnnnnnnnnnnnnnnnnnnnnnnnnnnnnnnnnnnnnnnnnnnnnnnnnnnnnnnnnnnnnnnnnnnnnnnnnnnnnnnnnnnnnnnnnnnnnnnnnnnnnnnnnnnnnnnnnnnnnnnnnnnnnnnnnnnnnnnnnnnnnnnnnnnnnnnnnnnnnnnnnnnnnnnnnnnnnnnnnnnnnnnnnnnnnnnnnnnnnnnnnnnnnnnnnnnnnnnnnnnnnnnnnnnnnnnnnnnnnnnnnnnnnnnnnnnnnnnnnnnnnnnnnnnnnnnnnnnnnnnnnnnnnnnnnnnnnnnnnnnnnnnnnnnnnnnnnnnnnnnnnnnnnnnnnnnnnnnnnnnnnnnnnnnnnnnnnnnnnnnnnnnnnnnnnnnnnnnnnnnnnnnnnnnnnnnnnnnnnnnnnnnnnnnnnnnnnnnnnnnnnnnnnnnnnnnnnnnnnnnnnnnnnnnnnnnnnnnnnnnnnnnnnnnnnnnnnnnnnnnnnnnnnnnnnnnnnnnnnnnnnnnnnnnnnnnnnnnnnnnnnnnnnnnnnnnnnnnnnnnnnnnnnnnnnnnnnnnnnnnnnnnnnnnnnnnnnnnnnnnnnnnnnnnnnnnnnnnnnnnnnnnnnnnnnnnnnnnnnnnnnnnnnnnnnnnnnnnnnnnnnnnnnnnnnnnnnnnnnnnnnnnnnnnnnnnnnnnnnnnnnnnnnnnnnnnnnnnnnnnnnnnnnnnnnnnnnnnnnnnnnnnnnnnnnnnnnnnnnnnnnnnnnnnnnnnnnnnnnnnnnnnnnnnnnnnnnnnnnnnnnnnnnnnnnnnnnnnnnnnnnnnnnnnnnnnnnnnnnnnnnnnnnnnnnnnnnnnnnnnnnnnnnnnnnnnnnnnnnnnnnnnnnnnnnnnnnnnnnnnnnnnnnnnnnnnnnnnnnnnnnnnnnnnnnnnnnnnnnnnnnnnnnnnnnnnnnnnnnnnnnnnnnnnnnnnnnnnnnnnnnnnnnnnnnnnnnnnnnnnnnnnnnnnnnnnnnnnnnnnnnnnnnnnnnnnnnnnnnnnnnnnnnnnnnnnnnnnnnnnnnnnnnnnnnnnnnnnnnnnnnnnnnnnnnnnnnnnnnnnnnnnnnnnnnnnnnnnnnnnnnnnnnnnnnnnnnnnnnnnnnnnnnnnnnnnnnnnnnnnnnnnnnnnnnnnnnnnnnnnnnnnnnnnnnnnnnnnnnnnnnnnnnnnnnnnnnnnnnnnnnnnnnnnnnnnnnnnnnnnnnnnnnnnnnnnnnnnnnnnnnnnnnnnnnnnnnnnnnnnnnnnnnnnnnnnnnnnnnnnnnnnnnnnnnnnnnnnnnnnnnnnnnnnnnnnnnnnnnnnnnnnnnnnnnnnnnnnnnnnnnnnnnnnnnnnnnnnnnnnnnnnnnnnnnnnnnnnnnnnnnnnnnnnnnnnnnnnnnnnnnnnnnnnnnnnnnnnnnnnnnnnnnnnnnnnnnnnnnnnnnnnnnnnnnnnnnnnnnnnnnnnnnnnnnnnnnnnnnnnnnnnnnnnnnnnnnnnnnnnnnnnnnnnnnnnnnnnnnnnnnnnnnnnnnnnnnnnnnnnnnnnnnnnnnnnnnnnnnnnnnnnnnnnnnnnnnnnnnnnnnnnnnnnnnnnnnnnnnnnnnnnnnnnnnnnnnnnnnnnnnnnnnnnnnnnnnnnnnnnnnnnnnnnnnnnnnnnnnnnnnnnnnnnnnnnnnnnnnnnnnnnnnnnnnnnnnnnnnnnnnnnnnnnnnnnnnnnnnnnnnnnnnnnnnnnnnnnnnnnnnnnnnnnnnnnnnnnnnnnnnnnnnnnnnnnnnnnnnnnnnnnnnnnnnnnnnnnnnnnnnnnnnnnnnnnnnnnnnnnnnnnnnnnnnnnnnnnnnnnnnnnnnnnnnnnnnnnnnnnnnnnnnnnnnnnnnnnnnnnnnnnnnnnnnnnnnnnnnnnnnnnnnnnnnnnnnnnnnnnnnnnnnnnnnnnnnnnnnnnnnnnnnnnnnnnnnnnnnnnnnnnnnnnnnnnnnnnnnnnnnnnnnnnnnnnnnnnnnnnnnnnnnnnnnnnnnnnnnnnnnnnnnnnnnnnnnnnnnnnnnnnnnnnnnnnnnnnnnnnnnnnnnnnnnnnnnnnnnnnnnnnnnnnnnnnnnnnnnnnnnnnnnnnnnnnnnnnnnnnnnnnnnnnnnnnnnnnnnnnnnnnnnnnnnnnnnnnnnnnnnnnnnnnnnnnnnnnnnnnnnnnnnnnnnnnnnnnnnnnnnnnnnnnnnnnnnnnnnnnnnnnnnnnnnnnnnnnnnnnnnnnnnnnnnnnnnnnnnnnnnnnnnnnnnnnnnnnnnnnnnnnnnnnnnnnnnnnnnnnnnnnnnnnnnnnnnnnnnnnnnnnnnnnnnnnnnnnnnnnnnnnnnnnnnnnnnnnnnnnnnnnnnnnnnnnnnnnnnnnnnnnnnnnnnnnnnnnnnnnnnnnnnnnnnnnnnnnnnnnnnnnnnnnnnnnnnnncccggtgttcacgacctcatccatgtagcgacgcaccagcagtttgttttcttctgttgacatgattataccgcctgtaccttgaagccgcagagctggcagaagtctttgacctgatgcttgtaatcgccgtagaagaagatctggtggaagccggggaagttgagcacctcctggccgccgtcgaacttgactttcaccgagacgacgcatccgccgctgggcggcacctccttgttctcgacgaccgtccctgccgagaccaggaccgcggacggcgtctgcgcactgcccggcagcaggtcgatgctcgtgacccgctggcccttgcgccagatggtccgcggcacggcgtcacggttgccgtggtgatgcttgatgtcgaaaggctcgggagcctgctcgaagccgttcagccgcgtcgggcaggagcagtgagcgccgatgatggtgtcatcggccgtatcggccacggggtcctgctgaaagcccggccggtcgaacaggtaatggaccatcaccagcgatgccaccgccccgtaatccgcctcgcacgccgccgggatgccgtcgtcgttcatccgcgaccacgcgatgcacggcaggctcacctggatattgcccagcgccccgaggcagtccatcgtgattgcgtcaccgccctcgcgttcgagcagcttgcccgcgacgtaatagctcttgagcccgttgatcacgtcctcccgggtcgcgtcgattcgtcgccgggcccgcttcacgtattcattcgccatcgccagaatgtcctcactatccggcgtgcgtcgatactcctcgatgaacacggaggcgggaacgtgcctcagcgtgatgcccgtgtcggccagcacggaatcatatcgcttgtcgccctggatcgccacgcagcacgtccggcgcatcttggccgccgcacaaagcatcttgatgccgtaggccgcctggctgaaatcatccgtggagtacaccacgcatcccggcgcccccgcgaactcagcggtgttcgtcgtgaaagatgtccccagcggcgaatagatgatcgatggaatgccggattgggccaccttctgcgccgtcggccaggcatgctcctgccggtcgagcatcgccagtacaagaccatcgactttcgccgccttggcttccgccagccacgcctgtccctcggccagactgtagatcggctttgaccgcatctccagtcccgccccaagccgcgacgccgtctccgcgatcttcgctgtgtacatcccgagtgccgcctcgccgtcatagaccgcccccggccacagcatcccatactcgcgctgccgccgcacgaacgccgcccatagcgtgggcctgtacttcgccgccggtccacactgccggatcggcggcacatcggcccgcttctgtttcagcgacgagcatcccgccagcaccgacgtaccggccagaagcaccgtggagcccttgagaaactcacgccggctgacacaatcatgctcgtgacaatgcagaggacatcttccaaccgtcatggcgacctcccgtacccaagaacagagcacccaacgtcacgcgtgcccacgggagcgcatactaagtcgtgcagcggtcaaattcaaggatttcccggccagaagacggcgtcgccggtttccgcgtcccacatttgccgccggcctttgcggtctttgcccgaggtgccgccgtcatcgcggaagtcctggccgacgctgtagagggtgaagcgatcgccgatgactttgtagaccagcggaccgttgctgtaggggtcggcaggcagagcatcgatgtaccctgcctgcttcaattcatcgagtgatgcagggtaggcccccttctctgcacgataccgctgaagggctacgatggtcattgtcgcctcgtgcatggccttgccgcgaaatgccagcgtcgcgactcgatccaatgccggcaccatcatatggagtaccgcgtaccggtattctggtatggacttcaggagttcttccgagcctggcgtctgggcggcatgcttctcgtaggggctgagctttgcgatcttcacctgttggtcgaagaaccagttggccttcgccacggtttggtcgcgaccggcgtggagcaggctcaccgccgtcgcaaggggatctgtcgccaggaaatcggtcatttccccggtcagtacggtagtcctgagcatcgagagcgaggcgggcgccaagtgcccgccgcccgggccggtgtctgtgaagacatgctgcaccgtatccaggacggcaaggcgctcgcactcaatgtcgaccgggggaaactggccggaatagagcagcgacagttcccgttgcacgttcgccagctccgccgtggagagatttcgtcggtggacgatcctgaggatcccctcgtgccccacgtcgctcagtgccaggccgacaagctgctcgatcagggtcttgctcaactgcaagtggcggcccgcctgcgccgccgccaggcaatctgcgattgcctgtggcacatcgcctcgttccaggtcgaccagagaacgccagactgccagtctgccaagggtccgaaatccgctcaaatgcggcaatgtaatatcgatgatccatccctgtctctcagtggggtaacaggtgtattgcctgtaacagtacgacctggcggcggccgccgcaaattgctggaatgcggcttcattttccgccacccactgcctgaggagttgctgtgtctctacaggcagatcggccaaacctcgaaggtcaggtcggtcggtccagcgaagggctgtcaccagctcacgctccgcgttcgggtccaccagaacagcgaacgccttttcgtagcgaggccatgcgttgtcgcgatccacaatttggggtcggttcatctggttcagcaacgccaggtagtcgatgctcggcgacggcttgcccaggacgaaccaggccgtatagacaatgaacaatagcagcatcacgccgatgccttgtgccgtccgacctatcgccttggcccatagcggacggcaccgcttcttcgcacgccggcacaggaccgccagcagttttgcgtcaccgaactgctcgatcagccgctgcgccctctgttgccgctcctgggcgtccgtgcagccgtgcagctcatcctcaaagtgcgccgtcagctcggtctgcacgtcctgtgcggccttcccgcgatatcgcatcttccgaacgacttgtcggacgaactccgccgcgcaagcgggcaggtccccgccgtgactctcgctgggcttgttttccatggtacacctcccggctcttgcatcttatattgccgccttcagagcgccgcccagaatgatgttcaggcccttcgtcagctcctggagctgggccttctgccgggcgaggtcctcttcgcctttgccggtgatcgagtagtagcgtctcttgcggccgcactcggtcgtctcccacttgcccttgaccagtttcttggcctctaagttgtacagcagtgggtacagcgtccccttgcccagcgtcagaacgtcgccgcttcgccgctcgatcgcctggctcagctcatacccgtacaccggccctcgcgacaggatctgcagcaccgccacgggcgccacccccttgagcaactgactttcgaatcgcatgtcaacctcctgttcttcacataagccatgttattatgtttcacatattatgctgtgcatactatgcaatgtcaagcataaactgcaaaaagagaaatgcggccccctaaccagcctctgcctgggccagtcgccactgtgccgcttcgatccgggtcagggagaagcggccttgcagaattgtgccgtgcaattccagtgctatggcatcatctcgttcgtcgaaggcgctgtagtctccgcgctcgacgattcgcacgttgcccgttcccttctggacggggccctcgtaggtgaggaatcgcagggcgtgatcgaatatcctggcggcctcgacagcgtgtctaatgacgttctcaggactctccgcaaggcgaaaggtcgttaggacttgccccctctcgaccatcaggtcccaatggacgccctccggcgtcgtatgctcctggaccacaaagcgattgcccatacgtaaatctgccatcgtgcccacaatccacttgccacgtagactgaactgccctatcatattgcagtagtacataagaagccaggggagccgacaggcggaatcacgggcttggtcggctgagagatcactcggtgagtgatgaccctacgaacctgatcaggttaggacctgcgaagggaggcttggcggcatatccaggcaccctctttgcggggtgctttctttgtttttggacggactgaaatgggatcccttcaagtcaacggccaggtgcggcagttcccgccgggagagatgcccgcgacactctcggcattggtcgagaagctgggcctcacagcggcgacggtcgtggccgaggtggacggcaggatcgtcaggcccgccgagttcgcgcgcacagcgctcagcgatgggcagtcgatcgagcttgtgaagttcatgggaggaggttgatcgcatggatgcactggtcatcgccggcaggcaattcgactcccggctgctgctcgggacggggaaattcgcatccccgcaggtcatggcgcaagcattgaccgcttcgggcgctcagattgtcactgtggcgcttcgccgggtggatatcggcaacccacagaatgatacgcttcgcgagatcgatcgcaccaaattcctgctcctgccgaatacgtccggcgccaggaccgcggaggaggcggtgcggctggcccggctggcccgtgtggctacggacatcaactgggtgaagctggaagtgacccccgatccgtactatctgctgccggacccggtggagacgctcaaggccgccgagatcctggtaaaagagggctttgtcgtcctgccttacatcaatgcggaccccatcctcgcccgcaggctccaggacgccggtaccgcaaccgtgatgccgctgggcagcccgatcggctccaaccagggcatcaagacgcgggcctcgctggagatcatcatcgagcagagcaacgtgccggtcgtggtggatgcgggattgggcctgccatcccacgccgccgaggccatggagctgggtgcggacgcggtcctcatcaatacggcgattgccacggcggccgacccggtggagatggcggcagccttccggctcgccgtggaggccgggcgtagagcgtacatggccgggccacgcgctgcgacgcacaaagcggaagcgtccagcccgttgacggggttcttgagggattgagatgaacgcgtcagccaggtcaacctgttcggacggctctatcaagacaatcctcgcacggcaacagctcgacgagaatcgggagatttggcaacaacgtctgcagcaagtgacctcgcacgatgtcgaagccgccctgctgcctcggccgggctcgtacagcctgacaaagctgctggccctcatctcgccagcagcggaaggatacctcgaacaaatggccgagctgtctcaccacctgacgttgcagcgattcggtcgaacgatccggctctatgcaccgttgtatctctccagccattgcgtgaatcgctgccaatactgcggcttcaatcaggacaaccgattcgaaagggtccgcctgacgattgaggaagccgtagcggaggcggaaatcctcgcggccgatgggttcagggacatcctcttggtcacgagcgaggacagggaattcatcacggcatcctatctggcggatctcgcgaggcagttaaggaccagattcagtttcatcagtgccgagatttaccaagtgtcggcagccgagtacggcaggctgttcgatgccggcatcgaggggatcacgctctaccaggagacgtacgatcgcaccgcctacgcccaccaccatctggcgggacctaaggcggattacgacaggcgattgcgcggccccgaggacttcgccggtgccggcatgcgggagatcgggctgggcgttcttcttggcctggccgattggcggctcgaaaccctggcactcggcgagcacgcctttcacctgttcaagcggtactggcagtcgcggatctcgttttccttcccccggctgaggccggcgtgcggcgtgccgccggaggcgtttccacatcttgtgacggatcgcaacctcgtccagatgatgctggcattgcggctgtgctttgccgatgccgggcttgtcctttccacgcgggagcgcgcggactttcgcgatcgactggtccggctcggcataacgaaaatgagcgcgggcagccggactaatccgggaggctactccagagggcacacgagtccctcccaattcgaggtggatgacacgcgaaattcgcacgtcgtcgccgagatgttgaagggccagggcctcgaacccgtgtggaaagattgggatcgggcgttcttaagcccctgaggacttctgcaacatgaccctgagtgaacagcagatcgagagatacagccggcacatcctactccaggagataggtggccgcggccaggagagactgctcgcctcgaaggtgctcatcattggcatgggaggcctcggctcgccggccgccctgtacctggccgccgccggcgtgggaaccatcgggctggtagacggtgatgccgtggacctcgcgaatctccagaggcaaatcgtccatcacaccgcggatatcggcaggaggaaagtcgattcggccagggagaagatacaggccatcaatccggatgtcaccgtccgaacctacgatctatgggcccgagcgagcaacatcagggagatcgtccggcagtacgactttgtcatcgacggggcggacaacttcgccgccaagttcctgatcaacgatgcctgctgcttcgagaaggtcccattctgccatgcggggatcctccagttcgagggccagttgatgacggtgattccctggcggacggcctgctatcgctgcgttttccgctcgccgccgccgcccggctcagcgccctcctgcggacaggcgggcgtgctgggcgttttgcccggcgtcatcgggtcgcttcaggcaacggaggccatcaagtacctcctgggaatcggctccctggcgaccgactgcctgctcgtttactccgccctgacgatggagttccgcaaggtgcatacggggcgcagggcggattgccccctctgcggctccaatcccaccataaccacgctcatggatgacggccctgcggggtgcaacaggaaagactgacgatgctgaccccttctgaacctcgggtccacaccctggacctgcgaggggtcccctgcccgctgaacctcgtaaaggcgaagctggccattgagagcatcggcgtgggtgacgtcctcgagatcgaacttgacgagggcgagccgattcagaacctcccggccagcctcggcaggcagggccaggagatcatcgggaccagaaaacgcgaaaaccatttctgcgtaaccgtccgtcgaaagctgtaggagccattccacaaaatccatgtcacatctctgctccgccggtttcttagatagtggagtcagatagagagtcatagtggttttgtcacatgacgaggttgcaggatgtttggaagacggaaagacaagaccggcgaaacacaggatgtcgtgtctctgctgaaggcgagcctccagggcagcacgcaggcctttgaggtgatcgtcggcagacaccagtcgctcgtctgcgccatcacctacagcggcaccggcagcgtggaaaagagcgaggaactcgcccaggaaacgttcctgcgggcctggaagagcctggatcagctacaggacctggccaagttcaaggcatggctgtgcagcatcgcccgcaggacggtgcagaactggttccgcagccagagacaggacgtggtcggcaaggcggccccactggactgtgcggtcgagaaggtatccgaggaggctggacctgtggaggcagccatgatgaaagagcagcaagctgtcgtcgcccgcgccctggctcaaatccccgaatcgctccgcgagccggtgatcctgttttaccgtgagcagaaatcagtgagggaggtcgccgagcaattggggctctcggagaacgccgctcggcagcggatctcgcggggcaggagcatgctccgggagcaagtagccgacatcgtggagacgacgatcgcacgtacgaagccgggcaaggccttcaccacggccgtcattgccgctgtcgccgccacggctgtaaagaccacaaccaccgccatggctgcaacgggggtcgccgccgttgtgaccgggtcctccggcaccacggcagttctgtcgggcctggcggcaaaggttgtcgcgctggccgcgggtgtcgtcatcgtcgccggcggcgtggtcgcctacaagcatctgaccaaacccgggcagtcgccggttgccggttctcacttgtccgttgccgattcggccacccgcgattcagagccgggaatcagcgggtcaggcatgggagtcccgcaacccccaatgcccactgcaaatcaagaaccagcgaccggtaatcaggacttcgcactccacacgcgcaattccgaactccctgcaccgcctgtagagcgggacagagcaagagccgtcgcgacggctgtgcaatcgcgacgttacgaattcgcacccaagggcgtgctcagcggcgtgattacagacaccgacacgggcgagcccgtccgcgatgccctggtccagatcggcacaagctggatggcggagacccggaccgacgcgaacgggttctactccttcgacaaggtgcattcgtccggcagctaccaggtcgcagtcttctcgctggagtacgtgggcatcgcacgggataatcagggtccggccgtgtacctcagcaacgacaagcaggccgtccaacacttccagttgcccaaggcctgcatggtggacgtctgggtcgtggacccgaacggcgtcccggtgcccaaggcgaacattgtcgtcacatcactggcggacgaccgttcgcgcgagctcggcgaaacaagtccccgccgacagaccgaccccaacggctacatcctgctcggcggcatccctcccgctcagaccgactgcctgctcactgtctggcgtacaacggacctgcccgcgcaagatcgagccagccggccgttcggacgctcggaatatgatttcgccccggccgggctgaccgttcgactgaccgaccccaacgtcatcaggcgggtccagatcgctctgcaaaagggccaggcgatacagggttatgccgagtacgccgacggcatgcccgccaaggacattgggatcggcgcgcgtccgacctggtggcactccaactacagtgtgctggacaatgacgtaaaggcggacggcaccttcacgctccagcacatcacgcccggcacatacgacatctccatgtatatccccaggccggacttcagcgggggcacctccaccgtcgtagcgcaggctcaacttcccccggccgacggagagccgctggtcgtgcgcctgcccggcaaatccccccagtccctggcctccatcagtggcaagctcatcttcgtcggagagagaacgccggattctgtgagcatctccgcctattcgccgaccggcgggagcgcatttgccaacatcgcgagcggacccgatggcaagctgggcgatacgttcgtcctgaatcggctcgagctcgggacgtacacgctgcaattctcgggcacgggcgtcgaggagaagaccctccgtgatgtcccggcgccgagcgagggacttgaggtcgagctggcgtacgccgccaagccccaactgacaggcgcggtggtggacaggcagacgcgtacgcccatcaagaccttccgcatccgggcgaggaagctccagacctctcgtggtccgaactacgtccagccggagcggtgggtccacctcgaaaacgagcagggacagttcagcatggacacggtcgggccgggcgtctatcaggtccaggcggtcgccgagggatatgcaccgctctggagcgacgagatcaacaccgatctgatagcgccggcggcgattgccttgtcgcctggaggaacgattgcgggcatggtcgtcacccgaaatggagagcccgtcgatgcggcaaaggtcatccctctgtccctggccggtggcgcgatgccgcggaccaaagacgtcttcgtgtgtgaggagggcgctgcgacgacgacggcgggcgccttcacactgaagaatctgccgcccggcaccgagacgctcaaggtcacgcaccctgactatacgtttatcgtcgccgacaacgtccaggtcgctgaaggcaagatcaccgacggagtccggatcaccctgacggcgggcggcacggtcgaggggtatgtgtgggatgatcggggcgtgccccaggcggctcagcccttgtacttccaggatgacagcggctacggcggcacgggcgacagggaggccggccggctgggcgcggcggtcaccgacagcaacgggttttatcgggtcgctcacctgcccgagaccctgtgctacgtaactcgcgccaacgagtggaacagtatgggcgtcgtccgcagagtcgtagtgccccaggacggcgagacgattcgcctggacttcggcagcatgcccttagtcagcggcgccgccatcgtggacggcctcccgctggccaacaccagactcctgctggggcctaccgattccccccatttcggcgcattccgatgcttcgcaaggaccgatgagcacggcgcctttgtattcaccggcgctgttcggggcacgcacgccatttactatgagcggccggacaaacgcaacgactggctcaagatcgcgacagtcacggtcgcagatgcagatgtcgatctgggcacggttccccgcaacgcatccaggctgatggtgaccatccacgttcctgaggcggaccccgcctggcagatcgaagaagcgttcatttcggataatgatcggcccggggccgccaagttccgtacggctgagacaccgacctctgcgagcgggccgtggctgatcgacaacgtcggaccaggcgcctatgtactgacggtcgttcgccgggacggcgtccggtggcaaacgaaaatcgagatcaaggccgatcaggacccgtggcagatctctgtgacccctccgcgaagcagtgcgagcatatccggccacatccgtggtgaggcaaattggctggccctctggcgggagggaaaggacatttggggcttagtccttgcgagagagggtgcgcagttctccgtcgctgacctgcccgcgggcaagtacttcgtcggcaccgaccctgccttcctctatggaatgcctgctctgacggagttcacgctcaacgagggcgaggacaaagtgattgacgtagatgtgaaggtgcagcttgaacgccggatgggttgtctgatcgtgctcgttgtagacgagaaggccatgccgcgagacgacgctcatgtctcgctcgaagggacagtagaaccgctcgaatccacgttatccgggtacgtcttcgccgccgcccccggcgaccacgtcctgcacgtcgaggcccccggatacaagccggtccgcaaggacataaccctcaaagccaacagccccgccgacatcaagtcccagaccatcaccgtccgcctggaaaagagatgaaagcccttgccgccacggcgagtgcaaagagccgcccgcacgggtaagatatcggccctgatctgcacgtctcggcttccagaatccccttgctcccgccgatgtgaaggggtaggattcagtcgagtttacgagcatttacaggtttgagaggccgcgatatggcggagaattggccggtcataactgcggaagaagcgctgggccttttcgcaaggacagggaggcgtctatgaactacaacctgttggatgaacactggattcccgtcctttactgcgatggaacgtgggaacgcgtcgggattcgccaggcgctggaggacgccgaccgcattcgacaaatcgcggccaacaatcccatggaccgcctcgcgattctgcggttcttactcgcattgctctattggtgcaagggagacccaccggatgaagggaacaccaattctgtcgcttcgctttcctcagagtggtttttcaggctcgatgagaacagagattgcttcaacctagtgggggacgcgggacgcttctatcaggatcgtactgcacaaaggacccgtgcggttacggatctgattcaagagattcccactggcaacaacttctggcatttccgtcacgcgacggacaagatagacgggctttgcccagcatgctgtgtgctgggtttgttgcgacttccgttgttttccgtgagcggtttgcccgatctgaaggcgggcgtcaatggtactccgccggtatatgttgtgccttggggcatgtcgctgcgggagacgctacaagcgaactggtcgccatgtgcgaaccttggcacgcccgcctgggttcagcccgatgttcgtccaactcccagtgaggatgttcccttgcttaccgggctaacgcttttgtccagacgggttttcttacatgacccagtcgaacggccgggcgtgtgcattggttgtggcacaagaggaacgccgctcatcctgacctgcgaatatcaaacggctggcagacaggagaatgccctttggagtgatccccacgcagtctattcggacgcaacgccacgaagaacagtgaaagcggccgatttgactgcggcaggcaaattcaggatggatcgtccatggccagatctgcttgcccgtcttgtcgaaacggacaggttcggatcaaaaaagacggtggcatcgcttttcatcgtgggatttgccaccgaccaagcaaagaacattgatgcttgggagtggaccattgccgtgccgccgggaacatcgatcaaagaaacgttggcatccttgttacggcaatggtggaaggagggctggcgtatggaaaagcggatagggagatcagaggtcgagggttcagcgactatcgccgcgattcgccccgatatcgaaggcagagtgtccgcgcaagcgggtgagttgattgtcggcgctgatgaggtgtggcaacaggcggctgcggaataccgcccactcatgaaggtaatcgcgagatcgctgtcccctggcttcacggcagcggccattcaccggcggcagcagattgcccttgcatcgccagatatgcggcccaaagtggaatcggccaagaagccaggccggaagaaaggagagcacaagtgagcgcaacagaccagtacattgacctgctgacgagactcaaggcaggtgaacttgggctgctgcgtacacatgcagggcaaggcctggatgaatcggtcgatgggttcgacctgttcgcgggtttgtggtggccgttgcgacagaagaacgagcgcgccccccgccgtgaggtggcatggctgatcgccaagctgtacgccttctctcccatagagcattcacccgccgattatcttgcccgacaattgcgccgttgtcagccaaacgaagaaagagcgagggaaggatacgagaagaggttcgaccggatgctggtcctgccggtcggccagatcgagcccgcgctacagtgggtgcttggcgagatcgcatcgaacggtcggaaactcgattgggtcaaactgacggacgacctttcaatatgggaacgtgaaaccacccgcctcgaatgggcgagacaattcgtcgagatcagcgaaagggaaccatcatgttaatccagattcatgccattcagaaccacagcccggccaatctgaaccgagacgacctgggcgcgcccaagacgtgttacttcggcggcgtcctgcgctcgcgcatctccagtcagtgtatcaagcgcagcatccgtatgagcgacgagttcaagacgctgctcggcggcgtagctaccaggagattggctcacttgatcgctgggaacggggcagatcccgcccagtctgaaagggctatgaagattctcaaactctgtggtatcgcgccgaaggaaaagaaaggtggcgccggtgacgatgatctcaaaagtgaagacaagagcgccgggcgcgtttacacgagtcgcaaggcgattgaagaaatgtccaagctcctgaagaacggcgggaaagaatccgaccagaaacttgcagcggaattcgccagattgatcgccgagcatactgccgttccagacatggcgctctgcggcaggatgctggaacccaagaaacctgagaaaagcaagaagggcaaatcaggcgatgcctcctctgcaaaagaggaaggaggcgagggagccaaggacaagggggtgtggaaaggactggatttgacggttgaggctgcccttcaggtggctcacgccatttcaacgcatgaagcacggcctgaggtggactactttgtggccgccgacgatatctcgggcgacgatgcgggagcggcctacgtggacgaagccatgttcgcctcggcttgcttctacaagtacttctcgatccattgggagacgctcctcaagaatcttgagggcttccagggaaacaaagagcatctggccgcccacacggttggagcgttcattcgtggagcggcaatggtcaatcccacgggcaaacagaacagcttcgccgcacacaatccgcccgatgggatgctgatcgagatcaaggacacccccgtcagctacgcgaatgcctttgccaagcctgcggcacaaggcgagcgggacatcatttcgcagagcattgggcaactgggtcaatacgtgcatgacctggatgtcggatacggcaaaccgcaagagcgactttggttttcgcccaatttgcagtaccgcttgatggcgcagatcagagatgaagatggcaagaagagacagcaagagatcgatcttgccgaacacaactttaactctctggaaacgttagtccccgccgtgatcaaagccctcccgggaaagctcgattgggccgatgtgcagagagtagtgatcaattcagaggtggcggcatgagcctcaacaccctctttcttcgtttggaagggcctttgcaggcatggggtgtccaggagtccaagtttgtcatccggcgcacggccgaggccccgacgaaatcaggagtcatcgggatgctctgtgcggcactgggcgttccgcgtgcccaagctgccgagtggcttccgaggctcgccgacttgcgcatgggtgttcgaatcgaccgacccggcgtacggtggtgggattatcacacggtcggggccaagatgcagatgcgcattgccgaaggggagggaaagaccaagtccggcgcgatgctcacgcggcgcgagtacctgtgcgatgcttcctttctcgtcgccctggaaggtgatccggcgctgattgccgaactggcggcggcaatgcaaaacccgcgatggacgctttacctgggccgtaagtcctgcccgccatcccgcccgttggtggagcatcggcccggcgtctttcccgatttgctttccgcattgacatccatcccttggcggggacgcttcaacgctgatccgtcaccggaaaccgcggattgcctgctcgactgggaaccatcggaccagcagcccgatgcgcccgatgacgcgctcatctggtatgacgtgccgctgacgttcgagccgccgtcgcatcgaccccgcttcgttatccgccggacattgcgggtgggtgcagatggcgaggtccgcatcgcagaaaaacccgcgcagaacccaactccacgaccgcttcgcccacgggcagactatcggaacaccgaatacaggaagatgcgcgaagagcggctcgaccgtgacaaatacctgtgcgtcttctgtaagtcgcccgcgacgaccgtccaacacgtcacgtttcgccacgccggcggagaggaacgcattgacgaactgcggtccctctgccgcctgtgccacgatgcggtgacgatgatcgaatatggcctgggcatgggcctggatcgcatcaaccccgaagaggaacagtggcgcgagaagatcatccagaagagagctgagatcgtcaagttccgctcgctggagacgcggcggcgcaaactggccgccgaggaggtcgaatgatgtatctctcgcatctcatgatcgatgtgggaagcaatcccgaccggcctcgtcccggccgcctctggctgcgcaacatctaccacgttcaccagcggctctcgatggcatttctcacgcccacgcaagacggcgaagatccccgcttcctgttccgcattgacaacagcgtggaggacgatggcccgcgcgggatcatccttgtacagtcggacttggccccagattgggactatgccttccacaacgcgcgcatcctgctcgctgccgaaccacagagcaggcagtacaatccaacgttccgggccggtgaggacctgcgattccgcatccgggtcaacctgagcaagaagagccgcgaacatcgaaaacaggagagtgagaggactgacgtgtatggtcgtccgaagtcgcaaggcaaacgcgtggcgctgacttgggagaaggatcggggaccggaagtggcagtccaggaatggttcacctccaaagccaagcgatgcggcttctcactgtgcgactttcgcatgctgcatctgggttgggtggtgggctatcggtccaaagcgaaaacgcaacgagaagaaagcagcgacaagaattccggtcgccagatgagatttcgatccgccttgctggaaggaacgcttgcggtcaccgatgctccggtgtttgcccaggccgttgcctcgggtattgggtcggccaaggcgtttgggtttgggttgctgtcgatagctccgatccggatttgattcaaggccgggcctgaaaacgccgatattgctctttgataagtggatagtgggaggcattacctgatgcagaatctccaggaactgcccaggttcgcggacaagctcagctatttgtacgtggaacacgcggtcgtagaccgccacgagaaggctatcgccgtacatcgtgccgatggcagcgtatcggtcccggcggcatctctggctgtgctgctcttaggccccggcacaagtatcacgcacgcggcggtcaagaccctcggcgacaacaattgtcaagtcttgtggtgcggggagcacggcgtgcggttctatgcccagggcctcggcggcgctcgccacagccgaaatctcatccggcaggccgctctggtcagcaacgacattacccgattgcaggtcgtcgtgcggatgtactgcatgcgattcgacgagcaggtcgatcccgatatcaccttgcagcagcttcgcggaaaggagggaatccgcgtgagagaagcgtatgcacaggcatcgcgcgagttcggcatcgcctggcagggcagggcctataaacgggacacgtggaacgccgccgaccctgtcaatcgggcactctcggccgccaacgcctgcctgtacggcttggctcacgcagccattctgtccggcggttactcgccggcgctcggattcatccattgcggcaagcagctttccttcgtatacgacatcgccgatctgtataaggtggagtacacgattccggcggcctttgccatagcggccaccaacccgtccgatttggagcatcaggtccggatcacctgtcgggatcgctttcgtcagacacgattgatggagcgtatcttgccggatatcgccaagacgctcgatgtgccccgaaaggaagccgcagaggacgaattctctgctgacgccgcacgcccggccgacttatggcagccccagtctatctccgataatatgcctattgggcaagtgctgaaaatgcacgcctttccaagggaagggtctgcagagggcaaagccgatgatcgtgatggttctggagcgagtgacgccctcgctgcggggtgaactgacgcgctggctgatccagcccaagacgggggtatttgtcgggcgtgtctcctcgcgggtccgggacctgctctgggacaaggtgaccaagtcgaagcgcggcggcgctgccctcatcgtctaccaagatgcaaccgaacagggattctcgatcaaaacatccggccggaccagcaaaaccatcgaagacttcgaaggacttctcctgccgaaaacgcccataactaaggaaaatggcccatgaagccagtatgatccccacgcgcgtggggatgaaccgggggaatcgtgtgtcgggcggaacccaccttgatgatccccacgcgcgtggggatgaaccgtcgcacggctcggggaaaacagcgaatccaatatgatcc

SEQ ID NO: 991 - DNA, 106477 bp, Artificial Sequence
  Synthetic Oligonucleotide
  misc_feature (1)..(88206): n is a, c, g, or t
nnnnnnnnnnnnnnnnnnnnnnnnnnnnnnnnnnnnnnnnnnnnnnnnnnnnnnnnnnnnnnnnnnnnnnnnnnnnnnnnnnnnnnnnnnnnnnnnnnnnnnnnnnnnnnnnnnnnnnnnnnnnnnnnnnnnnnnnnnnnnnnnnnnnnnnnnnnnnnnnnnnnnnnnnnnnnnnnnnnnnnnnnnnnnnnnnnnnnnnnnnnnnnnnnnnnnnnnnnnnnnnnnnnnnnnnnnnnnnnnnnnnnnnnnnnnnnnnnnnnnnnnnnnnnnnnnnnnnnnnnnnnnnnnnnnnnnnnnnnnnnnnnnnnnnnnnnnnnnnnnnnnnnnnnnnnnnnnnnnnnnnnnnnnnnnnnnnnnnnnnnnnnnnnnnnnnnnnnnnnnnnnnnnnnnnnnnnnnnnnnnnnnnnnnnnnnnnnnnnnnnnnnnnnnnnnnnnnnnnnnnnnnnnnnnnnnnnnnnnnnnnnnnnnnnnnnnnnnnnnnnnnnnnnnnnnnnnnnnnnnnnnnnnnnnnnnnnnnnnnnnnnnnnnnnnnnnnnnnnnnnnnnnnnnnnnnnnnnnnnnnnnnnnnnnnnnnnnnnnnnnnnnnnnnnnnnnnnnnnnnnnnnnnnnnnnnnnnnnnnnnnnnnnnnnnnnnnnnnnnnnnnnnnnnnnnnnnnnnnnnnnnnnnnnnnnnnnnnnnnnnnnnnnnnnnnnnnnnnnnnnnnnnnnnnnnnnnnnnnnnnnnnnnnnnnnnnnnnnnnnnnnnnnnnnnnnnnnnnnnnnnnnnnnnnnnnnnnnnnnnnnnnnnnnnnnnnnnnnnnnnnnnnnnnnnnnnnnnnnnnnnnnnnnnnnnnnnnnnnnnnnnnnnnnnnnnnnnnnnnnnnnnnnnnnnnnnnnnnnnnnnnnnnnnnnnnnnnnnnnnnnnnnnnnnnnnnnnnnnnnnnnnnnnnnnnnnnnnnnnnnnnnnnnnnnnnnnnnnnnnnnnnnnnnnnnnnnnnnnnnnnnnnnnnnnnnnnnnnnnnnnnnnnnnnnnnnnnnnnnnnnnnnnnnnnnnnnnnnnnnnnnnnnnnnnnnnnnnnnnnnnnnnnnnnnnnnnnnnnnnnnnnnnnnnnnnnnnnnnnnnnnnnnnnnnnnnnnnnnnnnnnnnnnnnnnnnnnnnnnnnnnnnnnnnnnnnnnnnnnnnnnnnnnnnnnnnnnnnnnnnnnnnnnnnnnnnnnnnnnnnnnnnnnnnnnnnnnnnnnnnnnnnnnnnnnnnnnnnnnnnnnnnnnnnnnnnnnnnnnnnnnnnnnnnnnnnnnnnnnnnnnnnnnnnnnnnnnnnnnnnnnnnnnnnnnnnnnnnnnnnnnnnnnnnnnnnnnnnnnnnnnnnnnnnnnnnnnnnnnnnnnnnnnnnnnnnnnnnnnnnnnnnnnnnnnnnnnnnnnnnnnnnnnnnnnnnnnnnnnnnnnnnnnnnnnnnnnnnnnnnnnnnnnnnnnnnnnnnnnnnnnnnnnnnnnnnnnnnnnnnnnnnnnnnnnnnnnnnnnnnnnnnnnnnnnnnnnnnnnnnnnnnnnnnnnnnnnnnnnnnnnnnnnnnnnnnnnnnnnnnnnnnnnnnnnnnnnnnnnnnnnnnnnnnnnnnnnnnnnnnnnnnnnnnnnnnnnnnnnnnnnnnnnnnnnnnnnnnnnnnnnnnnnnnnnnnnnnnnnnnnnnnnnnnnnnnnnnnnnnnnnnnnnnnnnnnnnnnnnnnnnnnnnnnnnnnnnnnnnnnnnnnnnnnnnnnnnnnnnnnnnnnnnnnnnnnnnnnnnnnnnnnnnnnnnnnnnnnnnnnnnnnnnnnnnnnnnnnnnnnnnnnnnnnnnnnnnnnnnnnnnnnnnnnnnnnnnnnnnnnnnnnnnnnnnnnnnnnnnnnnnnnnnnnnnnnnnnnnnnnnnnnnnnnnnnnnnnnnnnnnnnnnnnnnnnnnnnnnnnnnnnnnnnnnnnnnnnnnnnnnnnnnnnnnnnnnnnnnnnnnnnnnnnnnnnnnnnnnnnnnnnnnnnnnnnnnnnnnnnnnnnnnnnnnnnnnnnnnnnnnnnnnnnnnnnnnnnnnnnnnnnnnnnnnnnnnnnnnnnnnnnnnnnnnnnnnnnnnnnnnnnnnnnnnnnnnnnnnnnnnnnnnnnnnnnnnnnnnnnnnnnnnnnnnnnnnnnnnnnnnnnnnnnnnnnnnnnnnnnnnnnnnnnnnnnnnnnnnnnnnnnnnnnnnnnnnnnnnnnnnnnnnnnnnnnnnnnnnnnnnnnnnnnnnnnnnnnnnnnnnnnnnnnnnnnnnnnnnnnnnnnnnnnnnnnnnnnnnnnnnnnnnnnnnnnnnnnnnnnnnnnnnnnnnnnnnnnnnnnnnnnnnnnnnnnnnnnnnnnnnnnnnnnnnnnnnnnnnnnnnnnnnnnnnnnnnnnnnnnnnnnnnnnnnnnnnnnnnnnnnnnnnnnnnnnnnnnnnnnnnnnnnnnnnnnnnnnnnnnnnnnnnnnnnnnnnnnnnnnnnnnnnnnnnnnnnnnnnnnnnnnnnnnnnnnnnnnnnnnnnnnnnnnnnnnnnnnnnnnnnnnnnnnnnnnnnnnnnnnnnnnnnnnnnnnnnnnnnnnnnnnnnnnnnnnnnnnnnnnnnnnnnnnnnnnnnnnnnnnnnnnnnnnnnnnnnnnnnnnnnnnnnnnnnnnnnnnnnnnnnnnnnnnnnnnnnnnnnnnnnnnnnnnnnnnnnnnnnnnnnnnnnnnnnnnnnnnnnnnnnnnnnnnnnnnnnnnnnnnnnnnnnnnnnnnnnnnnnnnnnnnnnnnnnnnnnnnnnnnnnnnnnnnnnnnnnnnnnnnnnnnnnnnnnnnnnnnnnnnnnnnnnnnnnnnnnnnnnnnnnnnnnnnnnnnnnnnnnnnnnnnnnnnnnnnnnnnnnnnnnnnnnnnnnnnnnnnnnnnnnnnnnnnnnnnnnnnnnnnnnnnnnnnnnnnnnnnnnnnnnnnnnnnnnnnnnnnnnnnnnnnnnnnnnnnnnnnnnnnnnnnnnnnnnnnnnnnnnnnnnnnnnnnnnnnnnnnnnnnnnnnnnnnnnnnnnnnnnnnnnnnnnnnnnnnnnnnnnnnnnnnnnnnnnnnnnnnnnnnnnnnnnnnnnnnnnnnnnnnnnnnnnnnnnnnnnnnnnnnnnnnnnnnnnnnnnnnnnnnnnnnnnnnnnnnnnnnnnnnnnnnnnnnnnnnnnnnnnnnnnnnnnnnnnnnnnnnnnnnnnnnnnnnnnnnnnnnnnnnnnnnnnnnnnnnnnnnnnnnnnnnnnnnnnnnnnnnnnnnnnnnnnnnnnnnnnnnnnnnnnnnnnnnnnnnnnnnnnnnnnnnnnnnnnnnnnnnnnnnnnnnnnnnnnnnnnnnnnnnnnnnnnnnnnnnnnnnnnnnnnnnnnnnnnnnnnnnnnnnnnnnnnnnnnnnnnnnnnnnnnnnnnnnnnnnnnnnnnnnnnnnnnnnnnnnnnnnnnnnnnnnnnnnnnnnnnnnnnnnnnnnnnnnnnnnnnnnnnnnnnnnnnnnnnnnnnnnnnnnnnnnnnnnnnnnnnnnnnnnnnnnnnnnnnnnnnnnnnnnnnnnnnnnnnnnnnnnnnnnnnnnnnnnnnnnnnnnnnnnnnnnnnnnnnnnnnnnnnnnnnnnnnnnnnnnnnnnnnnnnnnnnnnnnnnnnnnnnnnnnnnnnnnnnnnnnnnnnnnnnnnnnnnnnnnnnnnnnnnnnnnnnnnnnnnnnnnnnnnnnnnnnnnnnnnnnnnnnnnnnnnnnnnnnnnnnnnnnnnnnnnnnnnnnnnnnnnnnnnnnnnnnnnnnnnnnnnnnnnnnnnnnnnnnnnnnnnnnnnnnnnnnnnnnnnnnnnnnnnnnnnnnnnnnnnnnnnnnnnnnnnnnnnnnnnnnnnnnnnnnnnnnnnnnnnnnnnnnnnnnnnnnnnnnnnnnnnnnnnnnnnnnnnnnnnnnnnnnnnnnnnnnnnnnnnnnnnnnnnnnnnnnnnnnnnnnnnnnnnnnnnnnnnnnnnnnnnnnnnnnnnnnnnnnnnnnnnnnnnnnnnnnnnnnnnnnnnnnnnnnnnnnnnnnnnnnnnnnnnnnnnnnnnnnnnnnnnnnnnnnnnnnnnnnnnnnnnnnnnnnnnnnnnnnnnnnnnnnnnnnnnnnnnnnnnnnnnnnnnnnnnnnnnnnnnnnnnnnnnnnnnnnnnnnnnnnnnnnnnnnnnnnnnnnnnnnnnnnnnnnnnnnnnnnnnnnnnnnnnnnnnnnnnnnnnnnnnnnnnnnnnnnnnnnnnnnnnnnnnnnnnnnnnnnnnnnnnnnnnnnnnnnnnnnnnnnnnnnnnnnnnnnnnnnnnnnnnnnnnnnnnnnnnnnnnnnnnnnnnnnnnnnnnnnnnnnnnnnnnnnnnnnnnnnnnnnnnnnnnnnnnnnnnnnnnnnnnnnnnnnnnnnnnnnnnnnnnnnnnnnnnnnnnnnnnnnnnnnnnnnnnnnnnnnnnnnnnnnnnnnnnnnnnnnnnnnnnnnnnnnnnnnnnnnnnnnnnnnnnnnnnnnnnnnnnnnnnnnnnnnnnnnnnnnnnnnnnnnnnnnnnnnnnnnnnnnnnnnnnnnnnnnnnnnnnnnnnnnnnnnnnnnnnnnnnnnnnnnnnnnnnnnnnnnnnnnnnnnnnnnnnnnnnnnnnnnnnnnnnnnnnnnnnnnnnnnnnnnnnnnnnnnnnnnnnnnnnnnnnnnnnnnnnnnnnnnnnnnnnnnnnnnnnnnnnnnnnnnnnnnnnnnnnnnnnnnnnnnnnnnnnnnnnnnnnnnnnnnnnnnnnnnnnnnnnnnnnnnnnnnnnnnnnnnnnnnnnnnnnnnnnnnnnnnnnnnnnnnnnnnnnnnnnnnnnnnnnnnnnnnnnnnnnnnnnnnnnnnnnnnnnnnnnnnnnnnnnnnnnnnnnnnnnnnnnnnnnnnnnnnnnnnnnnnnnnnnnnnnnnnnnnnnnnnnnnnnnnnnnnnnnnnnnnnnnnnnnnnnnnnnnnnnnnnnnnnnnnnnnnnnnnnnnnnnnnnnnnnnnnnnnnnnnnnnnnnnnnnnnnnnnnnnnnnnnnnnnnnnnnnnnnnnnnnnnnnnnnnnnnnnnnnnnnnnnnnnnnnnnnnnnnnnnnnnnnnnnnnnnnnnnnnnnnnnnnnnnnnnnnnnnnnnnnnnnnnnnnnnnnnnnnnnnnnnnnnnnnnnnnnnnnnnnnnnnnnnnnnnnnnnnnnnnnnnnnnnnnnnnnnnnnnnnnnnnnnnnnnnnnnnnnnnnnnnnnnnnnnnnnnnnnnnnnnnnnnnnnnnnnnnnnnnnnnnnnnnnnnnnnnnnnnnnnnnnnnnnnnnnnnnnnnnnnnnnnnnnnnnnnnnnnnnnnnnnnnnnnnnnnnnnnnnnnnnnnnnnnnnnnnnnnnnnnnnnnnnnnnnnnnnnnnnnnnnnnnnnnnnnnnnnnnnnnnnnnnnnnnnnnnnnnnnnnnnnnnnnnnnnnnnnnnnnnnnnnnnnnnnnnnnnnnnnnnnnnnnnnnnnnnnnnnnnnnnnnnnnnnnnnnnnnnnnnnnnnnnnnnnnnnnnnnnnnnnnnnnnnnnnnnnnnnnnnnnnnnnnnnnnnnnnnnnnnnnnnnnnnnnnnnnnnnnnnnnnnnnnnnnnnnnnnnnnnnnnnnnnnnnnnnnnnnnnnnnnnnnnnnnnnnnnnnnnnnnnnnnnnnnnnnnnnnnnnnnnnnnnnnnnnnnnnnnnnnnnnnnnnnnnnnnnnnnnnnnnnnnnnnnnnnnnnnnnnnnnnnnnnnnnnnnnnnnnnnnnnnnnnnnnnnnnnnnnnnnnnnnnnnnnnnnnnnnnnnnnnnnnnnnnnnnnnnnnnnnnnnnnnnnnnnnnnnnnnnnnnnnnnnnnnnnnnnnnnnnnnnnnnnnnnnnnnnnnnnnnnnnnnnnnnnnnnnnnnnnnnnnnnnnnnnnnnnnnnnnnnnnnnnnnnnnnnnnnnnnnnnnnnnnnnnnnnnnnnnnnnnnnnnnnnnnnnnnnnnnnnnnnnnnnnnnnnnnnnnnnnnnnnnnnnnnnnnnnnnnnnnnnnnnnnnnnnnnnnnnnnnnnnnnnnnnnnnnnnnnnnnnnnnnnnnnnnnnnnnnnnnnnnnnnnnnnnnnnnnnnnnnnnnnnnnnnnnnnnnnnnnnnnnnnnnnnnnnnnnnnnnnnnnnnnnnnnnnnnnnnnnnnnnnnnnnnnnnnnnnnnnnnnnnnnnnnnnnnnnnnnnnnnnnnnnnnnnnnnnnnnnnnnnnnnnnnnnnnnnnnnnnnnnnnnnnnnnnnnnnnnnnnnnnnnnnnnnnnnnnnnnnnnnnnnnnnnnnnnnnnnnnnnnnnnnnnnnnnnnnnnnnnnnnnnnnnnnnnnnnnnnnnnnnnnnnnnnnnnnnnnnnnnnnnnnnnnnnnnnnnnnnnnnnnnnnnnnnnnnnnnnnnnnnnnnnnnnnnnnnnnnnnnnnnnnnnnnnnnnnnnnnnnnnnnnnnnnnnnnnnnnnnnnnnnnnnnnnnnnnnnnnnnnnnnnnnnnnnnnnnnnnnnnnnnnnnnnnnnnnnnnnnnnnnnnnnnnnnnnnnnnnnnnnnnnnnnnnnnnnnnnnnnnnnnnnnnnnnnnnnnnnnnnnnnnnnnnnnnnnnnnnnnnnnnnnnnnnnnnnnnnnnnnnnnnnnnnnnnnnnnnnnnnnnnnnnnnnnnnnnnnnnnnnnnnnnnnnnnnnnnnnnnnnnnnnnnnnnnnnnnnnnnnnnnnnnnnnnnnnnnnnnnnnnnnnnnnnnnnnnnnnnnnnnnnnnnnnnnnnnnnnnnnnnnnnnnnnnnnnnnnnnnnnnnnnnnnnnnnnnnnnnnnnnnnnnnnnnnnnnnnnnnnnnnnnnnnnnnnnnnnnnnnnnnnnnnnnnnnnnnnnnnnnnnnnnnnnnnnnnnnnnnnnnnnnnnnnnnnnnnnnnnnnnnnnnnnnnnnnnnnnnnnnnnnnnnnnnnnnnnnnnnnnnnnnnnnnnnnnnnnnnnnnnnnnnnnnnnnnnnnnnnnnnnnnnnnnnnnnnnnnnnnnnnnnnnnnnnnnnnnnnnnnnnnnnnnnnnnnnnnnnnnnnnnnnnnnnnnnnnnnnnnnnnnnnnnnnnnnnnnnnnnnnnnnnnnnnnnnnnnnnnnnnnnnnnnnnnnnnnnnnnnnnnnnnnnnnnnnnnnnnnnnnnnnnnnnnnnnnnnnnnnnnnnnnnnnnnnnnnnnnnnnnnnnnnnnnnnnnnnnnnnnnnnnnnnnnnnnnnnnnnnnnnnnnnnnnnnnnnnnnnnnnnnnnnnnnnnnnnnnnnnnnnnnnnnnnnnnnnnnnnnnnnnnnnnnnnnnnnnnnnnnnnnnnnnnnnnnnnnnnnnnnnnnnnnnnnnnnnnnnnnnnnnnnnnnnnnnnnnnnnnnnnnnnnnnnnnnnnnnnnnnnnnnnnnnnnnnnnnnnnnnnnnnnnnnnnnnnnnnnnnnnnnnnnnnnnnnnnnnnnnnnnnnnnnnnnnnnnnnnnnnnnnnnnnnnnnnnnnnnnnnnnnnnnnnnnnnnnnnnnnnnnnnnnnnnnnnnnnnnnnnnnnnnnnnnnnnnnnnnnnnnnnnnnnnnnnnnnnnnnnnnnnnnnnnnnnnnnnnnnnnnnnnnnnnnnnnnnnnnnnnnnnnnnnnnnnnnnnnnnnnnnnnnnnnnnnnnnnnnnnnnnnnnnnnnnnnnnnnnnnnnnnnnnnnnnnnnnnnnnnnnnnnnnnnnnnnnnnnnnnnnnnnnnnnnnnnnnnnnnnnnnnnnnnnnnnnnnnnnnnnnnnnnnnnnnnnnnnnnnnnnnnnnnnnnnnnnnnnnnnnnnnnnnnnnnnnnnnnnnnnnnnnnnnnnnnnnnnnnnnnnnnnnnnnnnnnnnnnnnnnnnnnnnnnnnnnnnnnnnnnnnnnnnnnnnnnnnnnnnnnnnnnnnnnnnnnnnnnnnnnnnnnnnnnnnnnnnnnnnnnnnnnnnnnnnnnnnnnnnnnnnnnnnnnnnnnnnnnnnnnnnnnnnnnnnnnnnnnnnnnnnnnnnnnnnnnnnnnnnnnnnnnnnnnnnnnnnnnnnnnnnnnnnnnnnnnnnnnnnnnnnnnnnnnnnnnnnnnnnnnnnnnnnnnnnnnnnnnnnnnnnnnnnnnnnnnnnnnnnnnnnnnnnnnnnnnnnnnnnnnnnnnnnnnnnnnnnnnnnnnnnnnnnnnnnnnnnnnnnnnnnnnnnnnnnnnnnnnnnnnnnnnnnnnnnnnnnnnnnnnnnnnnnnnnnnnnnnnnnnnnnnnnnnnnnnnnnnnnnnnnnnnnnnnnnnnnnnnnnnnnnnnnnnnnnnnnnnnnnnnnnnnnnnnnnnnnnnnnnnnnnnnnnnnnnnnnnnnnnnnnnnnnnnnnnnnnnnnnnnnnnnnnnnnnnnnnnnnnnnnnnnnnnnnnnnnnnnnnnnnnnnnnnnnnnnnnnnnnnnnnnnnnnnnnnnnnnnnnnnnnnnnnnnnnnnnnnnnnnnnnnnnnnnnnnnnnnnnnnnnnnnnnnnnnnnnnnnnnnnnnnnnnnnnnnnnnnnnnnnnnnnnnnnnnnnnnnnnnnnnnnnnnnnnnnnnnnnnnnnnnnnnnnnnnnnnnnnnnnnnnnnnnnnnnnnnnnnnnnnnnnnnnnnnnnnnnnnnnnnnnnnnnnnnnnnnnnnnnnnnnnnnnnnnnnnnnnnnnnnnnnnnnnnnnnnnnnnnnnnnnnnnnnnnnnnnnnnnnnnnnnnnnnnnnnnnnnnnnnnnnnnnnnnnnnnnnnnnnnnnnnnnnnnnnnnnnnnnnnnnnnnnnnnnnnnnnnnnnnnnnnnnnnnnnnnnnnnnnnnnnnnnnnnnnnnnnnnnnnnnnnnnnnnnnnnnnnnnnnnnnnnnnnnnnnnnnnnnnnnnnnnnnnnnnnnnnnnnnnnnnnnnnnnnnnnnnnnnnnnnnnnnnnnnnnnnnnnnnnnnnnnnnnnnnnnnnnnnnnnnnnnnnnnnnnnnnnnnnnnnnnnnnnnnnnnnnnnnnnnnnnnnnnnnnnnnnnnnnnnnnnnnnnnnnnnnnnnnnnnnnnnnnnnnnnnnnnnnnnnnnnnnnnnnnnnnnnnnnnnnnnnnnnnnnnnnnnnnnnnnnnnnnnnnnnnnnnnnnnnnnnnnnnnnnnnnnnnnnnnnnnnnnnnnnnnnnnnnnnnnnnnnnnnnnnnnnnnnnnnnnnnnnnnnnnnnnnnnnnnnnnnnnnnnnnnnnnnnnnnnnnnnnnnnnnnnnnnnnnnnnnnnnnnnnnnnnnnnnnnnnnnnnnnnnnnnnnnnnnnnnnnnnnnnnnnnnnnnnnnnnnnnnnnnnnnnnnnnnnnnnnnnnnnnnnnnnnnnnnnnnnnnnnnnnnnnnnnnnnnnnnnnnnnnnnnnnnnnnnnnnnnnnnnnnnnnnnnnnnnnnnnnnnnnnnnnnnnnnnnnnnnnnnnnnnnnnnnnnnnnnnnnnnnnnnnnnnnnnnnnnnnnnnnnnnnnnnnnnnnnnnnnnnnnnnnnnnnnnnnnnnnnnnnnnnnnnnnnnnnnnnnnnnnnnnnnnnnnnnnnnnnnnnnnnnnnnnnnnnnnnnnnnnnnnnnnnnnnnnnnnnnnnnnnnnnnnnnnnnnnnnnnnnnnnnnnnnnnnnnnnnnnnnnnnnnnnnnnnnnnnnnnnnnnnnnnnnnnnnnnnnnnnnnnnnnnnnnnnnnnnnnnnnnnnnnnnnnnnnnnnnnnnnnnnnnnnnnnnnnnnnnnnnnnnnnnnnnnnnnnnnnnnnnnnnnnnnnnnnnnnnnnnnnnnnnnnnnnnnnnnnnnnnnnnnnnnnnnnnnnnnnnnnnnnnnnnnnnnnnnnnnnnnnnnnnnnnnnnnnnnnnnnnnnnnnnnnnnnnnnnnnnnnnnnnnnnnnnnnnnnnnnnnnnnnnnnnnnnnnnnnnnnnnnnnnnnnnnnnnnnnnnnnnnnnnnnnnnnnnnnnnnnnnnnnnnnnnnnnnnnnnnnnnnnnnnnnnnnnnnnnnnnnnnnnnnnnnnnnnnnnnnnnnnnnnnnnnnnnnnnnnnnnnnnnnnnnnnnnnnnnnnnnnnnnnnnnnnnnnnnnnnnnnnnnnnnnnnnnnnnnnnnnnnnnnnnnnnnnnnnnnnnnnnnnnnnnnnnnnnnnnnnnnnnnnnnnnnnnnnnnnnnnnnnnnnnnnnnnnnnnnnnnnnnnnnnnnnnnnnnnnnnnnnnnnnnnnnnnnnnnnnnnnnnnnnnnnnnnnnnnnnnnnnnnnnnnnnnnnnnnnnnnnnnnnnnnnnnnnnnnnnnnnnnnnnnnnnnnnnnnnnnnnnnnnnnnnnnnnnnnnnnnnnnnnnnnnnnnnnnnnnnnnnnnnnnnnnnnnnnnnnnnnnnnnnnnnnnnnnnnnnnnnnnnnnnnnnnnnnnnnnnnnnnnnnnnnnnnnnnnnnnnnnnnnnnnnnnnnnnnnnnnnnnnnnnnnnnnnnnnnnnnnnnnnnnnnnnnnnnnnnnnnnnnnnnnnnnnnnnnnnnnnnnnnnnnnnnnnnnnnnnnnnnnnnnnnnnnnnnnnnnnnnnnnnnnnnnnnnnnnnnnnnnnnnnnnnnnnnnnnnnnnnnnnnnnnnnnnnnnnnnnnnnnnnnnnnnnnnnnnnnnnnnnnnnnnnnnnnnnnnnnnnnnnnnnnnnnnnnnnnnnnnnnnnnnnnnnnnnnnnnnnnnnnnnnnnnnnnnnnnnnnnnnnnnnnnnnnnnnnnnnnnnnnnnnnnnnnnnnnnnnnnnnnnnnnnnnnnnnnnnnnnnnnnnnnnnnnnnnnnnnnnnnnnnnnnnnnnnnnnnnnnnnnnnnnnnnnnnnnnnnnnnnnnnnnnnnnnnnnnnnnnnnnnnnnnnnnnnnnnnnnnnnnnnnnnnnnnnnnnnnnnnnnnnnnnnnnnnnnnnnnnnnnnnnnnnnnnnnnnnnnnnnnnnnnnnnnnnnnnnnnnnnnnnnnnnnnnnnnnnnnnnnnnnnnnnnnnnnnnnnnnnnnnnnnnnnnnnnnnnnnnnnnnnnnnnnnnnnnnnnnnnnnnnnnnnnnnnnnnnnnnnnnnnnnnnnnnnnnnnnnnnnnnnnnnnnnnnnnnnnnnnnnnnnnnnnnnnnnnnnnnnnnnnnnnnnnnnnnnnnnnnnnnnnnnnnnnnnnnnnnnnnnnnnnnnnnnnnnnnnnnnnnnnnnnnnnnnnnnnnnnnnnnnnnnnnnnnnnnnnnnnnnnnnnnnnnnnnnnnnnnnnnnnnnnnnnnnnnnnnnnnnnnnnnnnnnnnnnnnnnnnnnnnnnnnnnnnnnnnnnnnnnnnnnnnnnnnnnnnnnnnnnnnnnnnnnnnnnnnnnnnnnnnnnnnnnnnnnnnnnnnnnnnnnnnnnnnnnnnnnnnnnnnnnnnnnnnnnnnnnnnnnnnnnnnnnnnnnnnnnnnnnnnnnnnnnnnnnnnnnnnnnnnnnnnnnnnnnnnnnnnnnnnnnnnnnnnnnnnnnnnnnnnnnnnnnnnnnnnnnnnnnnnnnnnnnnnnnnnnnnnnnnnnnnnnnnnnnnnnnnnnnnnnnnnnnnnnnnnnnnnnnnnnnnnnnnnnnnnnnnnnnnnnnnnnnnnnnnnnnnnnnnnnnnnnnnnnnnnnnnnnnnnnnnnnnnnnnnnnnnnnnnnnnnnnnnnnnnnnnnnnnnnnnnnnnnnnnnnnnnnnnnnnnnnnnnnnnnnnnnnnnnnnnnnnnnnnnnnnnnnnnnnnnnnnnnnnnnnnnnnnnnnnnnnnnnnnnnnnnnnnnnnnnnnnnnnnnnnnnnnnnnnnnnnnnnnnnnnnnnnnnnnnnnnnnnnnnnnnnnnnnnnnnnnnnnnnnnnnnnnnnnnnnnnnnnnnnnnnnnnnnnnnnnnnnnnnnnnnnnnnnnnnnnnnnnnnnnnnnnnnnnnnnnnnnnnnnnnnnnnnnnnnnnnnnnnnnnnnnnnnnnnnnnnnnnnnnnnnnnnnnnnnnnnnnnnnnnnnnnnnnnnnnnnnnnnnnnnnnnnnnnnnnnnnnnnnnnnnnnnnnnnnnnnnnnnnnnnnnnnnnnnnnnnnnnnnnnnnnnnnnnnnnnnnnnnnnnnnnnnnnnnnnnnnnnnnnnnnnnnnnnnnnnnnnnnnnnnnnnnnnnnnnnnnnnnnnnnnnnnnnnnnnnnnnnnnnnnnnnnnnnnnnnnnnnnnnnnnnnnnnnnnnnnnnnnnnnnnnnnnnnnnnnnnnnnnnnnnnnnnnnnnnnnnnnnnnnnnnnnnnnnnnnnnnnnnnnnnnnnnnnnnnnnnnnnnnnnnnnnnnnnnnnnnnnnnnnnnnnnnnnnnnnnnnnnnnnnnnnnnnnnnnnnnnnnnnnnnnnnnnnnnnnnnnnnnnnnnnnnnnnnnnnnnnnnnnnnnnnnnnnnnnnnnnnnnnnnnnnnnnnnnnnnnnnnnnnnnnnnnnnnnnnnnnnnnnnnnnnnnnnnnnnnnnnnnnnnnnnnnnnnnnnnnnnnnnnnnnnnnnnnnnnnnnnnnnnnnnnnnnnnnnnnnnnnnnnnnnnnnnnnnnnnnnnnnnnnnnnnnnnnnnnnnnnnnnnnnnnnnnnnnnnnnnnnnnnnnnnnnnnnnnnnnnnnnnnnnnnnnnnnnnnnnnnnnnnnnnnnnnnnnnnnnnnnnnnnnnnnnnnnnnnnnnnnnnnnnnnnnnnnnnnnnnnnnnnnnnnnnnnnnnnnnnnnnnnnnnnnnnnnnnnnnnnnnnnnnnnnnnnnnnnnnnnnnnnnnnnnnnnnnnnnnnnnnnnnnnnnnnnnnnnnnnnnnnnnnnnnnnnnnnnnnnnnnnnnnnnnnnnnnnnnnnnnnnnnnnnnnnnnnnnnnnnnnnnnnnnnnnnnnnnnnnnnnnnnnnnnnnnnnnnnnnnnnnnnnnnnnnnnnnnnnnnnnnnnnnnnnnnnnnnnnnnnnnnnnnnnnnnnnnnnnnnnnnnnnnnnnnnnnnnnnnnnnnnnnnnnnnnnnnnnnnnnnnnnnnnnnnnnnnnnnnnnnnnnnnnnnnnnnnnnnnnnnnnnnnnnnnnnnnnnnnnnnnnnnnnnnnnnnnnnnnnnnnnnnnnnnnnnnnnnnnnnnnnnnnnnnnnnnnnnnnnnnnnnnnnnnnnnnnnnnnnnnnnnnnnnnnnnnnnnnnnnnnnnnnnnnnnnnnnnnnnnnnnnnnnnnnnnnnnnnnnnnnnnnnnnnnnnnnnnnnnnnnnnnnnnnnnnnnnnnnnnnnnnnnnnnnnnnnnnnnnnnnnnnnnnnnnnnnnnnnnnnnnnnnnnnnnnnnnnnnnnnnnnnnnnnnnnnnnnnnnnnnnnnnnnnnnnnnnnnnnnnnnnnnnnnnnnnnnnnnnnnnnnnnnnnnnnnnnnnnnnnnnnnnnnnnnnnnnnnnnnnnnnnnnnnnnnnnnnnnnnnnnnnnnnnnnnnnnnnnnnnnnnnnnnnnnnnnnnnnnnnnnnnnnnnnnnnnnnnnnnnnnnnnnnnnnnnnnnnnnnnnnnnnnnnnnnnnnnnnnnnnnnnnnnnnnnnnnnnnnnnnnnnnnnnnnnnnnnnnnnnnnnnnnnnnnnnnnnnnnnnnnnnnnnnnnnnnnnnnnnnnnnnnnnnnnnnnnnnnnnnnnnnnnnnnnnnnnnnnnnnnnnnnnnnnnnnnnnnnnnnnnnnnnnnnnnnnnnnnnnnnnnnnnnnnnnnnnnnnnnnnnnnnnnnnnnnnnnnnnnnnnnnnnnnnnnnnnnnnnnnnnnnnnnnnnnnnnnnnnnnnnnnnnnnnnnnnnnnnnnnnnnnnnnnnnnnnnnnnnnnnnnnnnnnnnnnnnnnnnnnnnnnnnnnnnnnnnnnnnnnnnnnnnnnnnnnnnnnnnnnnnnnnnnnnnnnnnnnnnnnnnnnnnnnnnnnnnnnnnnnnnnnnnnnnnnnnnnnnnnnnnnnnnnnnnnnnnnnnnnnnnnnnnnnnnnnnnnnnnnnnnnnnnnnnnnnnnnnnnnnnnnnnnnnnnnnnnnnnnnnnnnnnnnnnnnnnnnnnnnnnnnnnnnnnnnnnnnnnnnnnnnnnnnnnnnnnnnnnnnnnnnnnnnnnnnnnnnnnnnnnnnnnnnnnnnnnnnnnnnnnnnnnnnnnnnnnnnnnnnnnnnnnnnnnnnnnnnnnnnnnnnnnnnnnnnnnnnnnnnnnnnnnnnnnnnnnnnnnnnnnnnnnnnnnnnnnnnnnnnnnnnnnnnnnnnnnnnnnnnnnnnnnnnnnnnnnnnnnnnnnnnnnnnnnnnnnnnnnnnnnnnnnnnnnnnnnnnnnnnnnnnnnnnnnnnnnnnnnnnnnnnnnnnnnnnnnnnnnnnnnnnnnnnnnnnnnnnnnnnnnnnnnnnnnnnnnnnnnnnnnnnnnnnnnnnnnnnnnnnnnnnnnnnnnnnnnnnnnnnnnnnnnnnnnnnnnnnnnnnnnnnnnnnnnnnnnnnnnnnnnnnnnnnnnnnnnnnnnnnnnnnnnnnnnnnnnnnnnnnnnnnnnnnnnnnnnnnnnnnnnnnnnnnnnnnnnnnnnnnnnnnnnnnnnnnnnnnnnnnnnnnnnnnnnnnnnnnnnnnnnnnnnnnnnnnnnnnnnnnnnnnnnnnnnnnnnnnnnnnnnnnnnnnnnnnnnnnnnnnnnnnnnnnnnnnnnnnnnnnnnnnnnnnnnnnnnnnnnnnnnnnnnnnnnnnnnnnnnnnnnnnnnnnnnnnnnnnnnnnnnnnnnnnnnnnnnnnnnnnnnnnnnnnnnnnnnnnnnnnnnnnnnnnnnnnnnnnnnnnnnnnnnnnnnnnnnnnnnnnnnnnnnnnnnnnnnnnnnnnnnnnnnnnnnnnnnnnnnnnnnnnnnnnnnnnnnnnnnnnnnnnnnnnnnnnnnnnnnnnnnnnnnnnnnnnnnnnnnnnnnnnnnnnnnnnnnnnnnnnnnnnnnnnnnnnnnnnnnnnnnnnnnnnnnnnnnnnnnnnnnnnnnnnnnnnnnnnnnnnnnnnnnnnnnnnnnnnnnnnnnnnnnnnnnnnnnnnnnnnnnnnnnnnnnnnnnnnnnnnnnnnnnnnnnnnnnnnnnnnnnnnnnnnnnnnnnnnnnnnnnnnnnnnnnnnnnnnnnnnnnnnnnnnnnnnnnnnnnnnnnnnnnnnnnnnnnnnnnnnnnnnnnnnnnnnnnnnnnnnnnnnnnnnnnnnnnnnnnnnnnnnnnnnnnnnnnnnnnnnnnnnnnnnnnnnnnnnnnnnnnnnnnnnnnnnnnnnnnnnnnnnnnnnnnnnnnnnnnnnnnnnnnnnnnnnnnnnnnnnnnnnnnnnnnnnnnnnnnnnnnnnnnnnnnnnnnnnnnnnnnnnnnnnnnnnnnnnnnnnnnnnnnnnnnnnnnnnnnnnnnnnnnnnnnnnnnnnnnnnnnnnnnnnnnnnnnnnnnnnnnnnnnnnnnnnnnnnnnnnnnnnnnnnnnnnnnnnnnnnnnnnnnnnnnnnnnnnnnnnnnnnnnnnnnnnnnnnnnnnnnnnnnnnnnnnnnnnnnnnnnnnnnnnnnnnnnnnnnnnnnnnnnnnnnnnnnnnnnnnnnnnnnnnnnnnnnnnnnnnnnnnnnnnnnnnnnnnnnnnnnnnnnnnnnnnnnnnnnnnnnnnnnnnnnnnnnnnnnnnnnnnnnnnnnnnnnnnnnnnnnnnnnnnnnnnnnnnnnnnnnnnnnnnnnnnnnnnnnnnnnnnnnnnnnnnnnnnnnnnnnnnnnnnnnnnnnnnnnnnnnnnnnnnnnnnnnnnnnnnnnnnnnnnnnnnnnnnnnnnnnnnnnnnnnnnnnnnnnnnnnnnnnnnnnnnnnnnnnnnnnnnnnnnnnnnnnnnnnnnnnnnnnnnnnnnnnnnnnnnnnnnnnnnnnnnnnnnnnnnnnnnnnnnnnnnnnnnnnnnnnnnnnnnnnnnnnnnnnnnnnnnnnnnnnnnnnnnnnnnnnnnnnnnnnnnnnnnnnnnnnnnnnnnnnnnnnnnnnnnnnnnnnnnnnnnnnnnnnnnnnnnnnnnnnnnnnnnnnnnnnnnnnnnnnnnnnnnnnnnnnnnnnnnnnnnnnnnnnnnnnnnnnnnnnnnnnnnnnnnnnnnnnnnnnnnnnnnnnnnnnnnnnnnnnnnnnnnnnnnnnnnnnnnnnnnnnnnnnnnnnnnnnnnnnnnnnnnnnnnnnnnnnnnnnnnnnnnnnnnnnnnnnnnnnnnnnnnnnnnnnnnnnnnnnnnnnnnnnnnnnnnnnnnnnnnnnnnnnnnnnnnnnnnnnnnnnnnnnnnnnnnnnnnnnnnnnnnnnnnnnnnnnnnnnnnnnnnnnnnnnnnnnnnnnnnnnnnnnnnnnnnnnnnnnnnnnnnnnnnnnnnnnnnnnnnnnnnnnnnnnnnnnnnnnnnnnnnnnnnnnnnnnnnnnnnnnnnnnnnnnnnnnnnnnnnnnnnnnnnnnnnnnnnnnnnnnnnnnnnnnnnnnnnnnnnnnnnnnnnnnnnnnnnnnnnnnnnnnnnnnnnnnnnnnnnnnnnnnnnnnnnnnnnnnnnnnnnnnnnnnnnnnnnnnnnnnnnnnnnnnnnnnnnnnnnnnnnnnnnnnnnnnnnnnnnnnnnnnnnnnnnnnnnnnnnnnnnnnnnnnnnnnnnnnnnnnnnnnnnnnnnnnnnnnnnnnnnnnnnnnnnnnnnnnnnnnnnnnnnnnnnnnnnnnnnnnnnnnnnnnnnnnnnnnnnnnnnnnnnnnnnnnnnnnnnnnnnnnnnnnnnnnnnnnnnnnnnnnnnnnnnnnnnnnnnnnnnnnnnnnnnnnnnnnnnnnnnnnnnnnnnnnnnnnnnnnnnnnnnnnnnnnnnnnnnnnnnnnnnnnnnnnnnnnnnnnnnnnnnnnnnnnnnnnnnnnnnnnnnnnnnnnnnnnnnnnnnnnnnnnnnnnnnnnnnnnnnnnnnnnnnnnnnnnnnnnnnnnnnnnnnnnnnnnnnnnnnnnnnnnnnnnnnnnnnnnnnnnnnnnnnnnnnnnnnnnnnnnnnnnnnnnnnnnnnnnnnnnnnnnnnnnnnnnnnnnnnnnnnnnnnnnnnnnnnnnnnnnnnnnnnnnnnnnnnnnnnnnnnnnnnnnnnnnnnnnnnnnnnnnnnnnnnnnnnnnnnnnnnnnnnnnnnnnnnnnnnnnnnnnnnnnnnnnnnnnnnnnnnnnnnnnnnnnnnnnnnnnnnnnnnnnnnnnnnnnnnnnnnnnnnnnnnnnnnnnnnnnnnnnnnnnnnnnnnnnnnnnnnnnnnnnnnnnnnnnnnnnnnnnnnnnnnnnnnnnnnnnnnnnnnnnnnnnnnnnnnnnnnnnnnnnnnnnnnnnnnnnnnnnnnnnnnnnnnnnnnnnnnnnnnnnnnnnnnnnnnnnnnnnnnnnnnnnnnnnnnnnnnnnnnnnnnnnnnnnnnnnnnnnnnnnnnnnnnnnnnnnnnnnnnnnnnnnnnnnnnnnnnnnnnnnnnnnnnnnnnnnnnnnnnnnnnnnnnnnnnnnnnnnnnnnnnnnnnnnnnnnnnnnnnnnnnnnnnnnnnnnnnnnnnnnnnnnnnnnnnnnnnnnnnnnnnnnnnnnnnnnnnnnnnnnnnnnnnnnnnnnnnnnnnnnnnnnnnnnnnnnnnnnnnnnnnnnnnnnnnnnnnnnnnnnnnnnnnnnnnnnnnnnnnnnnnnnnnnnnnnnnnnnnnnnnnnnnnnnnnnnnnnnnnnnnnnnnnnnnnnnnnnnnnnnnnnnnnnnnnnnnnnnnnnnnnnnnnnnnnnnnnnnnnnnnnnnnnnnnnnnnnnnnnnnnnnnnnnnnnnnnnnnnnnnnnnnnnnnnnnnnnnnnnnnnnnnnnnnnnnnnnnnnnnnnnnnnnnnnnnnnnnnnnnnnnnnnnnnnnnnnnnnnnnnnnnnnnnnnnnnnnnnnnnnnnnnnnnnnnnnnnnnnnnnnnnnnnnnnnnnnnnnnnnnnnnnnnnnnnnnnnnnnnnnnnnnnnnnnnnnnnnnnnnnnnnnnnnnnnnnnnnnnnnnnnnnnnnnnnnnnnnnnnnnnnnnnnnnnnnnnnnnnnnnnnnnnnnnnnnnnnnnnnnnnnnnnnnnnnnnnnnnnnnnnnnnnnnnnnnnnnnnnnnnnnnnnnnnnnnnnnnnnnnnnnnnnnnnnnnnnnnnnnnnnnnnnnnnnnnnnnnnnnnnnnnnnnnnnnnnnnnnnnnnnnnnnnnnnnnnnnnnnnnnnnnnnnnnnnnnnnnnnnnnnnnnnnnnnnnnnnnnnnnnnnnnnnnnnnnnnnnnnnnnnnnnnnnnnnnnnnnnnnnnnnnnnnnnnnnnnnnnnnnnnnnnnnnnnnnnnnnnnnnnnnnnnnnnnnnnnnnnnnnnnnnnnnnnnnnnnnnnnnnnnnnnnnnnnnnnnnnnnnnnnnnnnnnnnnnnnnnnnnnnnnnnnnnnnnnnnnnnnnnnnnnnnnnnnnnnnnnnnnnnnnnnnnnnnnnnnnnnnnnnnnnnnnnnnnnnnnnnnnnnnnnnnnnnnnnnnnnnnnnnnnnnnnnnnnnnnnnnnnnnnnnnnnnnnnnnnnnnnnnnnnnnnnnnnnnnnnnnnnnnnnnnnnnnnnnnnnnnnnnnnnnnnnnnnnnnnnnnnnnnnnnnnnnnnnnnnnnnnnnnnnnnnnnnnnnnnnnnnnnnnnnnnnnnnnnnnnnnnnnnnnnnnnnnnnnnnnnnnnnnnnnnnnnnnnnnnnnnnnnnnnnnnnnnnnnnnnnnnnnnnnnnnnnnnnnnnnnnnnnnnnnnnnnnnnnnnnnnnnnnnnnnnnnnnnnnnnnnnnnnnnnnnnnnnnnnnnnnnnnnnnnnnnnnnnnnnnnnnnnnnnnnnnnnnnnnnnnnnnnnnnnnnnnnnnnnnnnnnnnnnnnnnnnnnnnnnnnnnnnnnnnnnnnnnnnnnnnnnnnnnnnnnnnnnnnnnnnnnnnnnnnnnnnnnnnnnnnnnnnnnnnnnnnnnnnnnnnnnnnnnnnnnnnnnnnnnnnnnnnnnnnnnnnnnnnnnnnnnnnnnnnnnnnnnnnnnnnnnnnnnnnnnnnnnnnnnnnnnnnnnnnnnnnnnnnnnnnnnnnnnnnnnnnnnnnnnnnnnnnnnnnnnnnnnnnnnnnnnnnnnnnnnnnnnnnnnnnnnnnnnnnnnnnnnnnnnnnnnnnnnnnnnnnnnnnnnnnnnnnnnnnnnnnnnnnnnnnnnnnnnnnnnnnnnnnnnnnnnnnnnnnnnnnnnnnnnnnnnnnnnnnnnnnnnnnnnnnnnnnnnnnnnnnnnnnnnnnnnnnnnnnnnnnnnnnnnnnnnnnnnnnnnnnnnnnnnnnnnnnnnnnnnnnnnnnnnnnnnnnnnnnnnnnnnnnnnnnnnnnnnnnnnnnnnnnnnnnnnnnnnnnnnnnnnnnnnnnnnnnnnnnnnnnnnnnnnnnnnnnnnnnnnnnnnnnnnnnnnnnnnnnnnnnnnnnnnnnnnnnnnnnnnnnnnnnnnnnnnnnnnnnnnnnnnnnnnnnnnnnnnnnnnnnnnnnnnnnnnnnnnnnnnnnnnnnnnnnnnnnnnnnnnnnnnnnnnnnnnnnnnnnnnnnnnnnnnnnnnnnnnnnnnnnnnnnnnnnnnnnnnnnnnnnnnnnnnnnnnnnnnnnnnnnnnnnnnnnnnnnnnnnnnnnnnnnnnnnnnnnnnnnnnnnnnnnnnnnnnnnnnnnnnnnnnnnnnnnnnnnnnnnnnnnnnnnnnnnnnnnnnnnnnnnnnnnnnnnnnnnnnnnnnnnnnnnnnnnnnnnnnnnnnnnnnnnnnnnnnnnnnnnnnnnnnnnnnnnnnnnnnnnnnnnnnnnnnnnnnnnnnnnnnnnnnnnnnnnnnnnnnnnnnnnnnnnnnnnnnnnnnnnnnnnnnnnnnnnnnnnnnnnnnnnnnnnnnnnnnnnnnnnnnnnnnnnnnnnnnnnnnnnnnnnnnnnnnnnnnnnnnnnnnnnnnnnnnnnnnnnnnnnnnnnnnnnnnnnnnnnnnnnnnnnnnnnnnnnnnnnnnnnnnnnnnnnnnnnnnnnnnnnnnnnnnnnnnnnnnnnnnnnnnnnnnnnnnnnnnnnnnnnnnnnnnnnnnnnnnnnnnnnnnnnnnnnnnnnnnnnnnnnnnnnnnnnnnnnnnnnnnnnnnnnnnnnnnnnnnnnnnnnnnnnnnnnnnnnnnnnnnnnnnnnnnnnnnnnnnnnnnnnnnnnnnnnnnnnnnnnnnnnnnnnnnnnnnnnnnnnnnnnnnnnnnnnnnnnnnnnnnnnnnnnnnnnnnnnnnnnnnnnnnnnnnnnnnnnnnnnnnnnnnnnnnnnnnnnnnnnnnnnnnnnnnnnnnnnnnnnnnnnnnnnnnnnnnnnnnnnnnnnnnnnnnnnnnnnnnnnnnnnnnnnnnnnnnnnnnnnnnnnnnnnnnnnnnnnnnnnnnnnnnnnnnnnnnnnnnnnnnnnnnnnnnnnnnnnnnnnnnnnnnnnnnnnnnnnnnnnnnnnnnnnnnnnnnnnnnnnnnnnnnnnnnnnnnnnnnnnnnnnnnnnnnnnnnnnnnnnnnnnnnnnnnnnnnnnnnnnnnnnnnnnnnnnnnnnnnnnnnnnnnnnnnnnnnnnnnnnnnnnnnnnnnnnnnnnnnnnnnnnnnnnnnnnnnnnnnnnnnnnnnnnnnnnnnnnnnnnnnnnnnnnnnnnnnnnnnnnnnnnnnnnnnnnnnnnnnnnnnnnnnnnnnnnnnnnnnnnnnnnnnnnnnnnnnnnnnnnnnnnnnnnnnnnnnnnnnnnnnnnnnnnnnnnnnnnnnnnnnnnnnnnnnnnnnnnnnnnnnnnnnnnnnnnnnnnnnnnnnnnnnnnnnnnnnnnnnnnnnnnnnnnnnnnnnnnnnnnnnnnnnnnnnnnnnnnnnnnnnnnnnnnnnnnnnnnnnnnnnnnnnnnnnnnnnnnnnnnnnnnnnnnnnnnnnnnnnnnnnnnnnnnnnnnnnnnnnnnnnnnnnnnnnnnnnnnnnnnnnnnnnnnnnnnnnnnnnnnnnnnnnnnnnnnnnnnnnnnnnnnnnnnnnnnnnnnnnnnnnnnnnnnnnnnnnnnnnnnnnnnnnnnnnnnnnnnnnnnnnnnnnnnnnnnnnnnnnnnnnnnnnnnnnnnnnnnnnnnnnnnnnnnnnnnnnnnnnnnnnnnnnnnnnnnnnnnnnnnnnnnnnnnnnnnnnnnnnnnnnnnnnnnnnnnnnnnnnnnnnnnnnnnnnnnnnnnnnnnnnnnnnnnnnnnnnnnnnnnnnnnnnnnnnnnnnnnnnnnnnnnnnnnnnnnnnnnnnnnnnnnnnnnnnnnnnnnnnnnnnnnnnnnnnnnnnnnnnnnnnnnnnnnnnnnnnnnnnnnnnnnnnnnnnnnnnnnnnnnnnnnnnnnnnnnnnnnnnnnnnnnnnnnnnnnnnnnnnnnnnnnnnnnnnnnnnnnnnnnnnnnnnnnnnnnnnnnnnnnnnnnnnnnnnnnnnnnnnnnnnnnnnnnnnnnnnnnnnnnnnnnnnnnnnnnnnnnnnnnnnnnnnnnnnnnnnnnnnnnnnnnnnnnnnnnnnnnnnnnnnnnnnnnnnnnnnnnnnnnnnnnnnnnnnnnnnnnnnnnnnnnnnnnnnnnnnnnnnnnnnnnnnnnnnnnnnnnnnnnnnnnnnnnnnnnnnnnnnnnnnnnnnnnnnnnnnnnnnnnnnnnnnnnnnnnnnnnnnnnnnnnnnnnnnnnnnnnnnnnnnnnnnnnnnnnnnnnnnnnnnnnnnnnnnnnnnnnnnnnnnnnnnnnnnnnnnnnnnnnnnnnnnnnnnnnnnnnnnnnnnnnnnnnnnnnnnnnnnnnnnnnnnnnnnnnnnnnnnnnnnnnnnnnnnnnnnnnnnnnnnnnnnnnnnnnnnnnnnnnnnnnnnnnnnnnnnnnnnnnnnnnnnnnnnnnnnnnnnnnnnnnnnnnnnnnnnnnnnnnnnnnnnnnnnnnnnnnnnnnnnnnnnnnnnnnnnnnnnnnnnnnnnnnnnnnnnnnnnnnnnnnnnnnnnnnnnnnnnnnnnnnnnnnnnnnnnnnnnnnnnnnnnnnnnnnnnnnnnnnnnnnnnnnnnnnnnnnnnnnnnnnnnnnnnnnnnnnnnnnnnnnnnnnnnnnnnnnnnnnnnnnnnnnnnnnnnnnnnnnnnnnnnnnnnnnnnnnnnnnnnnnnnnnnnnnnnnnnnnnnnnnnnnnnnnnnnnnnnnnnnnnnnnnnnnnnnnnnnnnnnnnnnnnnnnnnnnnnnnnnnnnnnnnnnnnnnnnnnnnnnnnnnnnnnnnnnnnnnnnnnnnnnnnnnnnnnnnnnnnnnnnnnnnnnnnnnnnnnnnnnnnnnnnnnnnnnnnnnnnnnnnnnnnnnnnnnnnnnnnnnnnnnnnnnnnnnnnnnnnnnnnnnnnnnnnnnnnnnnnnnnnnnnnnnnnnnnnnnnnnnnnnnnnnnnnnnnnnnnnnnnnnnnnnnnnnnnnnnnnnnnnnnnnnnnnnnnnnnnnnnnnnnnnnnnnnnnnnnnnnnnnnnnnnnnnnnnnnnnnnnnnnnnnnnnnnnnnnnnnnnnnnnnnnnnnnnnnnnnnnnnnnnnnnnnnnnnnnnnnnnnnnnnnnnnnnnnnnnnnnnnnnnnnnnnnnnnnnnnnnnnnnnnnnnnnnnnnnnnnnnnnnnnnnnnnnnnnnnnnnnnnnnnnnnnnnnnnnnnnnnnnnnnnnnnnnnnnnnnnnnnnnnnnnnnnnnnnnnnnnnnnnnnnnnnnnnnnnnnnnnnnnnnnnnnnnnnnnnnnnnnnnnnnnnnnnnnnnnnnnnnnnnnnnnnnnnnnnnnnnnnnnnnnnnnnnnnnnnnnnnnnnnnnnnnnnnnnnnnnnnnnnnnnnnnnnnnnnnnnnnnnnnnnnnnnnnnnnnnnnnnnnnnnnnnnnnnnnnnnnnnnnnnnnnnnnnnnnnnnnnnnnnnnnnnnnnnnnnnnnnnnnnnnnnnnnnnnnnnnnnnnnnnnnnnnnnnnnnnnnnnnnnnnnnnnnnnnnnnnnnnnnnnnnnnnnnnnnnnnnnnnnnnnnnnnnnnnnnnnnnnnnnnnnnnnnnnnnnnnnnnnnnnnnnnnnnnnnnnnnnnnnnnnnnnnnnnnnnnnnnnnnnnnnnnnnnnnnnnnnnnnnnnnnnnnnnnnnnnnnnnnnnnnnnnnnnnnnnnnnnnnnnnnnnnnnnnnnnnnnnnnnnnnnnnnnnnnnnnnnnnnnnnnnnnnnnnnnnnnnnnnnnnnnnnnnnnnnnnnnnnnnnnnnnnnnnnnnnnnnnnnnnnnnnnnnnnnnnnnnnnnnnnnnnnnnnnnnnnnnnnnnnnnnnnnnnnnnnnnnnnnnnnnnnnnnnnnnnnnnnnnnnnnnnnnnnnnnnnnnnnnnnnnnnnnnnnnnnnnnnnnnnnnnnnnnnnnnnnnnnnnnnnnnnnnnnnnnnnnnnnnnnnnnnnnnnnnnnnnnnnnnnnnnnnnnnnnnnnnnnnnnnnnnnnnnnnnnnnnnnnnnnnnnnnnnnnnnnnnnnnnnnnnnnnnnnnnnnnnnnnnnnnnnnnnnnnnnnnnnnnnnnnnnnnnnnnnnnnnnnnnnnnnnnnnnnnnnnnnnnnnnnnnnnnnnnnnnnnnnnnnnnnnnnnnnnnnnnnnnnnnnnnnnnnnnnnnnnnnnnnnnnnnnnnnnnnnnnnnnnnnnnnnnnnnnnnnnnnnnnnnnnnnnnnnnnnnnnnnnnnnnnnnnnnnnnnnnnnnnnnnnnnnnnnnnnnnnnnnnnnnnnnnnnnnnnnnnnnnnnnnnnnnnnnnnnnnnnnnnnnnnnnnnnnnnnnnnnnnnnnnnnnnnnnnnnnnnnnnnnnnnnnnnnnnnnnnnnnnnnnnnnnnnnnnnnnnnnnnnnnnnnnnnnnnnnnnnnnnnnnnnnnnnnnnnnnnnnnnnnnnnnnnnnnnnnnnnnnnnnnnnnnnnnnnnnnnnnnnnnnnnnnnnnnnnnnnnnnnnnnnnnnnnnnnnnnnnnnnnnnnnnnnnnnnnnnnnnnnnnnnnnnnnnnnnnnnnnnnnnnnnnnnnnnnnnnnnnnnnnnnnnnnnnnnnnnnnnnnnnnnnnnnnnnnnnnnnnnnnnnnnnnnnnnnnnnnnnnnnnnnnnnnnnnnnnnnnnnnnnnnnnnnnnnnnnnnnnnnnnnnnnnnnnnnnnnnnnnnnnnnnnnnnnnnnnnnnnnnnnnnnnnnnnnnnnnnnnnnnnnnnnnnnnnnnnnnnnnnnnnnnnnnnnnnnnnnnnnnnnnnnnnnnnnnnnnnnnnnnnnnnnnnnnnnnnnnnnnnnnnnnnnnnnnnnnnnnnnnnnnnnnnnnnnnnnnnnnnnnnnnnnnnnnnnnnnnnnnnnnnnnnnnnnnnnnnnnnnnnnnnnnnnnnnnnnnnnnnnnnnnnnnnnnnnnnnnnnnnnnnnnnnnnnnnnnnnnnnnnnnnnnnnnnnnnnnnnnnnnnnnnnnnnnnnnnnnnnnnnnnnnnnnnnnnnnnnnnnnnnnnnnnnnnnnnnnnnnnnnnnnnnnnnnnnnnnnnnnnnnnnnnnnnnnnnnnnnnnnnnnnnnnnnnnnnnnnnnnnnnnnnnnnnnnnnnnnnnnnnnnnnnnnnnnnnnnnnnnnnnnnnnnnnnnnnnnnnnnnnnnnnnnnnnnnnnnnnnnnnnnnnnnnnnnnnnnnnnnnnnnnnnnnnnnnnnnnnnnnnnnnnnnnnnnnnnnnnnnnnnnnnnnnnnnnnnnnnnnnnnnnnnnnnnnnnnnnnnnnnnnnnnnnnnnnnnnnnnnnnnnnnnnnnnnnnnnnnnnnnnnnnnnnnnnnnnnnnnnnnnnnnnnnnnnnnnnnnnnnnnnnnnnnnnnnnnnnnnnnnnnnnnnnnnnnnnnnnnnnnnnnnnnnnnnnnnnnnnnnnnnnnnnnnnnnnnnnnnnnnnnnnnnnnnnnnnnnnnnnnnnnnnnnnnnnnnnnnnnnnnnnnnnnnnnnnnnnnnnnnnnnnnnnnnnnnnnnnnnnnnnnnnnnnnnnnnnnnnnnnnnnnnnnnnnnnnnnnnnnnnnnnnnnnnnnnnnnnnnnnnnnnnnnnnnnnnnnnnnnnnnnnnnnnnnnnnnnnnnnnnnnnnnnnnnnnnnnnnnnnnnnnnnnnnnnnnnnnnnnnnnnnnnnnnnnnnnnnnnnnnnnnnnnnnnnnnnnnnnnnnnnnnnnnnnnnnnnnnnnnnnnnnnnnnnnnnnnnnnnnnnnnnnnnnnnnnnnnnnnnnnnnnnnnnnnnnnnnnnnnnnnnnnnnnnnnnnnnnnnnnnnnnnnnnnnnnnnnnnnnnnnnnnnnnnnnnnnnnnnnnnnnnnnnnnnnnnnnnnnnnnnnnnnnnnnnnnnnnnnnnnnnnnnnnnnnnnnnnnnnnnnnnnnnnnnnnnnnnnnnnnnnnnnnnnnnnnnnnnnnnnnnnnnnnnnnnnnnnnnnnnnnnnnnnnnnnnnnnnnnnnnnnnnnnnnnnnnnnnnnnnnnnnnnnnnnnnnnnnnnnnnnnnnnnnnnnnnnnnnnnnnnnnnnnnnnnnnnnnnnnnnnnnnnnnnnnnnnnnnnnnnnnnnnnnnnnnnnnnnnnnnnnnnnnnnnnnnnnnnnnnnnnnnnnnnnnnnnnnnnnnnnnnnnnnnnnnnnnnnnnnnnnnnnnnnnnnnnnnnnnnnnnnnnnnnnnnnnnnnnnnnnnnnnnnnnnnnnnnnnnnnnnnnnnnnnnnnnnnnnnnnnnnnnnnnnnnnnnnnnnnnnnnnnnnnnnnnnnnnnnnnnnnnnnnnnnnnnnnnnnnnnnnnnnnnnnnnnnnnnnnnnnnnnnnnnnnnnnnnnnnnnnnnnnnnnnnnnnnnnnnnnnnnnnnnnnnnnnnnnnnnnnnnnnnnnnnnnnnnnnnnnnnnnnnnnnnnnnnnnnnnnnnnnnnnnnnnnnnnnnnnnnnnnnnnnnnnnnnnnnnnnnnnnnnnnnnnnnnnnnnnnnnnnnnnnnnnnnnnnnnnnnnnnnnnnnnnnnnnnnnnnnnnnnnnnnnnnnnnnnnnnnnnnnnnnnnnnnnnnnnnnnnnnnnnnnnnnnnnnnnnnnnnnnnnnnnnnnnnnnnnnnnnnnnnnnnnnnnnnnnnnnnnnnnnnnnnnnnnnnnnnnnnnnnnnnnnnnnnnnnnnnnnnnnnnnnnnnnnnnnnnnnnnnnnnnnnnnnnnnnnnnnnnnnnnnnnnnnnnnnnnnnnnnnnnnnnnnnnnnnnnnnnnnnnnnnnnnnnnnnnnnnnnnnnnnnnnnnnnnnnnnnnnnnnnnnnnnnnnnnnnnnnnnnnnnnnnnnnnnnnnnnnnnnnnnnnnnnnnnnnnnnnnnnnnnnnnnnnnnnnnnnnnnnnnnnnnnnnnnnnnnnnnnnnnnnnnnnnnnnnnnnnnnnnnnnnnnnnnnnnnnnnnnnnnnnnnnnnnnnnnnnnnnnnnnnnnnnnnnnnnnnnnnnnnnnnnnnnnnnnnnnnnnnnnnnnnnnnnnnnnnnnnnnnnnnnnnnnnnnnnnnnnnnnnnnnnnnnnnnnnnnnnnnnnnnnnnnnnnnnnnnnnnnnnnnnnnnnnnnnnnnnnnnnnnnnnnnnnnnnnnnnnnnnnnnnnnnnnnnnnnnnnnnnnnnnnnnnnnnnnnnnnnnnnnnnnnnnnnnnnnnnnnnnnnnnnnnnnnnnnnnnnnnnnnnnnnnnnnnnnnnnnnnnnnnnnnnnnnnnnnnnnnnnnnnnnnnnnnnnnnnnnnnnnnnnnnnnnnnnnnnnnnnnnnnnnnnnnnnnnnnnnnnnnnnnnnnnnnnnnnnnnnnnnnnnnnnnnnnnnnnnnnnnnnnnnnnnnnnnnnnnnnnnnnnnnnnnnnnnnnnnnnnnnnnnnnnnnnnnnnnnnnnnnnnnnnnnnnnnnnnnnnnnnnnnnnnnnnnnnnnnnnnnnnnnnnnnnnnnnnnnnnnnnnnnnnnnnnnnnnnnnnnnnnnnnnnnnnnnnnnnnnnnnnnnnnnnnnnnnnnnnnnnnnnnnnnnnnnnnnnnnnnnnnnnnnnnnnnnnnnnnnnnnnnnnnnnnnnnnnnnnnnnnnnnnnnnnnnnnnnnnnnnnnnnnnnnnnnnnnnnnnnnnnnnnnnnnnnnnnnnnnnnnnnnnnnnnnnnnnnnnnnnnnnnnnnnnnnnnnnnnnnnnnnnnnnnnnnnnnnnnnnnnnnnnnnnnnnnnnnnnnnnnnnnnnnnnnnnnnnnnnnnnnnnnnnnnnnnnnnnnnnnnnnnnnnnnnnnnnnnnnnnnnnnnnnnnnnnnnnnnnnnnnnnnnnnnnnnnnnnnnnnnnnnnnnnnnnnnnnnnnnnnnnnnnnnnnnnnnnnnnnnnnnnnnnnnnnnnnnnnnnnnnnnnnnnnnnnnnnnnnnnnnnnnnnnnnnnnnnnnnnnnnnnnnnnnnnnnnnnnnnnnnnnnnnnnnnnnnnnnnnnnnnnnnnnnnnnnnnnnnnnnnnnnnnnnnnnnnnnnnnnnnnnnnnnnnnnnnnnnnnnnnnnnnnnnnnnnnnnnnnnnnnnnnnnnnnnnnnnnnnnnnnnnnnnnnnnnnnnnnnnnnnnnnnnnnnnnnnnnnnnnnnnnnnnnnnnnnnnnnnnnnnnnnnnnnnnnnnnnnnnnnnnnnnnnnnnnnnnnnnnnnnnnnnnnnnnnnnnnnnnnnnnnnnnnnnnnnnnnnnnnnnnnnnnnnnnnnnnnnnnnnnnnnnnnnnnnnnnnnnnnnnnnnnnnnnnnnnnnnnnnnnnnnnnnnnnnnnnnnnnnnnnnnnnnnnnnnnnnnnnnnnnnnnnnnnnnnnnnnnnnnnnnnnnnnnnnnnnnnnnnnnnnnnnnnnnnnnnnnnnnnnnnnnnnnnnnnnnnnnnnnnnnnnnnnnnnnnnnnnnnnnnnnnnnnnnnnnnnnnnnnnnnnnnnnnnnnnnnnnnnnnnnnnnnnnnnnnnnnnnnnnnnnnnnnnnnnnnnnnnnnnnnnnnnnnnnnnnnnnnnnnnnnnnnnnnnnnnnnnnnnnnnnnnnnnnnnnnnnnnnnnnnnnnnnnnnnnnnnnnnnnnnnnnnnnnnnnnnnnnnnnnnnnnnnnnnnnnnnnnnnnnnnnnnnnnnnnnnnnnnnnnnnnnnnnnnnnnnnnnnnnnnnnnnnnnnnnnnnnnnnnnnnnnnnnnnnnnnnnnnnnnnnnnnnnnnnnnnnnnnnnnnnnnnnnnnnnnnnnnnnnnnnnnnnnnnnnnnnnnnnnnnnnnnnnnnnnnnnnnnnnnnnnnnnnnnnnnnnnnnnnnnnnnnnnnnnnnnnnnnnnnnnnnnnnnnnnnnnnnnnnnnnnnnnnnnnnnnnnnnnnnnnnnnnnnnnnnnnnnnnnnnnnnnnnnnnnnnnnnnnnnnnnnnnnnnnnnnnnnnnnnnnnnnnnnnnnnnnnnnnnnnnnnnnnnnnnnnnnnnnnnnnnnnnnnnnnnnnnnnnnnnnnnnnnnnnnnnnnnnnnnnnnnnnnnnnnnnnnnnnnnnnnnnnnnnnnnnnnnnnnnnnnnnnnnnnnnnnnnnnnnnnnnnnnnnnnnnnnnnnnnnnnnnnnnnnnnnnnnnnnnnnnnnnnnnnnnnnnnnnnnnnnnnnnnnnnnnnnnnnnnnnnnnnnnnnnnnnnnnnnnnnnnnnnnnnnnnnnnnnnnnnnnnnnnnnnnnnnnnnnnnnnnnnnnnnnnnnnnnnnnnnnnnnnnnnnnnnnnnnnnnnnnnnnnnnnnnnnnnnnnnnnnnnnnnnnnnnnnnnnnnnnnnnnnnnnnnnnnnnnnnnnnnnnnnnnnnnnnnnnnnnnnnnnnnnnnnnnnnnnnnnnnnnnnnnnnnnnnnnnnnnnnnnnnnnnnnnnnnnnnnnnnnnnnnnnnnnnnnnnnnnnnnnnnnnnnnnnnnnnnnnnnnnnnnnnnnnnnnnnnnnnnnnnnnnnnnnnnnnnnnnnnnnnnnnnnnnnnnnnnnnnnnnnnnnnnnnnnnnnnnnnnnnnnnnnnnnnnnnnnnnnnnnnnnnnnnnnnnnnnnnnnnnnnnnnnnnnnnnnnnnnnnnnnnnnnnnnnnnnnnnnnnnnnnnnnnnnnnnnnnnnnnnnnnnnnnnnnnnnnnnnnnnnnnnnnnnnnnnnnnnnnnnnnnnnnnnnnnnnnnnnnnnnnnnnnnnnnnnnnnnnnnnnnnnnnnnnnnnnnnnnnnnnnnnnnnnnnnnnnnnnnnnnnnnnnnnnnnnnnnnnnnnnnnnnnnnnnnnnnnnnnnnnnnnnnnnnnnnnnnnnnnnnnnnnnnnnnnnnnnnnnnnnnnnnnnnnnnnnnnnnnnnnnnnnnnnnnnnnnnnnnnnnnnnnnnnnnnnnnnnnnnnnnnnnnnnnnnnnnnnnnnnnnnnnnnnnnnnnnnnnnnnnnnnnnnnnnnnnnnnnnnnnnnnnnnnnnnnnnnnnnnnnnnnnnnnnnnnnnnnnnnnnnnnnnnnnnnnnnnnnnnnnnnnnnnnnnnnnnnnnnnnnnnnnnnnnnnnnnnnnnnnnnnnnnnnnnnnnnnnnnnnnnnnnnnnnnnnnnnnnnnnnnnnnnnnnnnnnnnnnnnnnnnnnnnnnnnnnnnnnnnnnnnnnnnnnnnnnnnnnnnnnnnnnnnnnnnnnnnnnnnnnnnnnnnnnnnnnnnnnnnnnnnnnnnnnnnnnnnnnnnnnnnnnnnnnnnnnnnnnnnnnnnnnnnnnnnnnnnnnnnnnnnnnnnnnnnnnnnnnnnnnnnnnnnnnnnnnnnnnnnnnnnnnnnnnnnnnnnnnnnnnnnnnnnnnnnnnnnnnnnnnnnnnnnnnnnnnnnnnnnnnnnnnnnnnnnnnnnnnnnnnnnnnnnnnnnnnnnnnnnnnnnnnnnnnnnnnnnnnnnnnnnnnnnnnnnnnnnnnnnnnnnnnnnnnnnnnnnnnnnnnnnnnnnnnnnnnnnnnnnnnnnnnnnnnnnnnnnnnnnnnnnnnnnnnnnnnnnnnnnnnnnnnnnnnnnnnnnnnnnnnnnnnnnnnnnnnnnnnnnnnnnnnnnnnnnnnnnnnnnnnnnnnnnnnnnnnnnnnnnnnnnnnnnnnnnnnnnnnnnnnnnnnnnnnnnnnnnnnnnnnnnnnnnnnnnnnnnnnnnnnnnnnnnnnnnnnnnnnnnnnnnnnnnnnnnnnnnnnnnnnnnnnnnnnnnnnnnnnnnnnnnnnnnnnnnnnnnnnnnnnnnnnnnnnnnnnnnnnnnnnnnnnnnnnnnnnnnnnnnnnnnnnnnnnnnnnnnnnnnnnnnnnnnnnnnnnnnnnnnnnnnnnnnnnnnnnnnnnnnnnnnnnnnnnnnnnnnnnnnnnnnnnnnnnnnnnnnnnnnnnnnnnnnnnnnnnnnnnnnnnnnnnnnnnnnnnnnnnnnnnnnnnnnnnnnnnnnnnnnnnnnnnnnnnnnnnnnnnnnnnnnnnnnnnnnnnnnnnnnnnnnnnnnnnnnnnnnnnnnnnnnnnnnnnnnnnnnnnnnnnnnnnnnnnnnnnnnnnnnnnnnnnnnnnnnnnnnnnnnnnnnnnnnnnnnnnnnnnnnnnnnnnnnnnnnnnnnnnnnnnnnnnnnnnnnnnnnnnnnnnnnnnnnnnnnnnnnnnnnnnnnnnnnnnnnnnnnnnnnnnnnnnnnnnnnnnnnnnnnnnnnnnnnnnnnnnnnnnnnnnnnnnnnnnnnnnnnnnnnnnnnnnnnnnnnnnnnnnnnnnnnnnnnnnnnnnnnnnnnnnnnnnnnnnnnnnnnnnnnnnnnnnnnnnnnnnnnnnnnnnnnnnnnnnnnnnnnnnnnnnnnnnnnnnnnnnnnnnnnnnnnnnnnnnnnnnnnnnnnnnnnnnnnnnnnnnnnnnnnnnnnnnnnnnnnnnnnnnnnnnnnnnnnnnnnnnnnnnnnnnnnnnnnnnnnnnnnnnnnnnnnnnnnnnnnnnnnnnnnnnnnnnnnnnnnnnnnnnnnnnnnnnnnnnnnnnnnnnnnnnnnnnnnnnnnnnnnnnnnnnnnnnnnnnnnnnnnnnnnnnnnnnnnnnnnnnnnnnnnnnnnnnnnnnnnnnnnnnnnnnnnnnnnnnnnnnnnnnnnnnnnnnnnnnnnnnnnnnnnnnnnnnnnnnnnnnnnnnnnnnnnnnnnnnnnnnnnnnnnnnnnnnnnnnnnnnnnnnnnnnnnnnnnnnnnnnnnnnnnnnnnnnnnnnnnnnnnnnnnnnnnnnnnnnnnnnnnnnnnnnnnnnnnnnnnnnnnnnnnnnnnnnnnnnnnnnnnnnnnnnnnnnnnnnnnnnnnnnnnnnnnnnnnnnnnnnnnnnnnnnnnnnnnnnnnnnnnnnnnnnnnnnnnnnnnnnnnnnnnnnnnnnnnnnnnnnnnnnnnnnnnnnnnnnnnnnnnnnnnnnnnnnnnnnnnnnnnnnnnnnnnnnnnnnnnnnnnnnnnnnnnnnnnnnnnnnnnnnnnnnnnnnnnnnnnnnnnnnnnnnnnnnnnnnnnnnnnnnnnnnnnnnnnnnnnnnnnnnnnnnnnnnnnnnnnnnnnnnnnnnnnnnnnnnnnnnnnnnnnnnnnnnnnnnnnnnnnnnnnnnnnnnnnnnnnnnnnnnnnnnnnnnnnnnnnnnnnnnnnnnnnnnnnnnnnnnnnnnnnnnnnnnnnnnnnnnnnnnnnnnnnnnnnnnnnnnnnnnnnnnnnnnnnnnnnnnnnnnnnnnnnnnnnnnnnnnnnnnnnnnnnnnnnnnnnnnnnnnnnnnnnnnnnnnnnnnnnnnnnnnnnnnnnnnnnnnnnnnnnnnnnnnnnnnnnnnnnnnnnnnnnnnnnnnnnnnnnnnnnnnnnnnnnnnnnnnnnnnnnnnnnnnnnnnnnnnnnnnnnnnnnnnnnnnnnnnnnnnnnnnnnnnnnnnnnnnnnnnnnnnnnnnnnnnnnnnnnnnnnnnnnnnnnnnnnnnnnnnnnnnnnnnnnnnnnnnnnnnnnnnnnnnnnnnnnnnnnnnnnnnnnnnnnnnnnnnnnnnnnnnnnnnnnnnnnnnnnnnnnnnnnnnnnnnnnnnnnnnnnnnnnnnnnnnnnnnnnnnnnnnnnnnnnnnnnnnnnnnnnnnnnnnnnnnnnnnnnnnnnnnnnnnnnnnnnnnnnnnnnnnnnnnnnnnnnnnnnnnnnnnnnnnnnnnnnnnnnnnnnnnnnnnnnnnnnnnnnnnnnnnnnnnnnnnnnnnnnnnnnnnnnnnnnnnnnnnnnnnnnnnnnnnnnnnnnnnnnnnnnnnnnnnnnnnnnnnnnnnnnnnnnnnnnnnnnnnnnnnnnnnnnnnnnnnnnnnnnnnnnnnnnnnnnnnnnnnnnnnnnnnnnnnnnnnnnnnnnnnnnnnnnnnnnnnnnnnnnnnnnnnnnnnnnnnnnnnnnnnnnnnnnnnnnnnnnnnnnnnnnnnnnnnnnnnnnnnnnnnnnnnnnnnnnnnnnnnnnnnnnnnnnnnnnnnnnnnnnnnnnnnnnnnnnnnnnnnnnnnnnnnnnnnnnnnnnnnnnnnnnnnnnnnnnnnnnnnnnnnnnnnnnnnnnnnnnnnnnnnnnnnnnnnnnnnnnnnnnnnnnnnnnnnnnnnnnnnnnnnnnnnnnnnnnnnnnnnnnnnnnnnnnnnnnnnnnnnnnnnnnnnnnnnnnnnnnnnnnnnnnnnnnnnnnnnnnnnnnnnnnnnnnnnnnnnnnnnnnnnnnnnnnnnnnnnnnnnnnnnnnnnnnnnnnnnnnnnnnnnnnnnnnnnnnnnnnnnnnnnnnnnnnnnnnnnnnnnnnnnnnnnnnnnnnnnnnnnnnnnnnnnnnnnnnnnnnnnnnnnnnnnnnnnnnnnnnnnnnnnnnnnnnnnnnnnnnnnnnnnnnnnnnnnnnnnnnnnnnnnnnnnnnnnnnnnnnnnnnnnnnnnnnnnnnnnnnnnnnnnnnnnnnnnnnnnnnnnnnnnnnnnnnnnnnnnnnnnnnnnnnnnnnnnnnnnnnnnnnnnnnnnnnnnnnnnnnnnnnnnnnnnnnnnnnnnnnnnnnnnnnnnnnnnnnnnnnnnnnnnnnnnnnnnnnnnnnnnnnnnnnnnnnnnnnnnnnnnnnnnnnnnnnnnnnnnnnnnnnnnnnnnnnnnnnnnnnnnnnnnnnnnnnnnnnnnnnnnnnnnnnnnnnnnnnnnnnnnnnnnnnnnnnnnnnnnnnnnnnnnnnnnnnnnnnnnnnnnnnnnnnnnnnnnnnnnnnnnnnnnnnnnnnnnnnnnnnnnnnnnnnnnnnnnnnnnnnnnnnnnnnnnnnnnnnnnnnnnnnnnnnnnnnnnnnnnnnnnnnnnnnnnnnnnnnnnnnnnnnnnnnnnnnnnnnnnnnnnnnnnnnnnnnnnnnnnnnnnnnnnnnnnnnnnnnnnnnnnnnnnnnnnnnnnnnnnnnnnnnnnnnnnnnnnnnnnnnnnnnnnnnnnnnnnnnnnnnnnnnnnnnnnnnnnnnnnnnnnnnnnnnnnnnnnnnnnnnnnnnnnnnnnnnnnnnnnnnnnnnnnnnnnnnnnnnnnnnnnnnnnnnnnnnnnnnnnnnnnnnnnnnnnnnnnnnnnnnnnnnnnnnnnnnnnnnnnnnnnnnnnnnnnnnnnnnnnnnnnnnnnnnnnnnnnnnnnnnnnnnnnnnnnnnnnnnnnnnnnnnnnnnnnnnnnnnnnnnnnnnnnnnnnnnnnnnnnnnnnnnnnnnnnnnnnnnnnnnnnnnnnnnnnnnnnnnnnnnnnnnnnnnnnnnnnnnnnnnnnnnnnnnnnnnnnnnnnnnnnnnnnnnnnnnnnnnnnnnnnnnnnnnnnnnnnnnnnnnnnnnnnnnnnnnnnnnnnnnnnnnnnnnnnnnnnnnnnnnnnnnnnnnnnnnnnnnnnnnnnnnnnnnnnnnnnnnnnnnnnnnnnnnnnnnnnnnnnnnnnnnnnnnnnnnnnnnnnnnnnnnnnnnnnnnnnnnnnnnnnnnnnnnnnnnnnnnnnnnnnnnnnnnnnnnnnnnnnnnnnnnnnnnnnnnnnnnnnnnnnnnnnnnnnnnnnnnnnnnnnnnnnnnnnnnnnnnnnnnnnnnnnnnnnnnnnnnnnnnnnnnnnnnnnnnnnnnnnnnnnnnnnnnnnnnnnnnnnnnnnnnnnnnnnnnnnnnnnnnnnnnnnnnnnnnnnnnnnnnnnnnnnnnnnnnnnnnnnnnnnnnnnnnnnnnnnnnnnnnnnnnnnnnnnnnnnnnnnnnnnnnnnnnnnnnnnnnnnnnnnnnnnnnnnnnnnnnnnnnnnnnnnnnnnnnnnnnnnnnnnnnnnnnnnnnnnnnnnnnnnnnnnnnnnnnnnnnnnnnnnnnnnnnnnnnnnnnnnnnnnnnnnnnnnnnnnnnnnnnnnnnnnnnnnnnnnnnnnnnnnnnnnnnnnnnnnnnnnnnnnnnnnnnnnnnnnnnnnnnnnnnnnnnnnnnnnnnnnnnnnnnnnnnnnnnnnnnnnnnnnnnnnnnnnnnnnnnnnnnnnnnnnnnnnnnnnnnnnnnnnnnnnnnnnnnnnnnnnnnnnnnnnnnnnnnnnnnnnnnnnnnnnnnnnnnnnnnnnnnnnnnnnnnnnnnnnnnnnnnnnnnnnnnnnnnnnnnnnnnnnnnnnnnnnnnnnnnnnnnnnnnnnnnnnnnnnnnnnnnnnnnnnnnnnnnnnnnnnnnnnnnnnnnnnnnnnnnnnnnnnnnnnnnnnnnnnnnnnnnnnnnnnnnnnnnnnnnnnnnnnnnnnnnnnnnnnnnnnnnnnnnnnnnnnnnnnnnnnnnnnnnnnnnnnnnnnnnnnnnnnnnnnnnnnnnnnnnnnnnnnnnnnnnnnnnnnnnnnnnnnnnnnnnnnnnnnnnnnnnnnnnnnnnnnnnnnnnnnnnnnnnnnnnnnnnnnnnnnnnnnnnnnnnnnnnnnnnnnnnnnnnnnnnnnnnnnnnnnnnnnnnnnnnnnnnnnnnnnnnnnnnnnnnnnnnnnnnnnnnnnnnnnnnnnnnnnnnnnnnnnnnnnnnnnnnnnnnnnnnnnnnnnnnnnnnnnnnnnnnnnnnnnnnnnnnnnnnnnnnnnnnnnnnnnnnnnnnnnnnnnnnnnnnnnnnnnnnnnnnnnnnnnnnnnnnnnnnnnnnnnnnnnnnnnnnnnnnnnnnnnnnnnnnnnnnnnnnnnnnnnnnnnnnnnnnnnnnnnnnnnnnnnnnnnnnnnnnnnnnnnnnnnnnnnnnnnnnnnnnnnnnnnnnnnnnnnnnnnnnnnnnnnnnnnnnnnnnnnnnnnnnnnnnnnnnnnnnnnnnnnnnnnnnnnnnnnnnnnnnnnnnnnnnnnnnnnnnnnnnnnnnnnnnnnnnnnnnnnnnnnnnnnnnnnnnnnnnnnnnnnnnnnnnnnnnnnnnnnnnnnnnnnnnnnnnnnnnnnnnnnnnnnnnnnnnnnnnnnnnnnnnnnnnnnnnnnnnnnnnnnnnnnnnnnnnnnnnnnnnnnnnnnnnnnnnnnnnnnnnnnnnnnnnnnnnnnnnnnnnnnnnnnnnnnnnnnnnnnnnnnnnnnnnnnnnnnnnnnnnnnnnnnnnnnnnnnnnnnnnnnnnnnnnnnnnnnnnnnnnnnnnnnnnnnnnnnnnnnnnnnnnnnnnnnnnnnnnnnnnnnnnnnnnnnnnnnnnnnnnnnnnnnnnnnnnnnnnnnnnnnnnnnnnnnnnnnnnnnnnnnnnnnnnnnnnnnnnnnnnnnnnnnnnnnnnnnnnnnnnnnnnnnnnnnnnnnnnnnnnnnnnnnnnnnnnnnnnnnnnnnnnnnnnnnnnnnnnnnnnnnnnnnnnnnnnnnnnnnnnnnnnnnnnnnnnnnnnnnnnnnnnnnnnnnnnnnnnnnnnnnnnnnnnnnnnnnnnnnnnnnnnnnnnnnnnnnnnnnnnnnnnnnnnnnnnnnnnnnnnnnnnnnnnnnnnnnnnnnnnnnnnnnnnnnnnnnnnnnnnnnnnnnnnnnnnnnnnnnnnnnnnnnnnnnnnnnnnnnnnnnnnnnnnnnnnnnnnnnnnnnnnnnnnnnnnnnnnnnnnnnnnnnnnnnnnnnnnnnnnnnnnnnnnnnnnnnnnnnnnnnnnnnnnnnnnnnnnnnnnnnnnnnnnnnnnnnnnnnnnnnnnnnnnnnnnnnnnnnnnnnnnnnnnnnnnnnnnnnnnnnnnnnnnnnnnnnnnnnnnnnnnnnnnnnnnnnnnnnnnnnnnnnnnnnnnnnnnnnnnnnnnnnnnnnnnnnnnnnnnnnnnnnnnnnnnnnnnnnnnnnnnnnnnnnnnnnnnnnnnnnnnnnnnnnnnnnnnnnnnnnnnnnnnnnnnnnnnnnnnnnnnnnnnnnnnnnnnnnnnnnnnnnnnnnnnnnnnnnnnnnnnnnnnnnnnnnnnnnnnnnnnnnnnnnnnnnnnnnnnnnnnnnnnnnnnnnnnnnnnnnnnnnnnnnnnnnnnnnnnnnnnnnnnnnnnnnnnnnnnnnnnnnnnnnnnnnnnnnnnnnnnnnnnnnnnnnnnnnnnnnnnnnnnnnnnnnnnnnnnnnnnnnnnnnnnnnnnnnnnnnnnnnnnnnnnnnnnnnnnnnnnnnnnnnnnnnnnnnnnnnnnnnnnnnnnnnnnnnnnnnnnnnnnnnnnnnnnnnnnnnnnnnnnnnnnnnnnnnnnnnnnnnnnnnnnnnnnnnnnnnnnnnnnnnnnnnnnnnnnnnnnnnnnnnnnnnnnnnnnnnnnnnnnnnnnnnnnnnnnnnnnnnnnnnnnnnnnnnnnnnnnnnnnnnnnnnnnnnnnnnnnnnnnnnnnnnnnnnnnnnnnnnnnnnnnnnnnnnnnnnnnnnnnnnnnnnnnnnnnnnnnnnnnnnnnnnnnnnnnnnnnnnnnnnnnnnnnnnnnnnnnnnnnnnnnnnnnnnnnnnnnnnnnnnnnnnnnnnnnnnnnnnnnnnnnnnnnnnnnnnnnnnnnnnnnnnnnnnnnnnnnnnnnnnnnnnnnnnnnnnnnnnnnnnnnnnnnnnnnnnnnnnnnnnnnnnnnnnnnnnnnnnnnnnnnnnnnnnnnnnnnnnnnnnnnnnnnnnnnnnnnnnnnnnnnnnnnnnnnnnnnnnnnnnnnnnnnnnnnnnnnnnnnnnnnnnnnnnnnnnnnnnnnnnnnnnnnnnnnnnnnnnnnnnnnnnnnnnnnnnnnnnnnnnnnnnnnnnnnnnnnnnnnnnnnnnnnnnnnnnnnnnnnnnnnnnnnnnnnnnnnnnnnnnnnnnnnnnnnnnnnnnnnnnnnnnnnnnnnnnnnnnnnnnnnnnnnnnnnnnnnnnnnnnnnnnnnnnnnnnnnnnnnnnnnnnnnnnnnnnnnnnnnnnnnnnnnnnnnnnnnnnnnnnnnnnnnnnnnnnnnnnnnnnnnnnnnnnnnnnnnnnnnnnnnnnnnnnnnnnnnnnnnnnnnnnnnnnnnnnnnnnnnnnnnnnnnnnnnnnnnnnnnnnnnnnnnnnnnnnnnnnnnnnnnnnnnnnnnnnnnnnnnnnnnnnnnnnnnnnnnnnnnnnnnnnnnnnnnnnnnnnnnnnnnnnnnnnnnnnnnnnnnnnnnnnnnnnnnnnnnnnnnnnnnnnnnnnnnnnnnnnnnnnnnnnnnnnnnnnnnnnnnnnnnnnnnnnnnnnnnnnnnnnnnnnnnnnnnnnnnnnnnnnnnnnnnnnnnnnnnnnnnnnnnnnnnnnnnnnnnnnnnnnnnnnnnnnnnnnnnnnnnnnnnnnnnnnnnnnnnnnnnnnnnnnnnnnnnnnnnnnnnnnnnnnnnnnnnnnnnnnnnnnnnnnnnnnnnnnnnnnnnnnnnnnnnnnnnnnnnnnnnnnnnnnnnnnnnnnnnnnnnnnnnnnnnnnnnnnnnnnnnnnnnnnnnnnnnnnnnnnnnnnnnnnnnnnnnnnnnnnnnnnnnnnnnnnnnnnnnnnnnnnnnnnnnnnnnnnnnnnnnnnnnnnnnnnnnnnnnnnnnnnnnnnnnnnnnnnnnnnnnnnnnnnnnnnnnnnnnnnnnnnnnnnnnnnnnnnnnnnnnnnnnnnnnnnnnnnnnnnnnnnnnnnnnnnnnnnnnnnnnnnnnnnnnnnnnnnnnnnnnnnnnnnnnnnnnnnnnnnnnnnnnnnnnnnnnnnnnnnnnnnnnnnnnnnnnnnnnnnnnnnnnnnnnnnnnnnnnnnnnnnnnnnnnnnnnnnnnnnnnnnnnnnnnnnnnnnnnnnnnnnnnnnnnnnnnnnnnnnnnnnnnnnnnnnnnnnnnnnnnnnnnnnnnnnnnnnnnnnnnnnnnnnnnnnnnnnnnnnnnnnnnnnnnnnnnnnnnnnnnnnnnnnnnnnnnnnnnnnnnnnnnnnnnnnnnnnnnnnnnnnnnnnnnnnnnnnnnnnnnnnnnnnnnnnnnnnnnnnnnnnnnnnnnnnnnnnnnnnnnnnnnnnnnnnnnnnnnnnnnnnnnnnnnnnnnnnnnnnnnnnnnnnnnnnnnnnnnnnnnnnnnnnnnnnnnnnnnnnnnnnnnnnnnnnnnnnnnnnnnnnnnnnnnnnnnnnnnnnnnnnnnnnnnnnnnnnnnnnnnnnnnnnnnnnnnnnnnnnnnnnnnnnnnnnnnnnnnnnnnnnnnnnnnnnnnnnnnnnnnnnnnnnnnnnnnnnnnnnnnnnnnnnnnnnnnnnnnnnnnnnnnnnnnnnnnnnnnnnnnnnnnnnnnnnnnnnnnnnnnnnnnnnnnnnnnnnnnnnnnnnnnnnnnnnnnnnnnnnnnnnnnnnnnnnnnnnnnnnnnnnnnnnnnnnnnnnnnnnnnnnnnnnnnnnnnnnnnnnnnnnnnnnnnnnnnnnnnnnnnnnnnnnnnnnnnnnnnnnnnnnnnnnnnnnnnnnnnnnnnnnnnnnnnnnnnnnnnnnnnnnnnnnnnnnnnnnnnnnnnnnnnnnnnnnnnnnnnnnnnnnnnnnnnnnnnnnnnnnnnnnnnnnnnnnnnnnnnnnnnnnnnnnnnnnnnnnnnnnnnnnnnnnnnnnnnnnnnnnnnnnnnnnnnnnnnnnnnnnnnnnnnnnnnnnnnnnnnnnnnnnnnnnnnnnnnnnnnnnnnnnnnnnnnnnnnnnnnnnnnnnnnnnnnnnnnnnnnnnnnnnnnnnnnnnnnnnnnnnnnnnnnnnnnnnnnnnnnnnnnnnnnnnnnnnnnnnnnnnnnnnnnnnnnnnnnnnnnnnnnnnnnnnnnnnnnnnnnnnnnnnnnnnnnnnnnnnnnnnnnnnnnnnnnnnnnnnnnnnnnnnnnnnnnnnnnnnnnnnnnnnnnnnnnnnnnnnnnnnnnnnnnnnnnnnnnnnnnnnnnnnnnnnnnnnnnnnnnnnnnnnnnnnnnnnnnnnnnnnnnnnnnnnnnnnnnnnnnnnnnnnnnnnnnnnnnnnnnnnnnnnnnnnnnnnnnnnnnnnnnnnnnnnnnnnnnnnnnnnnnnnnnnnnnnnnnnnnnnnnnnnnnnnnnnnnnnnnnnnnnnnnnnnnnnnnnnnnnnnnnnnnnnnnnnnnnnnnnnnnnnnnnnnnnnnnnnnnnnnnnnnnnnnnnnnnnnnnnnnnnnnnnnnnnnnnnnnnnnnnnnnnnnnnnnnnnnnnnnnnnnnnnnnnnnnnnnnnnnnnnnnnnnnnnnnnnnnnnnnnnnnnnnnnnnnnnnnnnnnnnnnnnnnnnnnnnnnnnnnnnnnnnnnnnnnnnnnnnnnnnnnnnnnnnnnnnnnnnnnnnnnnnnnnnnnnnnnnnnnnnnnnnnnnnnnnnnnnnnnnnnnnnnnnnnnnnnnnnnnnnnnnnnnnnnnnnnnnnnnnnnnnnnnnnnnnnnnnnnnnnnnnnnnnnnnnnnnnnnnnnnnnnnnnnnnnnnnnnnnnnnnnnnnnnnnnnnnnnnnnnnnnnnnnnnnnnnnnnnnnnnnnnnnnnnnnnnnnnnnnnnnnnnnnnnnnnnnnnnnnnnnnnnnnnnnnnnnnnnnnnnnnnnnnnnnnnnnnnnnnnnnnnnnnnnnnnnnnnnnnnnnnnnnnnnnnnnnnnnnnnnnnnnnnnnnnnnnnnnnnnnnnnnnnnnnnnnnnnnnnnnnnnnnnnnnnnnnnnnnnnnnnnnnnnnnnnnnnnnnnnnnnnnnnnnnnnnnnnnnnnnnnnnnnnnnnnnnnnnnnnnnnnnnnnnnnnnnnnnnnnnnnnnnnnnnnnnnnnnnnnnnnnnnnnnnnnnnnnnnnnnnnnnnnnnnnnnnnnnnnnnnnnnnnnnnnnnnnnnnnnnnnnnnnnnnnnnnnnnnnnnnnnnnnnnnnnnnnnnnnnnnnnnnnnnnnnnnnnnnnnnnnnnnnnnnnnnnnnnnnnnnnnnnnnnnnnnnnnnnnnnnnnnnnnnnnnnnnnnnnnnnnnnnnnnnnnnnnnnnnnnnnnnnnnnnnnnnnnnnnnnnnnnnnnnnnnnnnnnnnnnnnnnnnnnnnnnnnnnnnnnnnnnnnnnnnnnnnnnnnnnnnnnnnnnnnnnnnnnnnnnnnnnnnnnnnnnnnnnnnnnnnnnnnnnnnnnnnnnnnnnnnnnnnnnnnnnnnnnnnnnnnnnnnnnnnnnnnnnnnnnnnnnnnnnnnnnnnnnnnnnnnnnnnnnnnnnnnnnnnnnnnnnnnnnnnnnnnnnnnnnnnnnnnnnnnnnnnnnnnnnnnnnnnnnnnnnnnnnnnnnnnnnnnnnnnnnnnnnnnnnnnnnnnnnnnnnnnnnnnnnnnnnnnnnnnnnnnnnnnnnnnnnnnnnnnnnnnnnnnnnnnnnnnnnnnnnnnnnnnnnnnnnnnnnnnnnnnnnnnnnnnnnnnnnnnnnnnnnnnnnnnnnnnnnnnnnnnnnnnnnnnnnnnnnnnnnnnnnnnnnnnnnnnnnnnnnnnnnnnnnnnnnnnnnnnnnnnnnnnnnnnnnnnnnnnnnnnnnnnnnnnnnnnnnnnnnnnnnnnnnnnnnnnnnnnnnnnnnnnnnnnnnnnnnnnnnnnnnnnnnnnnnnnnnnnnnnnnnnnnnnnnnnnnnnnnnnnnnnnnnnnnnnnnnnnnnnnnnnnnnnnnnnnnnnnnnnnnnnnnnnnnnnnnnnnnnnnnnnnnnnnnnnnnnnnnnnnnnnnnnnnnnnnnnnnnnnnnnnnnnnnnnnnnnnnnnnnnnnnnnnnnnnnnnnnnnnnnnnnnnnnnnnnnnnnnnnnnnnnnnnnnnnnnnnnnnnnnnnnnnnnnnnnnnnnnnnnnnnnnnnnnnnnnnnnnnnnnnnnnnnnnnnnnnnnnnnnnnnnnnnnnnnnnnnnnnnnnnnnnnnnnnnnnnnnnnnnnnnnnnnnnnnnnnnnnnnnnnnnnnnnnnnnnnnnnnnnnnnnnnnnnnnnnnnnnnnnnnnnnnnnnnnnnnnnnnnnnnnnnnnnnnnnnnnnnnnnnnnnnnnnnnnnnnnnnnnnnnnnnnnnnnnnnnnnnnnnnnnnnnnnnnnnnnnnnnnnnnnnnnnnnnnnnnnnnnnnnnnnnnnnnnnnnnnnnnnnnnnnnnnnnnnnnnnnnnnnnnnnnnnnnnnnnnnnnnnnnnnnnnnnnnnnnnnnnnnnnnnnnnnnnnnnnnnnnnnnnnnnnnnnnnnnnnnnnnnnnnnnnnnnnnnnnnnnnnnnnnnnnnnnnnnnnnnnnnnnnnnnnnnnnnnnnnnnnnnnnnnnnnnnnnnnnnnnnnnnnnnnnnnnnnnnnnnnnnnnnnnnnnnnnnnnnnnnnnnnnnnnnnnnnnnnnnnnnnnnnnnnnnnnnnnnnnnnnnnnnnnnnnnnnnnnnnnnnnnnnnnnnnnnnnnnnnnnnnnnnnnnnnnnnnnnnnnnnnnnnnnnnnnnnnnnnnnnnnnnnnnnnnnnnnnnnnnnnnnnnnnnnnnnnnnnnnnnnnnnnnnnnnnnnnnnnnnnnnnnnnnnnnnnnnnnnnnnnnnnnnnnnnnnnnnnnnnnnnnnnnnnnnnnnnnnnnnnnnnnnnnnnnnnnnnnnnnnnnnnnnnnnnnnnnnnnnnnnnnnnnnnnnnnnnnnnnnnnnnnnnnnnnnnnnnnnnnnnnnnnnnnnnnnnnnnnnnnnnnnnnnnnnnnnnnnnnnnnnnnnnnnnnnnnnnnnnnnnnnnnnnnnnnnnnnnnnnnnnnnnnnnnnnnnnnnnnnnnnnnnnnnnnnnnnnnnnnnnnnnnnnnnnnnnnnnnnnnnnnnnnnnnnnnnnnnnnnnnnnnnnnnnnnnnnnnnnnnnnnnnnnnnnnnnnnnnnnnnnnnnnnnnnnnnnnnnnnnnnnnnnnnnnnnnnnnnnnnnnnnnnnnnnnnnnnnnnnnnnnnnnnnnnnnnnnnnnnnnnnnnnnnnnnnnnnnnnnnnnnnnnnnnnnnnnnnnnnnnnnnnnnnnnnnnnnnnnnnnnnnnnnnnnnnnnnnnnnnnnnnnnnnnnnnnnnnnnnnnnnnnnnnnnnnnnnnnnnnnnnnnnnnnnnnnnnnnnnnnnnnnnnnnnnnnnnnnnnnnnnnnnnnnnnnnnnnnnnnnnnnnnnnnnnnnnnnnnnnnnnnnnnnnnnnnnnnnnnnnnnnnnnnnnnnnnnnnnnnnnnnnnnnnnnnnnnnnnnnnnnnnnnnnnnnnnnnnnnnnnnnnnnnnnnnnnnnnnnnnnnnnnnnnnnnnnnnnnnnnnnnnnnnnnnnnnnnnnnnnnnnnnnnnnnnnnnnnnnnnnnnnnnnnnnnnnnnnnnnnnnnnnnnnnnnnnnnnnnnnnnnnnnnnnnnnnnnnnnnnnnnnnnnnnnnnnnnnnnnnnnnnnnnnnnnnnnnnnnnnnnnnnnnnnnnnnnnnnnnnnnnnnnnnnnnnnnnnnnnnnnnnnnnnnnnnnnnnnnnnnnnnnnnnnnnnnnnnnnnnnnnnnnnnnnnnnnnnnnnnnnnnnnnnnnnnnnnnnnnnnnnnnnnnnnnnnnnnnnnnnnnnnnnnnnnnnnnnnnnnnnnnnnnnnnnnnnnnnnnnnnnnnnnnnnnnnnnnnnnnnnnnnnnnnnnnnnnnnnnnnnnnnnnnnnnnnnnnnnnnnnnnnnnnnnnnnnnnnnnnnnnnnnnnnnnnnnnnnnnnnnnnnnnnnnnnnnnnnnnnnnnnnnnnnnnnnnnnnnnnnnnnnnnnnnnnnnnnnnnnnnnnnnnnnnnnnnnnnnnnnnnnnnnnnnnnnnnnnnnnnnnnnnnnnnnnnnnnnnnnnnnnnnnnnnnnnnnnnnnnnnnnnnnnnnnnnnnnnnnnnnnnnnnnnnnnnnnnnnnnnnnnnnnnnnnnnnnnnnnnnnnnnnnnnnnnnnnnnnnnnnnnnnnnnnnnnnnnnnnnnnnnnnnnnnnnnnnnnnnnnnnnnnnnnnnnnnnnnnnnnnnnnnnnnnnnnnnnnnnnnnnnnnnnnnnnnnnnnnnnnnnnnnnnnnnnnnnnnnnnnnnnnnnnnnnnnnnnnnnnnnnnnnnnnnnnnnnnnnnnnnnnnnnnnnnnnnnnnnnnnnnnnnnnnnnnnnnnnnnnnnnnnnnnnnnnnnnnnnnnnnnnnnnnnnnnnnnnnnnnnnnnnnnnnnnnnnnnnnnnnnnnnnnnnnnnnnnnnnnnnnnnnnnnnnnnnnnnnnnnnnnnnnnnnnnnnnnnnnnnnnnnnnnnnnnnnnnnnnnnnnnnnnnnnnnnnnnnnnnnnnnnnnnnnnnnnnnnnnnnnnnnnnnnnnnnnnnnnnnnnnnnnnnnnnnnnnnnnnnnnnnnnnnnnnnnnnnnnnnnnnnnnnnnnnnnnnnnnnnnnnnnnnnnnnnnnnnnnnnnnnnnnnnnnnnnnnnnnnnnnnnnnnnnnnnnnnnnnnnnnnnnnnnnnnnnnnnnnnnnnnnnnnnnnnnnnnnnnnnnnnnnnnnnnnnnnnnnnnnnnnnnnnnnnnnnnnnnnnnnnnnnnnnnnnnnnnnnnnnnnnnnnnnnnnnnnnnnnnnnnnnnnnnnnnnnnnnnnnnnnnnnnnnnnnnnnnnnnnnnnnnnnnnnnnnnnnnnnnnnnnnnnnnnnnnnnnnnnnnnnnnnnnnnnnnnnnnnnnnnnnnnnnnnnnnnnnnnnnnnnnnnnnnnnnnnnnnnnnnnnnnnnnnnnnnnnnnnnnnnnnnnnnnnnnnnnnnnnnnnnnnnnnnnnnnnnnnnnnnnnnnnnnnnnnnnnnnnnnnnnnnnnnnnnnnnnnnnnnnnnnnnnnnnnnnnnnnnnnnnnnnnnnnnnnnnnnnnnnnnnnnnnnnnnnnnnnnnnnnnnnnnnnnnnnnnnnnnnnnnnnnnnnnnnnnnnnnnnnnnnnnnnnnnnnnnnnnnnnnnnnnnnnnnnnnnnnnnnnnnnnnnnnnnnnnnnnnnnnnnnnnnnnnnnnnnnnnnnnnnnnnnnnnnnnnnnnnnnnnnnnnnnnnnnnnnnnnnnnnnnnnnnnnnnnnnnnnnnnnnnnnnnnnnnnnnnnnnnnnnnnnnnnnnnnnnnnnnnnnnnnnnnnnnnnnnnnnnnnnnnnnnnnnnnnnnnnnnnnnnnnnnnnnnnnnnnnnnnnnnnnnnnnnnnnnnnnnnnnnnnnnnnnnnnnnnnnnnnnnnnnnnnnnnnnnnnnnnnnnnnnnnnnnnnnnnnnnnnnnnnnnnnnnnnnnnnnnnnnnnnnnnnnnnnnnnnnnnnnnnnnnnnnnnnnnnnnnnnnnnnnnnnnnnnnnnnnnnnnnnnnnnnnnnnnnnnnnnnnnnnnnnnnnnnnnnnnnnnnnnnnnnnnnnnnnnnnnnnnnnnnnnnnnnnnnnnnnnnnnnnnnnnnnnnnnnnnnnnnnnnnnnnnnnnnnnnnnnnnnnnnnnnnnnnnnnnnnnnnnnnnnnnnnnnnnnnnnnnnnnnnnnnnnnnnnnnnnnnnnnnnnnnnnnnnnnnnnnnnnnnnnnnnnnnnnnnnnnnnnnnnnnnnnnnnnnnnnnnnnnnnnnnnnnnnnnnnnnnnnnnnnnnnnnnnnnnnnnnnnnnnnnnnnnnnnnnnnnnnnnnnnnnnnnnnnnnnnnnnnnnnnnnnnnnnnnnnnnnnnnnnnnnnnnnnnnnnnnnnnnnnnnnnnnnnnnnnnnnnnnnnnnnnnnnnnnnnnnnnnnnnnnnnnnnnnnnnnnnnnnnnnnnnnnnnnnnnnnnnnnnnnnnnnnnnnnnnnnnnnnnnnnnnnnnnnnnnnnnnnnnnnnnnnnnnnnnnnnnnnnnnnnnnnnnnnnnnnnnnnnnnnnnnnnnnnnnnnnnnnnnnnnnnnnnnnnnnnnnnnnnnnnnnnnnnnnnnnnnnnnnnnnnnnnnnnnnnnnnnnnnnnnnnnnnnnnnnnnnnnnnnnnnnnnnnnnnnnnnnnnnnnnnnnnnnnnnnnnnnnnnnnnnnnnnnnnnnnnnnnnnnnnnnnnnnnnnnnnnnnnnnnnnnnnnnnnnnnnnnnnnnnnnnnnnnnnnnnnnnnnnnnnnnnnnnnnnnnnnnnnnnnnnnnnnnnnnnnnnnnnnnnnnnnnnnnnnnnnnnnnnnnnnnnnnnnnnnnnnnnnnnnnnnnnnnnnnnnnnnnnnnnnnnnnnnnnnnnnnnnnnnnnnnnnnnnnnnnnnnnnnnnnnnnnnnnnnnnnnnnnnnnnnnnnnnnnnnnnnnnnnnnnnnnnnnnnnnnnnnnnnnnnnnnnnnnnnnnnnnnnnnnnnnnnnnnnnnnnnnnnnnnnnnnnnnnnnnnnnnnnnnnnnnnnnnnnnnnnnnnnnnnnnnnnnnnnnnnnnnnnnnnnnnnnnnnnnnnnnnnnnnnnnnnnnnnnnnnnnnnnnnnnnnnnnnnnnnnnnnnnnnnnnnnnnnnnnnnnnnnnnnnnnnnnnnnnnnnnnnnnnnnnnnnnnnnnnnnnnnnnnnnnnnnnnnnnnnnnnnnnnnnnnnnnnnnnnnnnnnnnnnnnnnnnnnnnnnnnnnnnnnnnnnnnnnnnnnnnnnnnnnnnnnnnnnnnnnnnnnnnnnnnnnnnnnnnnnnnnnnnnnnnnnnnnnnnnnnnnnnnnnnnnnnnnnnnnnnnnnnnnnnnnnnnnnnnnnnnnnnnnnnnnnnnnnnnnnnnnnnnnnnnnnnnnnnnnnnnnnnnnnnnnnnnnnnnnnnnnnnnnnnnnnnnnnnnnnnnnnnnnnnnnnnnnnnnnnnnnnnnnnnnnnnnnnnnnnnnnnnnnnnnnnnnnnnnnnnnnnnnnnnnnnnnnnnnnnnnnnnnnnnnnnnnnnnnnnnnnnnnnnnnnnnnnnnnnnnnnnnnnnnnnnnnnnnnnnnnnnnnnnnnnnnnnnnnnnnnnnnnnnnnnnnnnnnnnnnnnnnnnnnnnnnnnnnnnnnnnnnnnnnnnnnnnnnnnnnnnnnnnnnnnnnnnnnnnnnnnnnnnnnnnnnnnnnnnnnnnnnnnnnnnnnnnnnnnnnnnnnnnnnnnnnnnnnnnnnnnnnnnnnnnnnnnnnnnnnnnnnnnnnnnnnnnnnnnnnnnnnnnnnnnnnnnnnnnnnnnnnnnnnnnnnnnnnnnnnnnnnnnnnnnnnnnnnnnnnnnnnnnnnnnnnnnnnnnnnnnnnnnnnnnnnnnnnnnnnnnnnnnnnnnnnnnnnnnnnnnnnnnnnnnnnnnnnnnnnnnnnnnnnnnnnnnnnnnnnnnnnnnnnnnnnnnnnnnnnnnnnnnnnnnnnnnnnnnnnnnnnnnnnnnnnnnnnnnnnnnnnnnnnnnnnnnnnnnnnnnnnnnnnnnnnnnnnnnnnnnnnnnnnnnnnnnnnnnnnnnnnnnnnnnnnnnnnnnnnnnnnnnnnnnnnnnnnnnnnnnnnnnnnnnnnnnnnnnnnnnnnnnnnnnnnnnnnnnnnnnnnnnnnnnnnnnnnnnnnnnnnnnnnnnnnnnnnnnnnnnnnnnnnnnnnnnnnnnnnnnnnnnnnnnnnnnnnnnnnnnnnnnnnnnnnnnnnnnnnnnnnnnnnnnnnnnnnnnnnnnnnnnnnnnnnnnnnnnnnnnnnnnnnnnnnnnnnnnnnnnnnnnnnnnnnnnnnnnnnnnnnnnnnnnnnnnnnnnnnnnnnnnnnnnnnnnnnnnnnnnnnnnnnnnnnnnnnnnnnnnnnnnnnnnnnnnnnnnnnnnnnnnnnnnnnnnnnnnnnnnnnnnnnnnnnnnnnnnnnnnnnnnnnnnnnnnnnnnnnnnnnnnnnnnnnnnnnnnnnnnnnnnnnnnnnnnnnnnnnnnnnnnnnnnnnnnnnnnnnnnnnnnnnnnnnnnnnnnnnnnnnnnnnnnnnnnnnnnnnnnnnnnnnnnnnnnnnnnnnnnnnnnnnnnnnnnnnnnnnnnnnnnnnnnnnnnnnnnnnnnnnnnnnnnnnnnnnnnnnnnnnnnnnnnnnnnnnnnnnnnnnnnnnnnnnnnnnnnnnnnnnnnnnnnnnnnnnnnnnnnnnnnnnnnnnnnnnnnnnnnnnnnnnnnnnnnnnnnnnnnnnnnnnnnnnnnnnnnnnnnnnnnnnnnnnnnnnnnnnnnnnnnnnnnnnnnnnnnnnnnnnnnnnnnnnnnnnnnnnnnnnnnnnnnnnnnnnnnnnnnnnnnnnnnnnnnnnnnnnnnnnnnnnnnnnnnnnnnnnnnnnnnnnnnnnnnnnnnnnnnnnnnnnnnnnnnnnnnnnnnnnnnnnnnnnnnnnnnnnnnnnnnnnnnnnnnnnnnnnnnnnnnnnnnnnnnnnnnnnnnnnnnnnnnnnnnnnnnnnnnnnnnnnnnnnnnnnnnnnnnnnnnnnnnnnnnnnnnnnnnnnnnnnnnnnnnnnnnnnnnnnnnnnnnnnnnnnnnnnnnnnnnnnnnnnnnnnnnnnnnnnnnnnnnnnnnnnnnnnnnnnnnnnnnnnnnnnnnnnnnnnnnnnnnnnnnnnnnnnnnnnnnnnnnnnnnnnnnnnnnnnnnnnnnnnnnnnnnnnnnnnnnnnnnnnnnnnnnnnnnnnnnnnnnnnnnnnnnnnnnnnnnnnnnnnnnnnnnnnnnnnnnnnnnnnnnnnnnnnnnnnnnnnnnnnnnnnnnnnnnnnnnnnnnnnnnnnnnnnnnnnnnnnnnnnnnnnnnnnnnnnnnnnnnnnnnnnnnnnnnnnnnnnnnnnnnnnnnnnnnnnnnnnnnnnnnnnnnnnnnnnnnnnnnnnnnnnnnnnnnnnnnnnnnnnnnnnnnnnnnnnnnnnnnnnnnnnnnnnnnnnnnnnnnnnnnnnnnnnnnnnnnnnnnnnnnnnnnnnnnnnnnnnnnnnnnnnnnnnnnnnnnnnnnnnnnnnnnnnnnnnnnnnnnnnnnnnnnnnnnnnnnnnnnnnnnnnnnnnnnnnnnnnnnnnnnnnnnnnnnnnnnnnnnnnnnnnnnnnnnnnnnnnnnnnnnnnnnnnnnnnnnnnnnnnnnnnnnnnnnnnnnnnnnnnnnnnnnnnnnnnnnnnnnnnnnnnnnnnnnnnnnnnnnnnnnnnnnnnnnnnnnnnnnnnnnnnnnnnnnnnnnnnnnnnnnnnnnnnnnnnnnnnnnnnnnnnnnnnnnnnnnnnnnnnnnnnnnnnnnnnnnnnnnnnnnnnnnnnnnnnnnnnnnnnnnnnnnnnnnnnnnnnnnnnnnnnnnnnnnnnnnnnnnnnnnnnnnnnnnnnnnnnnnnnnnnnnnnnnnnnnnnnnnnnnnnnnnnnnnnnnnnnnnnnnnnnnnnnnnnnnnnnnnnnnnnnnnnnnnnnnnnnnnnnnnnnnnnnnnnnnnnnnnnnnnnnnnnnnnnnnnnnnnnnnnnnnnnnnnnnnnnnnnnnnnnnnnnnnnnnnnnnnnnnnnnnnnnnnnnnnnnnnnnnnnnnnnnnnnnnnnnnnnnnnnnnnnnnnnnnnnnnnnnnnnnnnnnnnnnnnnnnnnnnnnnnnnnnnnnnnnnnnnnnnnnnnnnnnnnnnnnnnnnnnnnnnnnnnnnnnnnnnnnnnnnnnnnnnnnnnnnnnnnnnnnnnnnnnnnnnnnnnnnnnnnnnnnnnnnnnnnnnnnnnnnnnnnnnnnnnnnnnnnnnnnnnnnnnnnnnnnnnnnnnnnnnnnnnnnnnnnnnnnnnnnnnnnnnnnnnnnnnnnnnnnnnnnnnnnnnnnnnnnnnnnnnnnnnnnnnnnnnnnnnnnnnnnnnnnnnnnnnnnnnnnnnnnnnnnnnnnnnnnnnnnnnnnnnnnnnnnnnnnnnnnnnnnnnnnnnnnnnnnnnnnnnnnnnnnnnnnnnnnnnnnnnnnnnnnnnnnnnnnnnnnnnnnnnnnnnnnnnnnnnnnnnnnnnnnnnnnnnnnnnnnnnnnnnnnnnnnnnnnnnnnnnnnnnnnnnnnnnnnnnnnnnnnnnnnnnnnnnnnnnnnnnnnnnnnnnnnnnnnnnnnnnnnnnnnnnnnnnnnnnnnnnnnnnnnnnnnnnnnnnnnnnnnnnnnnnnnnnnnnnnnnnnnnnnnnnnnnnnnnnnnnnnnnnnnnnnnnnnnnnnnnnnnnnnnnnnnnnnnnnnnnnnnnnnnnnnnnnnnnnnnnnnnnnnnnnnnnnnnnnnnnnnnnnnnnnnnnnnnnnnnnnnnnnnnnnnnnnnnnnnnnnnnnnnnnnnnnnnnnnnnnnnnnnnnnnnnnnnnnnnnnnnnnnnnnnnnnnnnnnnnnnnnnnnnnnnnnnnnnnnnnnnnnnnnnnnnnnnnnnnnnnnnnnnnnnnnnnnnnnnnnnnnnnnnnnnnnnnnnnnnnnnnnnnnnnnnnnnnnnnnnnnnnnnnnnnnnnnnnnnnnnnnnnnnnnnnnnnnnnnnnnnnnnnnnnnnnnnnnnnnnnnnnnnnnnnnnnnnnnnnnnnnnnnnnnnnnnnnnnnnnnnnnnnnnnnnnnnnnnnnnnnnnnnnnnnnnnnnnnnnnnnnnnnnnnnnnnnnnnnnnnnnnnnnnnnnnnnnnnnnnnnnnnnnnnnnnnnnnnnnnnnnnnnnnnnnnnnnnnnnnnnnnnnnnnnnnnnnnnnnnnnnnnnnnnnnnnnnnnnnnnnnnnnnnnnnnnnnnnnnnnnnnnnnnnnnnnnnnnnnnnnnnnnnnnnnnnnnnnnnnnnnnnnnnnnnnnnnnnnnnnnnnnnnnnnnnnnnnnnnnnnnnnnnnnnnnnnnnnnnnnnnnnnnnnnnnnnnnnnnnnnnnnnnnnnnnnnnnnnnnnnnnnnnnnnnnnnnnnnnnnnnnnnnnnnnnnnnnnnnnnnnnnnnnnnnnnnnnnnnnnnnnnnnnnnnnnnnnnnnnnnnnnnnnnnnnnnnnnnnnnnnnnnnnnnnnnnnnnnnnnnnnnnnnnnnnnnnnnnnnnnnnnnnnnnnnnnnnnnnnnnnnnnnnnnnnnnnnnnnnnnnnnnnnnnnnnnnnnnnnnnnnnnnnnnnnnnnnnnnnnnnnnnnnnnnnnnnnnnnnnnnnnnnnnnnnnnnnnnnnnnnnnnnnnnnnnnnnnnnnnnnnnnnnnnnnnnnnnnnnnnnnnnnnnnnnnnnnnnnnnnnnnnnnnnnnnnnnnnnnnnnnnnnnnnnnnnnnnnnnnnnnnnnnnnnnnnnnnnnnnnnnnnnnnnnnnnnnnnnnnnnnnnnnnnnnnnnnnnnnnnnnnnnnnnnnnnnnnnnnnnnnnnnnnnnnnnnnnnnnnnnnnnnnnnnnnnnnnnnnnnnnnnnnnnnnnnnnnnnnnnnnnnnnnnnnnnnnnnnnnnnnnnnnnnnnnnnnnnnnnnnnnnnnnnnnnnnnnnnnnnnnnnnnnnnnnnnnnnnnnnnnnnnnnnnnnnnnnnnnnnnnnnnnnnnnnnnnnnnnnnnnnnnnnnnnnnnnnnnnnnnnnnnnnnnnnnnnnnnnnnnnnnnnnnnnnnnnnnnnnnnnnnnnnnnnnnnnnnnnnnnnnnnnnnnnnnnnnnnnnnnnnnnnnnnnnnnnnnnnnnnnnnnnnnnnnnnnnnnnnnnnnnnnnnnnnnnnnnnnnnnnnnnnnnnnnnnnnnnnnnnnnnnnnnnnnnnnnnnnnnnnnnnnnnnnnnnnnnnnnnnnnnnnnnnnnnnnnnnnnnnnnnnnnnnnnnnnnnnnnnnnnnnnnnnnnnnnnnnnnnnnnnnnnnnnnnnnnnnnnnnnnnnnnnnnnnnnnnnnnnnnnnnnnnnnnnnnnnnnnnnnnnnnnnnnnnnnnnnnnnnnnnnnnnnnnnnnnnnnnnnnnnnnnnnnnnnnnnnnnnnnnnnnnnnnnnnnnnnnnnnnnnnnnnnnnnnnnnnnnnnnnnnnnnnnnnnnnnnnnnnnnnnnnnnnnnnnnnnnnnnnnnnnnnnnnnnnnnnnnnnnnnnnnnnnnnnnnnnnnnnnnnnnnnnnnnnnnnnnnnnnnnnnnnnnnnnnnnnnnnnnnnnnnnnnnnnnnnnnnnnnnnnnnnnnnnnnnnnnnnnnnnnnnnnnnnnnnnnnnnnnnnnnnnnnnnnnnnnnnnnnnnnnnnnnnnnnnnnnnnnnnnnnnnnnnnnnnnnnnnnnnnnnnnnnnnnnnnnnnnnnnnnnnnnnnnnnnnnnnnnnnnnnnnnnnnnnnnnnnnnnnnnnnnnnnnnnnnnnnnnnnnnnnnnnnnnnnnnnnnnnnnnnnnnnnnnnnnnnnnnnnnnnnnnnnnnnnnnnnnnnnnnnnnnnnnnnnnnnnnnnnnnnnnnnnnnnnnnnnnnnnnnnnnnnnnnnnnnnnnnnnnnnnnnnnnnnnnnnnnnnnnnnnnnnnnnnnnnnnnnnnnnnnnnnnnnnnnnnnnnnnnnnnnnnnnnnnnnnnnnnnnnnnnnnnnnnnnnnnnnnnnnnnnnnnnnnnnnnnnnnnnnnnnnnnnnnnnnnnnnnnnnnnnnnnnnnnnnnnnnnnnnnnnnnnnnnnnnnnnnnnnnnnnnnnnnnnnnnnnnnnnnnnnnnnnnnnnnnnnnnnnnnnnnnnnnnnnnnnnnnnnnnnnnnnnnnnnnnnnnnnnnnnnnnnnnnnnnnnnnnnnnnnnnnnnnnnnnnnnnnnnnnnnnnnnnnnnnnnnnnnnnnnnnnnnnnnnnnnnnnnnnnnnnnnnnnnnnnnnnnnnnnnnnnnnnnnnnnnnnnnnnnnnnnnnnnnnnnnnnnnnnnnnnnnnnnnnnnnnnnnnnnnnnnnnnnnnnnnnnnnnnnnnnnnnnnnnnnnnnnnnnnnnnnnnnnnnnnnnnnnnnnnnnnnnnnnnnnnnnnnnnnnnnnnnnnnnnnnnnnnnnnnnnnnnnnnnnnnnnnnnnnnnnnnnnnnnnnnnnnnnnnnnnnnnnnnnnnnnnnnnnnnnnnnnnnnnnnnnnnnnnnnnnnnnnnnnnnnnnnnnnnnnnnnnnnnnnnnnnnnnnnnnnnnnnnnnnnnnnnnnnnnnnnnnnnnnnnnnnnnnnnnnnnnnnnnnnnnnnnnnnnnnnnnnnnnnnnnnnnnnnnnnnnnnnnnnnnnnnnnnnnnnnnnnnnnnnnnnnnnnnnnnnnnnnnnnnnnnnnnnnnnnnnnnnnnnnnnnnnnnnnnnnnnnnnnnnnnnnnnnnnnnnnnnnnnnnnnnnnnnnnnnnnnnnnnnnnnnnnnnnnnnnnnnnnnnnnnnnnnnnnnnnnnnnnnnnnnnnnnnnnnnnnnnnnnnnnnnnnnnnnnnnnnnnnnnnnnnnnnnnnnnnnnnnnnnnnnnnnnnnnnnnnnnnnnnnnnnnnnnnnnnnnnnnnnnnnnnnnnnnnnnnnnnnnnnnnnnnnnnnnnnnnnnnnnnnnnnnnnnnnnnnnnnnnnnnnnnnnnnnnnnnnnnnnnnnnnnnnnnnnnnnnnnnnnnnnnnnnnnnnnnnnnnnnnnnnnnnnnnnnnnnnnnnnnnnnnnnnnnnnnnnnnnnnnnnnnnnnnnnnnnnnnnnnnnnnnnnnnnnnnnnnnnnnnnnnnnnnnnnnnnnnnnnnnnnnnnnnnnnnnnnnnnnnnnnnnnnnnnnnnnnnnnnnnnnnnnnnnnnnnnnnnnnnnnnnnnnnnnnnnnnnnnnnnnnnnnnnnnnnnnnnnnnnnnnnnnnnnnnnnnnnnnnnnnnnnnnnnnnnnnnnnnnnnnnnnnnnnnnnnnnnnnnnnnnnnnnnnnnnnnnnnnnnnnnnnnnnnnnnnnnnnnnnnnnnnnnnnnnnnnnnnnnnnnnnnnnnnnnnnnnnnnnnnnnnnnnnnnnnnnnnnnnnnnnnnnnnnnnnnnnnnnnnnnnnnnnnnnnnnnnnnnnnnnnnnnnnnnnnnnnnnnnnnnnnnnnnnnnnnnnnnnnnnnnnnnnnnnnnnnnnnnnnnnnnnnnnnnnnnnnnnnnnnnnnnnnnnnnnnnnnnnnnnnnnnnnnnnnnnnnnnnnnnnnnnnnnnnnnnnnnnnnnnnnnnnnnnnnnnnnnnnnnnnnnnnnnnnnnnnnnnnnnnnnnnnnnnnnnnnnnnnnnnnnnnnnnnnnnnnnnnnnnnnnnnnnnnnnnnnnnnnnnnnnnnnnnnnnnnnnnnnnnnnnnnnnnnnnnnnnnnnnnnnnnnnnnnnnnnnnnnnnnnnnnnnnnnnnnnnnnnnnnnnnnnnnnnnnnnnnnnnnnnnnnnnnnnnnnnnnnnnnnnnnnnnnnnnnnnnnnnnnnnnnnnnnnnnnnnnnnnnnnnnnnnnnnnnnnnnnnnnnnnnnnnnnnnnnnnnnnnnnnnnnnnnnnnnnnnnnnnnnnnnnnnnnnnnnnnnnnnnnnnnnnnnnnnnnnnnnnnnnnnnnnnnnnnnnnnnnnnnnnnnnnnnnnnnnnnnnnnnnnnnnnnnnnnnnnnnnnnnnnnnnnnnnnnnnnnnnnnnnnnnnnnnnnnnnnnnnnnnnnnnnnnnnnnnnnnnnnnnnnnnnnnnnnnnnnnnnnnnnnnnnnnnnnnnnnnnnnnnnnnnnnnnnnnnnnnnnnnnnnnnnnnnnnnnnnnnnnnnnnnnnnnnnnnnnnnnnnnnnnnnnnnnnnnnnnnnnnnnnnnnnnnnnnnnnnnnnnnnnnnnnnnnnnnnnnnnnnnnnnnnnnnnnnnnnnnnnnnnnnnnnnnnnnnnnnnnnnnnnnnnnnnnnnnnnnnnnnnnnnnnnnnnnnnnnnnnnnnnnnnnnnnnnnnnnnnnnnnnnnnnnnnnnnnnnnnnnnnnnnnnnnnnnnnnnnnnnnnnnnnnnnnnnnnnnnnnnnnnnnnnnnnnnnnnnnnnnnnnnnnnnnnnnnnnnnnnnnnnnnnnnnnnnnnnnnnnnnnnnnnnnnnnnnnnnnnnnnnnnnnnnnnnnnnnnnnnnnnnnnnnnnnnnnnnnnnnnnnnnnnnnnnnnnnnnnnnnnnnnnnnnnnnnnnnnnnnnnnnnnnnnnnnnnnnnnnnnnnnnnnnnnnnnnnnnnnnnnnnnnnnnnnnnnnnnnnnnnnnnnnnnnnnnnnnnnnnnnnnnnnnnnnnnnnnnnnnnnnnnnnnnnnnnnnnnnnnnnnnnnnnnnnnnnnnnnnnnnnnnnnnnnnnnnnnnnnnnnnnnnnnnnnnnnnnnnnnnnnnnnnnnnnnnnnnnnnnnnnnnnnnnnnnnnnnnnnnnnnnnnnnnnnnnnnnnnnnnnnnnnnnnnnnnnnnnnnnnnnnnnnnnnnnnnnnnnnnnnnnnnnnnnnnnnnnnnnnnnnnnnnnnnnnnnnnnnnnnnnnnnnnnnnnnnnnnnnnnnnnnnnnnnnnnnnnnnnnnnnnnnnnnnnnnnnnnnnnnnnnnnnnnnnnnnnnnnnnnnnnnnnnnnnnnnnnnnnnnnnnnnnnnnnnnnnnnnnnnnnnnnnnnnnnnnnnnnnnnnnnnnnnnnnnnnnnnnnnnnnnnnnnnnnnnnnnnnnnnnnnnnnnnnnnnnnnnnnnnnnnnnnnnnnnnnnnnnnnnnnnnnnnnnnnnnnnnnnnnnnnnnnnnnnnnnnnnnnnnnnnnnnnnnnnnnnnnnnnnnnnnnnnnnnnnnnnnnnnnnnnnnnnnnnnnnnnnnnnnnnnnnnnnnnnnnnnnnnnnnnnnnnnnnnnnnnnnnnnnnnnnnnnnnnnnnnnnnnnnnnnnnnnnnnnnnnnnnnnnnnnnnnnnnnnnnnnnnnnnnnnnnnnnnnnnnnnnnnnnnnnnnnnnnnnnnnnnnnnnnnnnnnnnnnnnnnnnnnnnnnnnnnnnnnnnnnnnnnnnnnnnnnnnnnnnnnnnnnnnnnnnnnnnnnnnnnnnnnnnnnnnnnnnnnnnnnnnnnnnnnnnnnnnnnnnnnnnnnnnnnnnnnnnnnnnnnnnnnnnnnnnnnnnnnnnnnnnnnnnnnnnnnnnnnnnnnnnnnnnnnnnnnnnnnnnnnnnnnnnnnnnnnnnnnnnnnnnnnnnnnnnnnnnnnnnnnnnnnnnnnnnnnnnnnnnnnnnnnnnnnnnnnnnnnnnnnnnnnnnnnnnnnnnnnnnnnnnnnnnnnnnnnnnnnnnnnnnnnnnnnnnnnnnnnnnnnnnnnnnnnnnnnnnnnnnnnnnnnnnnnnnnnnnnnnnnnnnnnnnnnnnnnnnnnnnnnnnnnnnnnnnnnnnnnnnnnnnnnnnnnnnnnnnnnnnnnnnnnnnnnnnnnnnnnnnnnnnnnnnnnnnnnnnnnnnnnnnnnnnnnnnnnnnnnnnnnnnnnnnnnnnnnnnnnnnnnnnnnnnnnnnnnnnnnnnnnnnnnnnnnnnnnnnnnnnnnnnnnnnnnnnnnnnnnnnnnnnnnnnnnnnnnnnnnnnnnnnnnnnnnnnnnnnnnnnnnnnnnnnnnnnnnnnnnnnnnnnnnnnnnnnnnnnnnnnnnnnnnnnnnnnnnnnnnnnnnnnnnnnnnnnnnnnnnnnnnnnnnnnnnnnnnnnnnnnnnnnnnnnnnnnnnnnnnnnnnnnnnnnnnnnnnnnnnnnnnnnnnnnnnnnnnnnnnnnnnnnnnnnnnnnnnnnnnnnnnnnnnnnnnnnnnnnnnnnnnnnnnnnnnnnnnnnnnnnnnnnnnnnnnnnnnnnnnnnnnnnnnnnnnnnnnnnnnnnnnnnnnnnnnnnnnnnnnnnnnnnnnnnnnnnnnnnnnnnnnnnnnnnnnnnnnnnnnnnnnnnnnnnnnnnnnnnnnnnnnnnnnnnnnnnnnnnnnnnnnnnnnnnnnnnnnnnnnnnnnnnnnnnnnnnnnnnnnnnnnnnnnnnnnnnnnnnnnnnnnnnnnnnnnnnnnnnnnnnnnnnnnnnnnnnnnnnnnnnnnnnnnnnnnnnnnnnnnnnnnnnnnnnnnnnnnnnnnnnnnnnnnnnnnnnnnnnnnnnnnnnnnnnnnnnnnnnnnnnnnnnnnnnnnnnnnnnnnnnnnnnnnnnnnnnnnnnnnnnnnnnnnnnnnnnnnnnnnnnnnnnnnnnnnnnnnnnnnnnnnnnnnnnnnnnnnnnnnnnnnnnnnnnnnnnnnnnnnnnnnnnnnnnnnnnnnnnnnnnnnnnnnnnnnnnnnnnnnnnnnnnnnnnnnnnnnnnnnnnnnnnnnnnnnnnnnnnnnnnnnnnnnnnnnnnnnnnnnnnnnnnnnnnnnnnnnnnnnnnnnnnnnnnnnnnnnnnnnnnnnnnnnnnnnnnnnnnnnnnnnnnnnnnnnnnnnnnnnnnnnnnnnnnnnnnnnnnnnnnnnnnnnnnnnnnnnnnnnnnnnnnnnnnnnnnnnnnnnnnnnnnnnnnnnnnnnnnnnnnnnnnnnnnnnnnnnnnnnnnnnnnnnnnnnnnnnnnnnnnnnnnnnnnnnnnnnnnnnnnnnnnnnnnnnnnnnnnnnnnnnnnnnnnnnnnnnnnnnnnnnnnnnnnnnnnnnnnnnnnnnnnnnnnnnnnnnnnnnnnnnnnnnnnnnnnnnnnnnnnnnnnnnnnnnnnnnnnnnnnnnnnnnnnnnnnnnnnnnnnnnnnnnnnnnnnnnnnnnnnnnnnnnnnnnnnnnnnnnnnnnnnnnnnnnnnnnnnnnnnnnnnnnnnnnnnnnnnnnnnnnnnnnnnnnnnnnnnnnnnnnnnnnnnnnnnnnnnnnnnnnnnnnnnnnnnnnnnnnnnnnnnnnnnnnnnnnnnnnnnnnnnnnnnnnnnnnnnnnnnnnnnnnnnnnnnnnnnnnnnnnnnnnnnnnnnnnnnnnnnnnnnnnnnnnnnnnnnnnnnnnnnnnnnnnnnnnnnnnnnnnnnnnnnnnnnnnnnnnnnnnnnnnnnnnnnnnnnnnnnnnnnnnnnnnnnnnnnnnnnnnnnnnnnnnnnnnnnnnnnnnnnnnnnnnnnnnnnnnnnnnnnnnnnnnnnnnnnnnnnnnnnnnnnnnnnnnnnnnnnnnnnnnnnnnnnnnnnnnnnnnnnnnnnnnnnnnnnnnnnnnnnnnnnnnnnnnnnnnnnnnnnnnnnnnnnnnnnnnnnnnnnnnnnnnnnnnnnnnnnnnnnnnnnnnnnnnnnnnnnnnnnnnnnnnnnnnnnnnnnnnnnnnnnnnnnnnnnnnnnnnnnnnnnnnnnnnnnnnnnnnnnnnnnnnnnnnnnnnnnnnnnnnnnnnnnnnnnnnnnnnnnnnnnnnnnnnnnnnnnnnnnnnnnnnnnnnnnnnnnnnnnnnnnnnnnnnnnnnnnnnnnnnnnnnnnnnnnnnnnnnnnnnnnnnnnnnnnnnnnnnnnnnnnnnnnnnnnnnnnnnnnnnnnnnnnnnnnnnnnnnnnnnnnnnnnnnnnnnnnnnnnnnnnnnnnnnnnnnnnnnnnnnnnnnnnnnnnnnnnnnnnnnnnnnnnnnnnnnnnnnnnnnnnnnnnnnnnnnnnnnnnnnnnnnnnnnnnnnnnnnnnnnnnnnnnnnnnnnnnnnnnnnnnnnnnnnnnnnnnnnnnnnnnnnnnnnnnnnnnnnnnnnnnnnnnnnnnnnnnnnnnnnnnnnnnnnnnnnnnnnnnnnnnnnnnnnnnnnnnnnnnnnnnnnnnnnnnnnnnnnnnnnnnnnnnnnnnnnnnnnnnnnnnnnnnnnnnnnnnnnnnnnnnnnnnnnnnnnnnnnnnnnnnnnnnnnnnnnnnnnnnnnnnnnnnnnnnnnnnnnnnnnnnnnnnnnnnnnnnnnnnnnnnnnnnnnnnnnnnnnnnnnnnnnnnnnnnnnnnnnnnnnnnnnnnnnnnnnnnnnnnnnnnnnnnnnnnnnnnnnnnnnnnnnnnnnnnnnnnnnnnnnnnnnnnnnnnnnnnnnnnnnnnnnnnnnnnnnnnnnnnnnnnnnnnnnnnnnnnnnnnnnnnnnnnnnnnnnnnnnnnnnnnnnnnnnnnnnnnnnnnnnnnnnnnnnnnnnnnnnnnnnnnnnnnnnnnnnnnnnnnnnnnnnnnnnnnnnnnnnnnnnnnnnnnnnnnnnnnnnnnnnnnnnnnnnnnnnnnnnnnnnnnnnnnnnnnnnnnnnnnnnnnnnnnnnnnnnnnnnnnnnnnnnnnnnnnnnnnnnnnnnnnnnnnnnnnnnnnnnnnnnnnnnnnnnnnnnnnnnnnnnnnnnnnnnnnnnnnnnnnnnnnnnnnnnnnnnnnnnnnnnnnnnnnnnnnnnnnnnnnnnnnnnnnnnnnnnnnnnnnnnnnnnnnnnnnnnnnnnnnnnnnnnnnnnnnnnnnnnnnnnnnnnnnnnnnnnnnnnnnnnnnnnnnnnnnnnnnnnnnnnnnnnnnnnnnnnnnnnnnnnnnnnnnnnnnnnnnnnnnnnnnnnnnnnnnnnnnnnnnnnnnnnnnnnnnnnnnnnnnnnnnnnnnnnnnnnnnnnnnnnnnnnnnnnnnnnnnnnnnnnnnnnnnnnnnnnnnnnnnnnnnnnnnnnnnnnnnnnnnnnnnnnnnnnnnnnnnnnnnnnnnnnnnnnnnnnnnnnnnnnnnnnnnnnnnnnnnnnnnnnnnnnnnnnnnnnnnnnnnnnnnnnnnnnnnnnnnnnnnnnnnnnnnnnnnnnnnnnnnnnnnnnnnnnnnnnnnnnnnnnnnnnnnnnnnnnnnnnnnnnnnnnnnnnnnnnnnnnnnnnnnnnnnnnnnnnnnnnnnnnnnnnnnnnnnnnnnnnnnnnnnnnnnnnnnnnnnnnnnnnnnnnnnnnnnnnnnnnnnnnnnnnnnnnnnnnnnnnnnnnnnnnnnnnnnnnnnnnnnnnnnnnnnnnnnnnnnnnnnnnnnnnnnnnnnnnnnnnnnnnnnnnnnnnnnnnnnnnnnnnnnnnnnnnnnnnnnnnnnnnnnnnnnnnnnnnnnnnnnnnnnnnnnnnnnnnnnnnnnnnnnnnnnnnnnnnnnnnnnnnnnnnnnnnnnnnnnnnnnnnnnnnnnnnnnnnnnnnnnnnnnnnnnnnnnnnnnnnnnnnnnnnnnnnnnnnnnnnnnnnnnnnnnnnnnnnnnnnnnnnnnnnnnnnnnnnnnnnnnnnnnnnnnnnnnnnnnnnnnnnnnnnnnnnnnnnnnnnnnnnnnnnnnnnnnnnnnnnnnnnnnnnnnnnnnnnnnnnnnnnnnnnnnnnnnnnnnnnnnnnnnnnnnnnnnnnnnnnnnnnnnnnnnnnnnnnnnnnnnnnnnnnnnnnnnnnnnnnnnnnnnnnnnnnnnnnnnnnnnnnnnnnnnnnnnnnnnnnnnnnnnnnnnnnnnnnnnnnnnnnnnnnnnnnnnnnnnnnnnnnnnnnnnnnnnnnnnnnnnnnnnnnnnnnnnnnnnnnnnnnnnnnnnnnnnnnnnnnnnnnnnnnnnnnnnnnnnnnnnnnnnnnnnnnnnnnnnnnnnnnnnnnnnnnnnnnnnnnnnnnnnnnnnnnnnnnnnnnnnnnnnnnnnnnnnnnnnnnnnnnnnnnnnnnnnnnnnnnnnnnnnnnnnnnnnnnnnnnnnnnnnnnnnnnnnnnnnnnnnnnnnnnnnnnnnnnnnnnnnnnnnnnnnnnnnnnnnnnnnnnnnnnnnnnnnnnnnnnnnnnnnnnnnnnnnnnnnnnnnnnnnnnnnnnnnnnnnnnnnnnnnnnnnnnnnnnnnnnnnnnnnnnnnnnnnnnnnnnnnnnnnnnnnnnnnnnnnnnnnnnnnnnnnnnnnnnnnnnnnnnnnnnnnnnnnnnnnnnnnnnnnnnnnnnnnnnnnnnnnnnnnnnnnnnnnnnnnnnnnnnnnnnnnnnnnnnnnnnnnnnnnnnnnnnnnnnnnnnnnnnnnnnnnnnnnnnnnnnnnnnnnnnnnnnnnnnnnnnnnnnnnnnnnnnnnnnnnnnnnnnnnnnnnnnnnnnnnnnnnnnnnnnnnnnnnnnnnnnnnnnnnnnnnnnnnnnnnnnnnnnnnnnnnnnnnnnnnnnnnnnnnnnnnnnnnnnnnnnnnnnnnnnnnnnnnnnnnnnnnnnnnnnnnnnnnnnnnnnnnnnnnnnnnnnnnnnnnnnnnnnnnnnnnnnnnnnnnnnnnnnnnnnnnnnnnnnnnnnnnnnnnnnnnnnnnnnnnnnnnnnnnnnnnnnnnnnnnnnnnnnnnnnnnnnnnnnnnnnnnnnnnnnnnnnnnnnnnnnnnnnnnnnnnnnnnnnnnnnnnnnnnnnnnnnnnnnnnnnnnnnnnnnnnnnnnnnnnnnnnnnnnnnnnnnnnnnnnnnnnnnnnnnnnnnnnnnnnnnnnnnnnnnnnnnnnnnnnnnnnnnnnnnnnnnnnnnnnnnnnnnnnnnnnnnnnnnnnnnnnnnnnnnnnnnnnnnnnnnnnnnnnnnnnnnnnnnnnnnnnnnnnnnnnnnnnnnnnnnnnnnnnnnnnnnnnnnnnnnnnnnnnnnnnnnnnnnnnnnnnnnnnnnnnnnnnnnnnnnnnnnnnnnnnnnnnnnnnnnnnnnnnnnnnnnnnnnnnnnnnnnnnnnnnnnnnnnnnnnnnnnnnnnnnnnnnnnnnnnnnnnnnnnnnnnnnnnnnnnnnnnnnnnnnnnnnnnnnnnnnnnnnnnnnnnnnnnnnnnnnnnnnnnnnnnnnnnnnnnnnnnnnnnnnnnnnnnnnnnnnnnnnnnnnnnnnnnnnnnnnnnnnnnnnnnnnnnnnnnnnnnnnnnnnnnnnnnnnnnnnnnnnnnnnnnnnnnnnnnnnnnnnnnnnnnnnnnnnnnnnnnnnnnnnnnnnnnnnnnnnnnnnnnnnnnnnnnnnnnnnnnnnnnnnnnnnnnnnnnnnnnnnnnnnnnnnnnnnnnnnnnnnnnnnnnnnnnnnnnnnnnnnnnnnnnnnnnnnnnnnnnnnnnnnnnnnnnnnnnnnnnnnnnnnnnnnnnnnnnnnnnnnnnnnnnnnnnnnnnnnnnnnnnnnnnnnnnnnnnnnnnnnnnnnnnnnnnnnnnnnnnnnnnnnnnnnnnnnnnnnnnnnnnnnnnnnnnnnnnnnnnnnnnnnnnnnnnnnnnnnnnnnnnnnnnnnnnnnnnnnnnnnnnnnnnnnnnnnnnnnnnnnnnnnnnnnnnnnnnnnnnnnnnnnnnnnnnnnnnnnnnnnnnnnnnnnnnnnnnnnnnnnnnnnnnnnnnnnnnnnnnnnnnnnnnnnnnnnnnnnnnnnnnnnnnnnnnnnnnnnnnnnnnnnnnnnnnnnnnnnnnnnnnnnnnnnnnnnnnnnnnnnnnnnnnnnnnnnnnnnnnnnnnnnnnnnnnnnnnnnnnnnnnnnnnnnnnnnnnnnnnnnnnnnnnnnnnnnnnnnnnnnnnnnnnnnnnnnnnnnnnnnnnnnnnnnnnnnnnnnnnnnnnnnnnnnnnnnnnnnnnnnnnnnnnnnnnnnnnnnnnnnnnnnnnnnnnnnnnnnnnnnnnnnnnnnnnnnnnnnnnnnnnnnnnnnnnnnnnnnnnnnnnnnnnnnnnnnnnnnnnnnnnnnnnnnnnnnnnnnnnnnnnnnnnnnnnnnnnnnnnnnnnnnnnnnnnnnnnnnnnnnnnnnnnnnnnnnnnnnnnnnnnnnnnnnnnnnnnnnnnnnnnnnnnnnnnnnnnnnnnnnnnnnnnnnnnnnnnnnnnnnnnnnnnnnnnnnnnnnnnnnnnnnnnnnnnnnnnnnnnnnnnnnnnnnnnnnnnnnnnnnnnnnnnnnnnnnnnnnnnnnnnnnnnnnnnnnnnnnnnnnnnnnnnnnnnnnnnnnnnnnnnnnnnnnnnnnnnnnnnnnnnnnnnnnnnnnnnnnnnnnnnnnnnnnnnnnnnnnnnnnnnnnnnnnnnnnnnnnnnnnnnnnnnnnnnnnnnnnnnnnnnnnnnnnnnnnnnnnnnnnnnnnnnnnnnnnnnnnnnnnnnnnnnnnnnnnnnnnnnnnnnnnnnnnnnnnnnnnnnnnnnnnnnnnnnnnnnnnnnnnnnnnnnnnnnnnnnnnnnnnnnnnnnnnnnnnnnnnnnnnnnnnnnnnnnnnnnnnnnnnnnnnnnnnnnnnnnnnnnnnnnnnnnnnnnnnnnnnnnnnnnnnnnnnnnnnnnnnnnnnnnnnnnnnnnnnnnnnnnnnnnnnnnnnnnnnnnnnnnnnnnnnnnnnnnnnnnnnnnnnnnnnnnnnnnnnnnnnnnnnnnnnnnnnnnnnnnnnnnnnnnnnnnnnnnnnnnnnnnnnnnnnnnnnnnnnnnnnnnnnnnnnnnnnnnnnnnnnnnnnnnnnnnnnnnnnnnnnnnnnnnnnnnnnnnnnnnnnnnnnnnnnnnnnnnnnnnnnnnnnnnnnnnnnnnnnnnnnnnnnnnnnnnnnnnnnnnnnnnnnnnnnnnnnnnnnnnnnnnnnnnnnnnnnnnnnnnnnnnnnnnnnnnnnnnnnnnnnnnnnnnnnnnnnnnnnnnnnnnnnnnnnnnnnnnnnnnnnnnnnnnnnnnnnnnnnnnnnnnnnnnnnnnnnnnnnnnnnnnnnnnnnnnnnnnnnnnnnnnnnnnnnnnnnnnnnnnnnnnnnnnnnnnnnnnnnnnnnnnnnnnnnnnnnnnnnnnnnnnnnnnnnnnnnnnnnnnnnnnnnnnnnnnnnnnnnnnnnnnnnnnnnnnnnnnnnnnnnnnnnnnnnnnnnnnnnnnnnnnnnnnnnnnnnnnnnnnnnnnnnnnnnnnnnnnnnnnnnnnnnnnnnnnnnnnnnnnnnnnnnnnnnnnnnnnnnnnnnnnnnnnnnnnnnnnnnnnnnnnnnnnnnnnnnnnnnnnnnnnnnnnnnnnnnnnnnnnnnnnnnnnnnnnnnnnnnnnnnnnnnnnnnnnnnnnnnnnnnnnnnnnnnnnnnnnnnnnnnnnnnnnnnnnnnnnnnnnnnnnnnnnnnnnnnnnnnnnnnnnnnnnnnnnnnnnnnnnnnnnnnnnnnnnnnnnnnnnnnnnnnnnnnnnnnnnnnnnnnnnnnnnnnnnnnnnnnnnnnnnnnnnnnnnnnnnnnnnnnnnnnnnnnnnnnnnnnnnnnnnnnnnnnnnnnnnnnnnnnnnnnnnnnnnnnnnnnnnnnnnnnnnnnnnnnnnnnnnnnnnnnnnnnnnnnnnnnnnnnnnnnnnnnnnnnnnnnnnnnnnnnnnnnnnnnnnnnnnnnnnnnnnnnnnnnnnnnnnnnnnnnnnnnnnnnnnnnnnnnnnnnnnnnnnnnnnnnnnnnnnnnnnnnnnnnnnnnnnnnnnnnnnnnnnnnnnnnnnnnnnnnnnnnnnnnnnnnnnnnnnnnnnnnnnnnnnnnnnnnnnnnnnnnnnnnnnnnnnnnnnnnnnnnnnnnnnnnnnnnnnnnnnnnnnnnnnnnnnnnnnnnnnnnnnnnnnnnnnnnnnnnnnnnnnnnnnnnnnnnnnnnnnnnnnnnnnnnnnnnnnnnnnnnnnnnnnnnnnnnnnnnnnnnnnnnnnnnnnnnnnnnnnnnnnnnnnnnnnnnnnnnnnnnnnnnnnnnnnnnnnnnnnnnnnnnnnnnnnnnnnnnnnnnnnnnnnnnnnnnnnnnnnnnnnnnnnnnnnnnnnnnnnnnnnnnnnnnnnnnnnnnnnnnnnnnnnnnnnnnnnnnnnnnnnnnnnnnnnnnnnnnnnnnnnnnnnnnnnnnnnnnnnnnnnnnnnnnnnnnnnnnnnnnnnnnnnnnnnnnnnnnnnnnnnnnnnnnnnnnnnnnnnnnnnnnnnnnnnnnnnnnnnnnnnnnnnnnnnnnnnnnnnnnnnnnnnnnnnnnnnnnnnnnnnnnnnnnnnnnnnnnnnnnnnnnnnnnnnnnnnnnnnnnnnnnnnnnnnnnnnnnnnnnnnnnnnnnnnnnnnnnnnnnnnnnnnnnnnnnnnnnnnnnnnnnnnnnnnnnnnnnnnnnnnnnnnnnnnnnnnnnnnnnnnnnnnnnnnnnnnnnnnnnnnnnnnnnnnnnnnnnnnnnnnnnnnnnnnnnnnnnnnnnnnnnnnnnnnnnnnnnnnnnnnnnnnnnnnnnnnnnnnnnnnnnnnnnnnnnnnnnnnnnnnnnnnnnnnnnnnnnnnnnnnnnnnnnnnnnnnnnnnnnnnnnnnnnnnnnnnnnnnnnnnnnnnnnnnnnnnnnnnnnnnnnnnnnnnnnnnnnnnnnnnnnnnnnnnnnnnnnnnnnnnnnnnnnnnnnnnnnnnnnnnnnnnnnnnnnnnnnnnnnnnnnnnnnnnnnnnnnnnnnnnnnnnnnnnnnnnnnnnnnnnnnnnnnnnnnnnnnnnnnnnnnnnnnnnnnnnnnnnnnnnnnnnnnnnnnnnnnnnnnnnnnnnnnnnnnnnnnnnnnnnnnnnnnnnnnnnnnnnnnnnnnnnnnnnnnnnnnnnnnnnnnnnnnnnnnnnnnnnnnnnnnnnnnnnnnnnnnnnnnnnnnnnnnnnnnnnnnnnnnnnnnnnnnnnnnnnnnnnnnnnnnnnnnnnnnnnnnnnnnnnnnnnnnnnnnnnnnnnnnnnnnnnnnnnnnnnnnnnnnnnnnnnnnnnnnnnnnnnnnnnnnnnnnnnnnnnnnnnnnnnnnnnnnnnnnnnnnnnnnnnnnnnnnnnnnnnnnnnnnnnnnnnnnnnnnnnnnnnnnnnnnnnnnnnnnnnnnnnnnnnnnnnnnnnnnnnnnnnnnnnnnnnnnnnnnnnnnnnnnnnnnnnnnnnnnnnnnnnnnnnnnnnnnnnnnnnnnnnnnnnnnnnnnnnnnnnnnnnnnnnnnnnnnnnnnnnnnnnnnnnnnnnnnnnnnnnnnnnnnnnnnnnnnnnnnnnnnnnnnnnnnnnnnnnnnnnnnnnnnnnnnnnnnnnnnnnnnnnnnnnnnnnnnnnnnnnnnnnnnnnnnnnnnnnnnnnnnnnnnnnnnnnnnnnnnnnnnnnnnnnnnnnnnnnnnnnnnnnnnnnnnnnnnnnnnnnnnnnnnnnnnnnnnnnnnnnnnnnnnnnnnnnnnnnnnnnnnnnnnnnnnnnnnnnnnnnnnnnnnnnnnnnnnnnnnnnnnnnnnnnnnnnnnnnnnnnnnnnnnnnnnnnnnnnnnnnnnnnnnnnnnnnnnnnnnnnnnnnnnnnnnnnnnnnnnnnnnnnnnnnnnnnnnnnnnnnnnnnnnnnnnnnnnnnnnnnnnnnnnnnnnnnnnnnnnnnnnnnnnnnnnnnnnnnnnnnnnnnnnnnnnnnnnnnnnnnnnnnnnnnnnnnnnnnnnnnnnnnnnnnnnnnnnnnnnnnnnnnnnnnnnnnnnnnnnnnnnnnnnnnnnnnnnnnnnnnnnnnnnnnnnnnnnnnnnnnnnnnnnnnnnnnnnnnnnnnnnnnnnnnnnnnnnnnnnnnnnnnnnnnnnnnnnnnnnnnnnnnnnnnnnnnnnnnnnnnnnnnnnnnnnnnnnnnnnnnnnnnnnnnnnnnnnnnnnnnnnnnnnnnnnnnnnnnnnnnnnnnnnnnnnnnnnnnnnnnnnnnnnnnnnnnnnnnnnnnnnnnnnnnnnnnnnnnnnnnnnnnnnnnnnnnnnnnnnnnnnnnnnnnnnnnnnnnnnnnnnnnnnnnnnnnnnnnnnnnnnnnnnnnnnnnnnnnnnnnnnnnnnnnnnnnnnnnnnnnnnnnnnnnnnnnnnnnnnnnnnnnnnnnnnnnnnnnnnnnnnnnnnnnnnnnnnnnnnnnnnnnnnnnnnnnnnnnnnnnnnnnnnnnnnnnnnnnnnnnnnnnnnnnnnnnnnnnnnnnnnnnnnnnnnnnnnnnnnnnnnnnnnnnnnnnnnnnnnnnnnnnnnnnnnnnnnnnnnnnnnnnnnnnnnnnnnnnnnnnnnnnnnnnnnnnnnnnnnnnnnnnnnnnnnnnnnnnnnnnnnnnnnnnnnnnnnnnnnnnnnnnnnnnnnnnnnnnnnnnnnnnnnnnnnnnnnnnnnnnnnnnnnnnnnnnnnnnnnnnnnnnnnnnnnnnnnnnnnnnnnnnnnnnnnnnnnnnnnnnnnnnnnnnnnnnnnnnnnnnnnnnnnnnnnnnnnnnnnnnnnnnnnnnnnnnnnnnnnnnnnnnnnnnnnnnnnnnnnnnnnnnnnnnnnnnnnnnnnnnnnnnnnnnnnnnnnnnnnnnnnnnnnnnnnnnnnnnnnnnnnnnnnnnnnnnnnnnnnnnnnnnnnnnnnnnnnnnnnnnnnnnnnnnnnnnnnnnnnnnnnnnnnnnnnnnnnnnnnnnnnnnnnnnnnnnnnnnnnnnnnnnnnnnnnnnnnnnnnnnnnnnnnnnnnnnnnnnnnnnnnnnnnnnnnnnnnnnnnnnnnnnnnnnnnnnnnnnnnnnnnnnnnnnnnnnnnnnnnnnnnnnnnnnnnnnnnnnnnnnnnnnnnnnnnnnnnnnnnnnnnnnnnnnnnnnnnnnnnnnnnnnnnnnnnnnnnnnnnnnnnnnnnnnnnnnnnnnnnnnnnnnnnnnnnnnnnnnnnnnnnnnnnnnnnnnnnnnnnnnnnnnnnnnnnnnnnnnnnnnnnnnnnnnnnnnnnnnnnnnnnnnnnnnnnnnnnnnnnnnnnnnnnnnnnnnnnnnnnnnnnnnnnnnnnnnnnnnnnnnnnnnnnnnnnnnnnnnnnnnnnnnnnnnnnnnnnnnnnnnnnnnnnnnnnnnnnnnnnnnnnnnnnnnnnnnnnnnnnnnnnnnnnnnnnnnnnnnnnnnnnnnnnnnnnnnnnnnnnnnnnnnnnnnnnnnnnnnnnnnnnnnnnnnnnnnnnnnnnnnnnnnnnnnnnnnnnnnnnnnnnnnnnnnnnnnnnnnnnnnnnnnnnnnnnnnnnnnnnnnnnnnnnnnnnnnnnnnnnnnnnnnnnnnnnnnnnnnnnnnnnnnnnnnnnnnnnnnnnnnnnnnnnnnnnnnnnnnnnnnnnnnnnnnnnnnnnnnnnnnnnnnnnnnnnnnnnnnnnnnnnnnnnnnnnnnnnnnnnnnnnnnnnnnnnnnnnnnnnnnnnnnnnnnnnnnnnnnnnnnnnnnnnnnnnnnnnnnnnnnnnnnnnnnnnnnnnnnnnnnnnnnnnnnnnnnnnnnnnnnnnnnnnnnnnnnnnnnnnnnnnnnnnnnnnnnnnnnnnnnnnnnnnnnnnnnnnnnnnnnnnnnnnnnnnnnnnnnnnnnnnnnnnnnnnnnnnnnnnnnnnnnnnnnnnnnnnnnnnnnnnnnnnnnnnnnnnnnnnnnnnnnnnnnnnnnnnnnnnnnnnnnnnnnnnnnnnnnnnnnnnnnnnnnnnnnnnnnnnnnnnnnnnnnnnnnnnnnnnnnnnnnnnnnnnnnnnnnnnnnnnnnnnnnnnnnnnnnnnnnnnnnnnnnnnnnnnnnnnnnnnnnnnnnnnnnnnnnnnnnnnnnnnnnnnnnnnnnnnnnnnnnnnnnnnnnnnnnnnnnnnnnnnnnnnnnnnnnnnnnnnnnnnnnnnnnnnnnnnnnnnnnnnnnnnnnnnnnnnnnnnnnnnnnnnnnnnnnnnnnnnnnnnnnnnnnnnnnnnnnnnnnnnnnnnnnnnnnnnnnnnnnnnnnnnnnnnnnnnnnnnnnnnnnnnnnnnnnnnnnnnnnnnnnnnnnnnnnnnnnnnnnnnnnnnnnnnnnnnnnnnnnnnnnnnnnnnnnnnnnnnnnnnnnnnnnnnnnnnnnnnnnnnnnnnnnnnnnnnnnnnnnnnnnnnnnnnnnnnnnnnnnnnnnnnnnnnnnnnnnnnnnnnnnnnnnnnnnnnnnnnnnnnnnnnnnnnnnnnnnnnnnnnnnnnnnnnnnnnnnnnnnnnnnnnnnnnnnnnnnnnnnnnnnnnnnnnnnnnnnnnnnnnnnnnnnnnnnnnnnnnnnnnnnnnnnnnnnnnnnnnnnnnnnnnnnnnnnnnnnnnnnnnnnnnnnnnnnnnnnnnnnnnnnnnnnnnnnnnnnnnnnnnnnnnnnnnnnnnnnnnnnnnnnnnnnnnnnnnnnnnnnnnnnnnnnnnnnnnnnnnnnnnnnnnnnnnnnnnnnnnnnnnnnnnnnnnnnnnnnnnnnnnnnnnnnnnnnnnnnnnnnnnnnnnnnnnnnnnnnnnnnnnnnnnnnnnnnnnnnnnnnnnnnnnnnnnnnnnnnnnnnnnnnnnnnnnnnnnnnnnnnnnnnnnnnnnnnnnnnnnnnnnnnnnnnnnnnnnnnnnnnnnnnnnnnnnnnnnnnnnnnnnnnnnnnnnnnnnnnnnnnnnnnnnnnnnnnnnnnnnnnnnnnnnnnnnnnnnnnnnnnnnnnnnnnnnnnnnnnnnnnnnnnnnnnnnnnnnnnnnnnnnnnnnnnnnnnnnnnnnnnnnnnnnnnnnnnnnnnnnnnnnnnnnnnnnnnnnnnnnnnnnnnnnnnnnnnnnnnnnnnnnnnnnnnnnnnnnnnnnnnnnnnnnnnnnnnnnnnnnnnnnnnnnnnnnnnnnnnnnnnnnnnnnnnnnnnnnnnnnnnnnnnnnnnnnnnnnnnnnnnnnnnnnnnnnnnnnnnnnnnnnnnnnnnnnnnnnnnnnnnnnnnnnnnnnnnnnnnnnnnnnnnnnnnnnnnnnnnnnnnnnnnnnnnnnnnnnnnnnnnnnnnnnnnnnnnnnnnnnnnnnnnnnnnnnnnnnnnnnnnnnnnnnnnnnnnnnnnnnnnnnnnnnnnnnnnnnnnnnnnnnnnnnnnnnnnnnnnnnnnnnnnnnnnnnnnnnnnnnnnnnnnnnnnnnnnnnnnnnnnnnnnnnnnnnnnnnnnnnnnnnnnnnnnnnnnnnnnnnnnnnnnnnnnnnnnnnnnnnnnnnnnnnnnnnnnnnnnnnnnnnnnnnnnnnnnnnnnnnnnnnnnnnnnnnnnnnnnnnnnnnnnnnnnnnnnnnnnnnnnnnnnnnnnnnnnnnnnnnnnnnnnnnnnnnnnnnnnnnnnnnnnnnnnnnnnnnnnnnnnnnnnnnnnnnnnnnnnnnnnnnnnnnnnnnnnnnnnnnnnnnnnnnnnnnnnnnnnnnnnnnnnnnnnnnnnnnnnnnnnnnnnnnnnnnnnnnnnnnnnnnnnnnnnnnnnnnnnnnnnnnnnnnnnnnnnnnnnnnnnnnnnnnnnnnnnnnnnnnnnnnnnnnnnnnnnnnnnnnnnnnnnnnnnnnnnnnnnnnnnnnnnnnnnnnnnnnnnnnnnnnnnnnnnnnnnnnnnnnnnnnnnnnnnnnnnnnnnnnnnnnnnnnnnnnnnnnnnnnnnnnnnnnnnnnnnnnnnnnnnnnnnnnnnnnnnnnnnnnnnnnnnnnnnnnnnnnnnnnnnnnnnnnnnnnnnnnnnnnnnnnnnnnnnnnnnnnnnnnnnnnnnnnnnnnnnnnnnnnnnnnnnnnnnnnnnnnnnnnnnnnnnnnnnnnnnnnnnnnnnnnnnnnnnnnnnnnnnnnnnnnnnnnnnnnnnnnnnnnnnnnnnnnnnnnnnnnnnnnnnnnnnnnnnnnnnnnnnnnnnnnnnnnnnnnnnnnnnnnnnnnnnnnnnnnnnnnnnnnnnnnnnnnnnnnnnnnnnnnnnnnnnnnnnnnnnnnnnnnnnnnnnnnnnnnnnnnnnnnnnnnnnnnnnnnnnnnnnnnnnnnnnnnnnnnnnnnnnnnnnnnnnnnnnnnnnnnnnnnnnnnnnnnnnnnnnnnnnnnnnnnnnnnnnnnnnnnnnnnnnnnnnnnnnnnnnnnnnnnnnnnnnnnnnnnnnnnnnnnnnnnnnnnnnnnnnnnnnnnnnnnnnnnnnnnnnnnnnnnnnnnnnnnnnnnnnnnnnnnnnnnnnnnnnnnnnnnnnnnnnnnnnnnnnnnnnnnnnnnnnnnnnnnnnnnnnnnnnnnnnnnnnnnnnnnnnnnnnnnnnnnnnnnnnnnnnnnnnnnnnnnnnnnnnnnnnnnnnnnnnnnnnnnnnnnnnnnnnnnnnnnnnnnnnnnnnnnnnnnnnnnnnnnnnnnnnnnnnnnnnnnnnnnnnnnnnnnnnnnnnnnnnnnnnnnnnnnnnnnnnnnnnnnnnnnnnnnnnnnnnnnnnnnnnnnnnnnnnnnnnnnnnnnnnnnnnnnnnnnnnnnnnnnnnnnnnnnnnnnnnnnnnnnnnnnnnnnnnnnnnnnnnnnnnnnnnnnnnnnnnnnnnnnnnnnnnnnnnnnnnnnnnnnnnnnnnnnnnnnnnnnnnnnnnnnnnnnnnnnnnnnnnnnnnnnnnnnnnnnnnnnnnnnnnnnnnnnnnnnnnnnnnnnnnnnnnnnnnnnnnnnnnnnnnnnnnnnnnnnnnnnnnnnnnnnnnnnnnnnnnnnnnnnnnnnnnnnnnnnnnnnnnnnnnnnnnnnnnnnnnnnnnnnnnnnnnnnnnnnnnnnnnnnnnnnnnnnnnnnnnnnnnnnnnnnnnnnnnnnnnnnnnnnnnnnnnnnnnnnnnnnnnnnnnnnnnnnnnnnnnnnnnnnnnnnnnnnnnnnnnnnnnnnnnnnnnnnnnnnnnnnnnnnnnnnnnnnnnnnnnnnnnnnnnnnnnnnnnnnnnnnnnnnnnnnnnnnnnnnnnnnnnnnnnnnnnnnnnnnnnnnnnnnnnnnnnnnnnnnnnnnnnnnnnnnnnnnnnnnnnnnnnnnnnnnnnnnnnnnnnnnnnnnnnnnnnnnnnnnnnnnnnnnnnnnnnnnnnnnnnnnnnnnnnnnnnnnnnnnnnnnnnnnnnnnnnnnnnnnnnnnnnnnnnnnnnnnnnnnnnnnnnnnnnnnnnnnnnnnnnnnnnnnnnnnnnnnnnnnnnnnnnnnnnnnnnnnnnnnnnnnnnnnnnnnnnnnnnnnnnnnnnnnnnnnnnnnnnnnnnnnnnnnnnnnnnnnnnnnnnnnnnnnnnnnnnnnnnnnnnnnnnnnnnnnnnnnnnnnnnnnnnnnnnnnnnnnnnnnnnnnnnnnnnnnnnnnnnnnnnnnnnnnnnnnnnnnnnnnnnnnnnnnnnnnnnnnnnnnnnnnnnnnnnnnnnnnnnnnnnnnnnnnnnnnnnnnnnnnnnnnnnnnnnnnnnnnnnnnnnnnnnnnnnnnnnnnnnnnnnnnnnnnnnnnnnnnnnnnnnnnnnnnnnnnnnnnnnnnnnnnnnnnnnnnnnnnnnnnnnnnnnnnnnnnnnnnnnnnnnnnnnnnnnnnnnnnnnnnnnnnnnnnnnnnnnnnnnnnnnnnnnnnnnnnnnnnnnnnnnnnnnnnnnnnnnnnnnnnnnnnnnnnnnnnnnnnnnnnnnnnnnnnnnnnnnnnnnnnnnnnnnnnnnnnnnnnnnnnnnnnnnnnnnnnnnnnnnnnnnnnnnnnnnnnnnnnnnnnnnnnnnnnnnnnnnnnnnnnnnnnnnnnnnnnnnnnnnnnnnnnnnnnnnnnnnnnnnnnnnnnnnnnnnnnnnnnnnnnnnnnnnnnnnnnnnnnnnnnnnnnnnnnnnnnnnnnnnnnnnnnnnnnnnnnnnnnnnnnnnnnnnnnnnnnnnnnnnnnnnnnnnnnnnnnnnnnnnnnnnnnnnnnnnnnnnnnnnnnnnnnnnnnnnnnnnnnnnnnnnnnnnnnnnnnnnnnnnnnnnnnnnnnnnnnnnnnnnnnnnnnnnnnnnnnnnnnnnnnnnnnnnnnnnnnnnnnnnnnnnnnnnnnnnnnnnnnnnnnnnnnnnnnnnnnnnnnnnnnnnnnnnnnnnnnnnnnnnnnnnnnnnnnnnnnnnnnnnnnnnnnnnnnnnnnnnnnnnnnnnnnnnnnnnnnnnnnnnnnnnnnnnnnnnnnnnnnnnnnnnnnnnnnnnnnnnnnnnnnnnnnnnnnnnnnnnnnnnnnnnnnnnnnnnnnnnnnnnnnnnnnnnnnnnnnnnnnnnnnnnnnnnnnnnnnnnnnnnnnnnnnnnnnnnnnnnnnnnnnnnnnnnnnnnnnnnnnnnnnnnnnnnnnnnnnnnnnnnnnnnnnnnnnnnnnnnnnnnnnnnnnnnnnnnnnnnnnnnnnnnnnnnnnnnnnnnnnnnnnnnnnnnnnnnnnnnnnnnnnnnnnnnnnnnnnnnnnnnnnnnnnnnnnnnnnnnnnnnnnnnnnnnnnnnnnnnnnnnnnnnnnnnnnnnnnnnnnnnnnnnnnnnnnnnnnnnnnnnnnnnnnnnnnnnnnnnnnnnnnnnnnnnnnnnnnnnnnnnnnnnnnnnnnnnnnnnnnnnnnnnnnnnnnnnnnnnnnnnnnnnnnnnnnnnnnnnnnnnnnnnnnnnnnnnnnnnnnnnnnnnnnnnnnnnnnnnnnnnnnnnnnnnnnnnnnnnnnnnnnnnnnnnnnnnnnnnnnnnnnnnnnnnnnnnnnnnnnnnnnnnnnnnnnnnnnnnnnnnnnnnnnnnnnnnnnnnnnnnnnnnnnnnnnnnnnnnnnnnnnnnnnnnnnnnnnnnnnnnnnnnnnnnnnnnnnnnnnnnnnnnnnnnnnnnnnnnnnnnnnnnnnnnnnnnnnnnnnnnnnnnnnnnnnnnnnnnnnnnnnnnnnnnnnnnnnnnnnnnnnnnnnnnnnnnnnnnnnnnnnnnnnnnnnnnnnnnnnnnnnnnnnnnnnnnnnnnnnnnnnnnnnnnnnnnnnnnnnnnnnnnnnnnnnnnnnnnnnnnnnnnnnnnnnnnnnnnnnnnnnnnnnnnnnnnnnnnnnnnnnnnnnnnnnnnnnnnnnnnnnnnnnnnnnnnnnnnnnnnnnnnnnnnnnnnnnnnnnnnnnnnnnnnnnnnnnnnnnnnnnnnnnnnnnnnnnnnnnnnnnnnnnnnnnnnnnnnnnnnnnnnnnnnnnnnnnnnnnnnnnnnnnnnnnnnnnnnnnnnnnnnnnnnnnnnnnnnnnnnnnnnnnnnnnnnnnnnnnnnnnnnnnnnnnnnnnnnnnnnnnnnnnnnnnnnnnnnnnnnnnnnnnnnnnnnnnnnnnnnnnnnnnnnnnnnnnnnnnnnnnnnnnnnnnnnnnnnnnnnnnnnnnnnnnnnnnnnnnnnnnnnnnnnnnnnnnnnnnnnnnnnnnnnnnnnnnnnnnnnnnnnnnnnnnnnnnnnnnnnnnnnnnnnnnnnnnnnnnnnnnnnnnnnnnnnnnnnnnnnnnnnnnnnnnnnnnnnnnnnnnnnnnnnnnnnnnnnnnnnnnnnnnnnnnnnnnnnnnnnnnnnnnnnnnnnnnnnnnnnnnnnnnnnnnnnnnnnnnnnnnnnnnnnnnnnnnnnnnnnnnnnnnnnnnnnnnnnnnnnnnnnnnnnnnnnnnnnnnnnnnnnnnnnnnnnnnnnnnnnnnnnnnnnnnnnnnnnnnnnnnnnnnnnnnnnnnnnnnnnnnnnnnnnnnnnnnnnnnnnnnnnnnnnnnnnnnnnnnnnnnnnnnnnnnnnnnnnnnnnnnnnnnnnnnnnnnnnnnnnnnnnnnnnnnnnnnnnnnnnnnnnnnnnnnnnnnnnnnnnnnnnnnnnnnnnnnnnnnnnnnnnnnnnnnnnnnnnnnnnnnnnnnnnnnnnnnnnnnnnnnnnnnnnnnnnnnnnnnnnnnnnnnnnnnnnnnnnnnnnnnnnnnnnnnnnnnnnnnnnnnnnnnnnnnnnnnnnnnnnnnnnnnnnnnnnnnnnnnnnnnnnnnnnnnnnnnnnnnnnnnnnnnnnnnnnnnnnnnnnnnnnnnnnnnnnnnnnnnnnnnnnnnnnnnnnnnnnnnnnnnnnnnnnnnnnnnnnnnnnnnnnnnnnnnnnnnnnnnnnnnnnnnnnnnnnnnnnnnnnnnnnnnnnnnnnnnnnnnnnnnnnnnnnnnnnnnnnnnnnnnnnnnnnnnnnnnnnnnnnnnnnnnnnnnnnnnnnnnnnnnnnnnnnnnnnnnnnnnnnnnnnnnnnnnnnnnnnnnnnnnnnnnnnnnnnnnnnnnnnnnnnnnnnnnnnnnnnnnnnnnnnnnnnnnnnnnnnnnnnnnnnnnnnnnnnnnnnnnnnnnnnnnnnnnnnnnnnnnnnnnnnnnnnnnnnnnnnnnnnnnnnnnnnnnnnnnnnnnnnnnnnnnnnnnnnnnnnnnnnnnnnnnnnnnnnnnnnnnnnnnnnnnnnnnnnnnnnnnnnnnnnnnnnnnnnnnnnnnnnnnnnnnnnnnnnnnnnnnnnnnnnnnnnnnnnnnnnnnnnnnnnnnnnnnnnnnnnnnnnnnnnnnnnnnnnnnnnnnnnnnnnnnnnnnnnnnnnnnnnnnnnnnnnnnnnnnnnnnnnnnnnnnnnnnnnnnnnnnnnnnnnnnnnnnnnnnnnnnnnnnnnnnnnnnnnnnnnnnnnnnnnnnnnnnnnnnnnnnnnnnnnnnnnnnnnnnnnnnnnnnnnnnnnnnnnnnnnnnnnnnnnnnnnnnnnnnnnnnnnnnnnnnnnnnnnnnnnnnnnnnnnnnnnnnnnnnnnnnnnnnnnnnnnnnnnnnnnnnnnnnnnnnnnnnnnnnnnnnnnnnnnnnnnnnnnnnnnnnnnnnnnnnnnnnnnnnnnnnnnnnnnnnnnnnnnnnnnnnnnnnnnnnnnnnnnnnnnnnnnnnnnnnnnnnnnnnnnnnnnnnnnnnnnnnnnnnnnnnnnnnnnnnnnnnnnnnnnnnnnnnnnnnnnnnnnnnnnnnnnnnnnnnnnnnnnnnnnnnnnnnnnnnnnnnnnnnnnnnnnnnnnnnnnnnnnnnnnnnnnnnnnnnnnnnnnnnnnnnnnnnnnnnnnnnnnnnnnnnnnnnnnnnnnnnnnnnnnnnnnnnnnnnnnnnnnnnnnnnnnnnnnnnnnnnnnnnnnnnnnnnnnnnnnnnnnnnnnnnnnnnnnnnnnnnnnnnnnnnnnnnnnnnnnnnnnnnnnnnnnnnnnnnnnnnnnnnnnnnnnnnnnnnnnnnnnnnnnnnnnnnnnnnnnnnnnnnnnnnnnnnnnnnnnnnnnnnnnnnnnnnnnnnnnnnnnnnnnnnnnnnnnnnnnnnnnnnnnnnnnnnnnnnnnnnnnnnnnnnnnnnnnnnnnnnnnnnnnnnnnnnnnnnnnnnnnnnnnnnnnnnnnnnnnnnnnnnnnnnnnnnnnnnnnnnnnnnnnnnnnnnnnnnnnnnnnnnnnnnnnnnnnnnnnnnnnnnnnnnnnnnnnnnnnnnnnnnnnnnnnnnnnnnnnnnnnnnnnnnnnnnnnnnnnnnnnnnnnnnnnnnnnnnnnnnnnnnnnnnnnnnnnnnnnnnnnnnnnnnnnnnnnnnnnnnnnnnnnnnnnnnnnnnnnnnnnnnnnnnnnnnnnnnnnnnnnnnnnnnnnnnnnnnnnnnnnnnnnnnnnnnnnnnnnnnnnnnnnnnnnnnnnnnnnnnnnnnnnnnnnnnnnnnnnnnnnnnnnnnnnnnnnnnnnnnnnnnnnnnnnnnnnnnnnnnnnnnnnnnnnnnnnnnnnnnnnnnnnnnnnnnnnnnnnnnnnnnnnnnnnnnnnnnnnnnnnnnnnnnnnnnnnnnnnnnnnnnnnnnnnnnnnnnnnnnnnnnnnnnnnnnnnnnnnnnnnnnnnnnnnnnnnnnnnnnnnnnnnnnnnnnnnnnnnnnnnnnnnnnnnnnnnnnnnnnnnnnnnnnnnnnnnnnnnnnnnnnnnnnnnnnnnnnnnnnnnnnnnnnnnnnnnnnnnnnnnnnnnnnnnnnnnnnnnnnnnnnnnnnnnnnnnnnnnnnnnnnnnnnnnnnnnnnnnnnnnnnnnnnnnnnnnnnnnnnnnnnnnnnnnnnnnnnnnnnnnnnnnnnnnnnnnnnnnnnnnnnnnnnnnnnnnnnnnnnnnnnnnnnnnnnnnnnnnnnnnnnnnnnnnnnnnnnnnnnnnnnnnnnnnnnnnnnnnnnnnnnnnnnnnnnnnnnnnnnnnnnnnnnnnnnnnnnnnnnnnnnnnnnnnnnnnnnnnnnnnnnnnnnnnnnnnnnnnnnnnnnnnnnnnnnnnnnnnnnnnnnnnnnnnnnnnnnnnnnnnnnnnnnnnnnnnnnnnnnnnnnnnnnnnnnnnnnnnnnnnnnnnnnnnnnnnnnnnnnnnnnnnnnnnnnnnnnnnnnnnnnnnnnnnnnnnnnnnnnnnnnnnnnnnnnnnnnnnnnnnnnnnnnnnnnnnnnnnnnnnnnnnnnnnnnnnnnnnnnnnnnnnnnnnnnnnnnnnnnnnnnnnnnnnnnnnnnnnnnnnnnnnnnnnnnnnnnnnnnnnnnnnnnnnnnnnnnnnnnnnnnnnnnnnnnnnnnnnnnnnnnnnnnnnnnnnnnnnnnnnnnnnnnnnnnnnnnnnnnnnnnnnnnnnnnnnnnnnnnnnnnnnnnnnnnnnnnnnnnnnnnnnnnnnnnnnnnnnnnnnnnnnnnnnnnnnnnnnnnnnnnnnnnnnnnnnnnnnnnnnnnnnnnnnnnnnnnnnnnnnnnnnnnnnnnnnnnnnnnnnnnnnnnnnnnnnnnnnnnnnnnnnnnnnnnnnnnnnnnnnnnnnnnnnnnnnnnnnnnnnnnnnnnnnnnnnnnnnnnnnnnnnnnnnnnnnnnnnnnnnnnnnnnnnnnnnnnnnnnnnnnnnnnnnnnnnnnnnnnnnnnnnnnnnnnnnnnnnnnnnnnnnnnnnnnnnnnnnnnnnnnnnnnnnnnnnnnnnnnnnnnnnnnnnnnnnnnnnnnnnnnnnnnnnnnnnnnnnnnnnnnnnnnnnnnnnnnnnnnnnnnnnnnnnnnnnnnnnnnnnnnnnnnnnnnnnnnnnnnnnnnnnnnnnnnnnnnnnnnnnnnnnnnnnnnnnnnnnnnnnnnnnnnnnnnnnnnnnnnnnnnnnnnnnnnnnnnnnnnnnnnnnnnnnnnnnnnnnnnnnnnnnnnnnnnnnnnnnnnnnnnnnnnnnnnnnnnnnnnnnnnnnnnnnnnnnnnnnnnnnnnnnnnnnnnnnnnnnnnnnnnnnnnnnnnnnnnnnnnnnnnnnnnnnnnnnnnnnnnnnnnnnnnnnnnnnnnnnnnnnnnnnnnnnnnnnnnnnnnnnnnnnnnnnnnnnnnnnnnnnnnnnnnnnnnnnnnnnnnnnnnnnnnnnnnnnnnnnnnnnnnnnnnnnnnnnnnnnnnnnnnnnnnnnnnnnnnnnnnnnnnnnnnnnnnnnnnnnnnnnnnnnnnnnnnnnnnnnnnnnnnnnnnnnnnnnnnnnnnnnnnnnnnnnnnnnnnnnnnnnnnnnnnnnnnnnnnnnnnnnnnnnnnnnnnnnnnnnnnnnnnnnnnnnnnnnnnnnnnnnnnnnnnnnnnnnnnnnnnnnnnnnnnnnnnnnnnnnnnnnnnnnnnnnnnnnnnnnnnnnnnnnnnnnnnnnnnnnnnnnnnnnnnnnnnnnnnnnnnnnnnnnnnnnnnnnnnnnnnnnnnnnnnnnnnnnnnnnnnnnnnnnnnnnnnnnnnnnnnnnnnnnnnnnnnnnnnnnnnnnnnnnnnnnnnnnnnnnnnnnnnnnnnnnnnnnnnnnnnnnnnnnnnnnnnnnnnnnnnnnnnnnnnnnnnnnnnnnnnnnnnnnnnnnnnnnnnnnnnnnnnnnnnnnnnnnnnnnnnnnnnnnnnnnnnnnnnnnnnnnnnnnnnnnnnnnnnnnnnnnnnnnnnnnnnnnnnnnnnnnnnnnnnnnnnnnnnnnnnnnnnnnnnnnnnnnnnnnnnnnnnnnnnnnnnnnnnnnnnnnnnnnnnnnnnnnnnnnnnnnnnnnnnnnnnnnnnnnnnnnnnnnnnnnnnnnnnnnnnnnnnnnnnnnnnnnnnnnnnnnnnnnnnnnnnnnnnnnnnnnnnnnnnnnnnnnnnnnnnnnnnnnnnnnnnnnnnnnnnnnnnnnnnnnnnnnnnnnnnnnnnnnnnnnnnnnnnnnnnnnnnnnnnnnnnnnnnnnnnnnnnnnnnnnnnnnnnnnnnnnnnnnnnnnnnnnnnnnnnnnnnnnnnnnnnnnnnnnnnnnnnnnnnnnnnnnnnnnnnnnnnnnnnnnnnnnnnnnnnnnnnnnnnnnnnnnnnnnnnnnnnnnnnnnnnnnnnnnnnnnnnnnnnnnnnnnnnnnnnnnnnnnnnnnnnnnnnnnnnnnnnnnnnnnnnnnnnnnnnnnnnnnnnnnnnnnnnnnnnnnnnnnnnnnnnnnnnnnnnnnnnnnnnnnnnnnnnnnnnnnnnnnnnnnnnnnnnnnnnnnnnnnnnnnnnnnnnnnnnnnnnnnnnnnnnnnnnnnnnnnnnnnnnnnnnnnnnnnnnnnnnnnnnnnnnnnnnnnnnnnnnnnnnnnnnnnnnnnnnnnnnnnnnnnnnnnnnnnnnnnnnnnnnnnnnnnnnnnnnnnnnnnnnnnnnnnnnnnnnnnnnnnnnnnnnnnnnnnnnnnnnnnnnnnnnnnnnnnnnnnnnnnnnnnnnnnnnnnnnnnnnnnnnnnnnnnnnnnnnnnnnnnnnnnnnnnnnnnnnnnnnnnnnnnnnnnnnnnnnnnnnnnnnnnnnnnnnnnnnnnnnnnnnnnnnnnnnnnnnnnnnnnnnnnnnnnnnnnnnnnnnnnnnnnnnnnnnnnnnnnnnnnnnnnnnnnnnnnnnnnnnnnnnnnnnnnnnnnnnnnnnnnnnnnnnnnnnnnnnnnnnnnnnnnnnnnnnnnnnnnnnnnnnnnnnnnnnnnnnnnnnnnnnnnnnnnnnnnnnnnnnnnnnnnnnnnnnnnnnnnnnnnnnnnnnnnnnnnnnnnnnnnnnnnnnnnnnnnnnnnnnnnnnnnnnnnnnnnnnnnnnnnnnnnnnnnnnnnnnnnnnnnnnnnnnnnnnnnnnnnnnnnnnnnnnnnnnnnnnnnnnnnnnnnnnnnnnnnnnnnnnnnnnnnnnnnnnnnnnnnnnnnnnnnnnnnnnnnnnnnnnnnnnnnnnnnnnnnnnnnnnnnnnnnnnnnnnnnnnnnnnnnnnnnnnnnnnnnnnnnnnnnnnnnnnnnnnnnnnnnnnnnnnnnnnnnnnnnnnnnnnnnnnnnnnnnnnnnnnnnnnnnnnnnnnnnnnnnnnnnnnnnnnnnnnnnnnnnnnnnnnnnnnnnnnnnnnnnnnnnnnnnnnnnnnnnnnnnnnnnnnnnnnnnnnnnnnnnnnnnnnnnnnnnnnnnnnnnnnnnnnnnnnnnnnnnnnnnnnnnnnnnnnnnnnnnnnnnnnnnnnnnnnnnnnnnnnnnnnnnnnnnnnnnnnnnnnnnnnnnnnnnnnnnnnnnnnnnnnnnnnnnnnnnnnnnnnnnnnnnnnnnnnnnnnnnnnnnnnnnnnnnnnnnnnnnnnnnnnnnnnnnnnnnnnnnnnnnnnnnnnnnnnnnnnnnnnnnnnnnnnnnnnnnnnnnnnnnnnnnnnnnnnnnnnnnnnnnnnnnnnnnnnnnnnnnnnnnnnnnnnnnnnnnnnnnnnnnnnnnnnnnnnnnnnnnnnnnnnnnnnnnnnnnnnnnnnnnnnnnnnnnnnnnnnnnnnnnnnnnnnnnnnnnnnnnnnnnnnnnnnnnnnnnnnnnnnnnnnnnnnnnnnnnnnnnnnnnnnnnnnnnnnnnnnnnnnnnnnnnnnnnnnnnnnnnnnnnnnnnnnnnnnnnnnnnnnnnnnnnnnnnnnnnnnnnnnnnnnnnnnnnnnnnnnnnnnnnnnnnnnnnnnnnnnnnnnnnnnnnnnnnnnnnnnnnnnnnnnnnnnnnnnnnnnnnnnnnnnnnnnnnnnnnnnnnnnnnnnnnnnnnnnnnnnnnnnnnnnnnnnnnnnnnnnnnnnnnnnnnnnnnnnnnnnnnnnnnnnnnnnnnnnnnnnnnnnnnnnnnnnnnnnnnnnnnnnnnnnnnnnnnnnnnnnnnnnnnnnnnnnnnnnnnnnnnnnnnnnnnnnnnnnnnnnnnnnnnnnnnnnnnnnnnnnnnnnnnnnnnnnnnnnnnnnnnnnnnnnnnnnnnnnnnnnnnnnnnnnnnnnnnnnnnnnnnnnnnnnnnnnnnnnnnnnnnnnnnnnnnnnnnnnnnnnnnnnnnnnnnnnnnnnnnnnnnnnnnnnnnnnnnnnnnnnnnnnnnnnnnnnnnnnnnnnnnnnnnnnnnnnnnnnnnnnnnnnnnnnnnnnnnnnnnnnnnnnnnnnnnnnnnnnnnnnnnnnnnnnnnnnnnnnnnnnnnnnnnnnnnnnnnnnnnnnnnnnnnnnnnnnnnnnnnnnnnnnnnnnnnnnnnnnnnnnnnnnnnnnnnnnnnnnnnnnnnnnnnnnnnnnnnnnnnnnnnnnnnnnnnnnnnnnnnnnnnnnnnnnnnnnnnnnnnnnnnnnnnnnnnnnnnnnnnnnnnnnnnnnnnnnnnnnnnnnnnnnnnnnnnnnnnnnnnnnnnnnnnnnnnnnnnnnnnnnnnnnnnnnnnnnnnnnnnnnnnnnnnnnnnnnnnnnnnnnnnnnnnnnnnnnnnnnnnnnnnnnnnnnnnnnnnnnnnnnnnnnnnnnnnnnnnnnnnnnnnnnnnnnnnnnnnnnnnnnnnnnnnnnnnnnnnnnnnnnnnnnnnnnnnnnnnnnnnnnnnnnnnnnnnnnnnnnnnnnnnnnnnnnnnnnnnnnnnnnnnnnnnnnnnnnnnnnnnnnnnnnnnnnnnnnnnnnnnnnnnnnnnnnnnnnnnnnnnnnnnnnnnnnnnnnnnnnnnnnnnnnnnnnnnnnnnnnnnnnnnnnnnnnnnnnnnnnnnnnnnnnnnnnnnnnnnnnnnnnnnnnnnnnnnnnnnnnnnnnnnnnnnnnnnnnnnnnnnnnnnnnnnnnnnnnnnnnnnnnnnnnnnnnnnnnnnnnnnnnnnnnnnnnnnnnnnnnnnnnnnnnnnnnnnnnnnnnnnnnnnnnnnnnnnnnnnnnnnnnnnnnnnnnnnnnnnnnnnnnnnnnnnnnnnnnnnnnnnnnnnnnnnnnnnnnnnnnnnnnnnnnnnnnnnnnnnnnnnnnnnnnnnnnnnnnnnnnnnnnnnnnnnnnnnnnnnnnnnnnnnnnnnnnnnnnnnnnnnnnnnnnnnnnnnnnnnnnnnnnnnnnnnnnnnnnnnnnnnnnnnnnnnnnnnnnnnnnnnnnnnnnnnnnnnnnnnnnnnnnnnnnnnnnnnnnnnnnnnnnnnnnnnnnnnnnnnnnnnnnnnnnnnnnnnnnnnnnnnnnnnnnnnnnnnnnnnnnnnnnnnnnnnnnnnnnnnnnnnnnnnnnnnnnnnnnnnnnnnnnnnnnnnnnnnnnnnnnnnnnnnnnnnnnnnnnnnnnnnnnnnnnnnnnnnnnnnnnnnnnnnnnnnnnnnnnnnnnnnnnnnnnnnnnnnnnnnnnnnnnnnnnnnnnnnnnnnnnnnnnnnnnnnnnnnnnnnnnnnnnnnnnnnnnnnnnnnnnnnnnnnnnnnnnnnnnnnnnnnnnnnnnnnnnnnnnnnnnnnnnnnnnnnnnnnnnnnnnnnnnnnnnnnnnnnnnnnnnnnnnnnnnnnnnnnnnnnnnnnnnnnnnnnnnnnnnnnnnnnnnnnnnnnnnnnnnnnnnnnnnnnnnnnnnnnnnnnnnnnnnnnnnnnnnnnnnnnnnnnnnnnnnnnnnnnnnnnnnnnnnnnnnnnnnnnnnnnnnnnnnnnnnnnnnnnnnnnnnnnnnnnnnnnnnnnnnnnnnnnnnnnnnnnnnnnnnnnnnnnnnnnnnnnnnnnnnnnnnnnnnnnnnnnnnnnnnnnnnnnnnnnnnnnnnnnnnnnnnnnnnnnnnnnnnnnnnnnnnnnnnnnnnnnnnnnnnnnnnnnnnnnnnnnnnnnnnnnnnnnnnnnnnnnnnnnnnnnnnnnnnnnnnnnnnnnnnnnnnnnnnnnnnnnnnnnnnnnnnnnnnnnnnnnnnnnnnnnnnnnnnnnnnnnnnnnnnnnnnnnnnnnnnnnnnnnnnnnnnnnnnnnnnnnnnnnnnnnnnnnnnnnnnnnnnnnnnnnnnnnnnnnnnnnnnnnnnnnnnnnnnnnnnnnnnnnnnnnnnnnnnnnnnnnnnnnnnnnnnnnnnnnnnnnnnnnnnnnnnnnnnnnnnnnnnnnnnnnnnnnnnnnnnnnnnnnnnnnnnnnnnnnnnnnnnnnnnnnnnnnnnnnnnnnnnnnnnnnnnnnnnnnnnnnnnnnnnnnnnnnnnnnnnnnnnnnnnnnnnnnnnnnnnnnnnnnnnnnnnnnnnnnnnnnnnnnnnnnnnnnnnnnnnnnnnnnnnnnnnnnnnnnnnnnnnnnnnnnnnnnnnnnnnnnnnnnnnnnnnnnnnnnnnnnnnnnnnnnnnnnnnnnnnnnnnnnnnnnnnnnnnnnnnnnnnnnnnnnnnnnnnnnnnnnnnnnnnnnnnnnnnnnnnnnnnnnnnnnnnnnnnnnnnnnnnnnnnnnnnnnnnnnnnnnnnnnnnnnnnnnnnnnnnnnnnnnnnnnnnnnnnnnnnnnnnnnnnnnnnnnnnnnnnnnnnnnnnnnnnnnnnnnnnnnnnnnnnnnnnnnnnnnnnnnnnnnnnnnnnnnnnnnnnnnnnnnnnnnnnnnnnnnnnnnnnnnnnnnnnnnnnnnnnnnnnnnnnnnnnnnnnnnnnnnnnnnnnnnnnnnnnnnnnnnnnnnnnnnnnnnnnnnnnnnnnnnnnnnnnnnnnnnnnnnnnnnnnnnnnnnnnnnnnnnnnnnnnnnnnnnnnnnnnnnnnnnnnnnnnnnnnnnnnnnnnnnnnnnnnnnnnnnnnnnnnnnnnnnnnnnnnnnnnnnnnnnnnnnnnnnnnnnnnnnnnnnnnnnnnnnnnnnnnnnnnnnnnnnnnnnnnnnnnnnnnnnnnnnnnnnnnnnnnnnnnnnnnnnnnnnnnnnnnnnnnnnnnnnnnnnnnnnnnnnnnnnnnnnnnnnnnnnnnnnnnnnnnnnnnnnnnnnnnnnnnnnnnnnnnnnnnnnnnnnnnnnnnnnnnnnnnnnnnnnnnnnnnnnnnnnnnnnnnnnnnnnnnnnnnnnnnnnnnnnnnnnnnnnnnnnnnnnnnnnnnnnnnnnnnnnnnnnnnnnnnnnnnnnnnnnnnnnnnnnnnnnnnnnnnnnnnnnnnnnnnnnnnnnnnnnnnnnnnnnnnnnnnnnnnnnnnnnnnnnnnnnnnnnnnnnnnnnnnnnnnnnnnnnnnnnnnnnnnnnnnnnnnnnnnnnnnnnnnnnnnnnnnnnnnnnnnnnnnnnnnnnnnnnnnnnnnnnnnnnnnnnnnnnnnnnnnnnnnnnnnnnnnnnnnnnnnnnnnnnnnnnnnnnnnnnnnnnnnnnnnnnnnnnnnnnnnnnnnnnnnnnnnnnnnnnnnnnnnnnnnnnnnnnnnnnnnnnnnnnnnnnnnnnnnnnnnnnnnnnnnnnnnnnnnnnnnnnnnnnnnnnnnnnnnnnnnnnnnnnnnnnnnnnnnnnnnnnnnnnnnnnnnnnnnnnnnnnnnnnnnnnnnnnnnnnnnnnnnnnnnnnnnnnnnnnnnnnnnnnnnnnnnnnnnnnnnnnnnnnnnnnnnnnnnnnnnnnnnnnnnnnnnnnnnnnnnnnnnnnnnnnnnnnnnnnnnnnnnnnnnnnnnnnnnnnnnnnnnnnnnnnnnnnnnnnnnnnnnnnnnnnnnnnnnnnnnnnnnnnnnnnnnnnnnnnnnnnnnnnnnnnnnnnnnnnnnnnnnnnnnnnnnnnnnnnnnnnnnnnnnnnnnnnnnnnnnnnnnnnnnnnnnnnnnnnnnnnnnnnnnnnnnnnnnnnnnnnnnnnnnnnnnnnnnnnnnnnnnnnnnnnnnnnnnnnnnnnnnnnnnnnnnnnnnnnnnnnnnnnnnnnnnnnnnnnnnnnnnnnnnnnnnnnnnnnnnnnnnnnnnnnnnnnnnnnnnnnnnnnnnnnnnnnnnnnnnnnnnnnnnnnnnnnnnnnnnnnnnnnnnnnnnnnnnnnnnnnnnnnnnnnnnnnnnnnnnnnnnnnnnnnnnnnnnnnnnnnnnnnnnnnnnnnnnnnnnnnnnnnnnnnnnnnnnnnnnnnnnnnnnnnnnnnnnnnnnnnnnnnnnnnnnnnnnnnnnnnnnnnnnnnnnnnnnnnnnnnnnnnnnnnnnnnnnnnnnnnnnnnnnnnnnnnnnnnnnnnnnnnnnnnnnnnnnnnnnnnnnnnnnnnnnnnnnnnnnnnnnnnnnnnnnnnnnnnnnnnnnnnnnnnnnnnnnnnnnnnnnnnnnnnnnnnnnnnnnnnnnnnnnnnnnnnnnnnnnnnnnnnnnnnnnnnnnnnnnnnnnnnnnnnnnnnnnnnnnnnnnnnnnnnnnnnnnnnnnnnnnnnnnnnnnnnnnnnnnnnnnnnnnnnnnnnnnnnnnnnnnnnnnnnnnnnnnnnnnnnnnnnnnnnnnnnnnnnnnnnnnnnnnnnnnnnnnnnnnnnnnnnnnnnnnnnnnnnnnnnnnnnnnnnnnnnnnnnnnnnnnnnnnnnnnnnnnnnnnnnnnnnnnnnnnnnnnnnnnnnnnnnnnnnnnnnnnnnnnnnnnnnnnnnnnnnnnnnnnnnnnnnnnnnnnnnnnnnnnnnnnnnnnnnnnnnnnnnnnnnnnnnnnnnnnnnnnnnnnnnnnnnnnnnnnnnnnnnnnnnnnnnnnnnnnnnnnnnnnnnnnnnnnnnnnnnnnnnnnnnnnnnnnnnnnnnnnnnnnnnnnnnnnnnnnnnnnnnnnnnnnnnnnnnnnnnnnnnnnnnnnnnnnnnnnnnnnnnnnnnnnnnnnnnnnnnnnnnnnnnnnnnnnnnnnnnnnnnnnnnnnnnnnnnnnnnnnnnnnnnnnnnnnnnnnnnnnnnnnnnnnnnnnnnnnnnnnnnnnnnnnnnnnnnnnnnnnnnnnnnnnnnnnnnnnnnnnnnnnnnnnnnnnnnnnnnnnnnnnnnnnnnnnnnnnnnnnnnnnnnnnnnnnnnnnnnnnnnnnnnnnnnnnnnnnnnnnnnnnnnnnnnnnnnnnnnnnnnnnnnnnnnnnnnnnnnnnnnnnnnnnnnnnnnnnnnnnnnnnnnnnnnnnnnnnnnnnnnnnnnnnnnnnnnnnnnnnnnnnnnnnnnnnnnnnnnnnnnnnnnnnnnnnnnnnnnnnnnnnnnnnnnnnnnnnnnnnnnnnnnnnnnnnnnnnnnnnnnnnnnnnnnnnnnnnnnnnnnnnnnnnnnnnnnnnnnnnnnnnnnnnnnnnnnnnnnnnnnnnnnnnnnnnnnnnnnnnnnnnnnnnnnnnnnnnnnnnnnnnnnnnnnnnnnnnnnnnnnnnnnnnnnnnnnnnnnnnnnnnnnnnnnnnnnnnnnnnnnnnnnnnnnnnnnnnnnnnnnnnnnnnnnnnnnnnnnnnnnnnnnnnnnnnnnnnnnnnnnnnnnnnnnnnnnnnnnnnnnnnnnnnnnnnnnnnnnnnnnnnnnnnnnnnnnnnnnnnnnnnnnnnnnnnnnnnnnnnnnnnnnnnnnnnnnnnnnnnnnnnnnnnnnnnnnnnnnnnnnnnnnnnnnnnnnnnnnnnnnnnnnnnnnnnnnnnnnnnnnnnnnnnnnnnnnnnnnnnnnnnnnnnnnnnnnnnnnnnnnnnnnnnnnnnnnnnnnnnnnnnnnnnnnnnnnnnnnnnnnnnnnnnnnnnnnnnnnnnnnnnnnnnnnnnnnnnnnnnnnnnnnnnnnnnnnnnnnnnnnnnnnnnnnnnnnnnnnnnnnnnnnnnnnnnnnnnnnnnnnnnnnnnnnnnnnnnnnnnnnnnnnnnnnnnnnnnnnnnnnnnnnnnnnnnnnnnnnnnnnnnnnnnnnnnnnnnnnnnnnnnnnnnnnnnnnnnnnnnnnnnnnnnnnnnnnnnnnnnnnnnnnnnnnnnnnnnnnnnnnnnnnnnnnnnnnnnnnnnnnnnnnnnnnnnnnnnnnnnnnnnnnnnnnnnnnnnnnnnnnnnnnnnnnnnnnnnnnnnnnnnnnnnnnnnnnnnnnnnnnnnnnnnnnnnnnnnnnnnnnnnnnnnnnnnnnnnnnnnnnnnnnnnnnnnnnnnnnnnnnnnnnnnnnnnnnnnnnnnnnnnnnnnnnnnnnnnnnnnnnnnnnnnnnnnnnnnnnnnnnnnnnnnnnnnnnnnnnnnnnnnnnnnnnnnnnnnnnnnnnnnnnnnnnnnnnnnnnnnnnnnnnnnnnnnnnnnnnnnnnnnnnnnnnnnnnnnnnnnnnnnnnnnnnnnnnnnnnnnnnnnnnnnnnnnnnnnnnnnnnnnnnnnnnnnnnnnnnnnnnnnnnnnnnnnnnnnnnnnnnnnnnnnnnnnnnnnnnnnnnnnnnnnnnnnnnnnnnnnnnnnnnnnnnnnnnnnnnnnnnnnnnnnnnnnnnnnnnnnnnnnnnnnnnnnnnnnnnnnnnnnnnnnnnnnnnnnnnnnnnnnnnnnnnnnnnnnnnnnnnnnnnnnnnnnnnnnnnnnnnnnnnnnnnnnnnnnnnnnnnnnnnnnnnnnnnnnnnnnnnnnnnnnnnnnnnnnnnnnnnnnnnnnnnnnnnnnnnnnnnnnnnnnnnnnnnnnnnnnnnnnnnnnnnnnnnnnnnnnnnnnnnnnnnnnnnnnnnnnnnnnnnnnnnnnnnnnnnnnnnnnnnnnnnnnnnnnnnnnnnnnnnnnnnnnnnnnnnnnnnnnnnnnnnnnnnnnnnnnnnnnnnnnnnnnnnnnnnnnnnnnnnnnnnnnnnnnnnnnnnnnnnnnnnnnnnnnnnnnnnnnnnnnnnnnnnnnnnnnnnnnnnnnnnnnnnnnnnnnnnnnnnnnnnnnnnnnnnnnnnnnnnnnnnnnnnnnnnnnnnnnnnnnnnnnnnnnnnnnnnnnnnnnnnnnnnnnnnnnnnnnnnnnnnnnnnnnnnnnnnnnnnnnnnnnnnnnnnnnnnnnnnnnnnnnnnnnnnnnnnnnnnnnnnnnnnnnnnnnnnnnnnnnnnnnnnnnnnnnnnnnnnnnnnnnnnnnnnnnnnnnnnnnnnnnnnnnnnnnnnnnnnnnnnnnnnnnnnnnnnnnnnnnnnnnnnnnnnnnnnnnnnnnnnnnnnnnnnnnnnnnnnnnnnnnnnnnnnnnnnnnnnnnnnnnnnnnnnnnnnnnnnnnnnnnnnnnnnnnnnnnnnnnnnnnnnnnnnnnnnnnnnnnnnnnnnnnnnnnnnnnnnnnnnnnnnnnnnnnnnnnnnnnnnnnnnnnnnnnnnnnnnnnnnnnnnnnnnnnnnnnnnnnnnnnnnnnnnnnnnnnnnnnnnnnnnnnnnnnnnnnnnnnnnnnnnnnnnnnnnnnnnnnnnnnnnnnnnnnnnnnnnnnnnnnnnnnnnnnnnnnnnnnnnnnnnnnnnnnnnnnnnnnnnnnnnnnnnnnnnnnnnnnnnnnnnnnnnnnnnnnnnnnnnnnnnnnnnnnnnnnnnnnnnnnnnnnnnnnnnnnnnnnnnnnnnnnnnnnnnnnnnnnnnnnnnnnnnnnnnnnnnnnnnnnnnnnnnnnnnnnnnnnnnnnnnnnnnnnnnnnnnnnnnnnnnnnnnnnnnnnnnnnnnnnnnnnnnnnnnnnnnnnnnnnnnnnnnnnnnnnnnnnnnnnnnnnnnnnnnnnnnnnnnnnnnnnnnnnnnnnnnnnnnnnnnnnnnnnnnnnnnnnnnnnnnnnnnnnnnnnnnnnnnnnnnnnnnnnnnnnnnnnnnnnnnnnnnnnnnnnnnnnnnnnnnnnnnnnnnnnnnnnnnnnnnnnnnnnnnnnnnnnnnnnnnnnnnnnnnnnnnnnnnnnnnnnnnnnnnnnnnnnnnnnnnnnnnnnnnnnnnnnnnnnnnnnnnnnnnnnnnnnnnnnnnnnnnnnnnnnnnnnnnnnnnnnnnnnnnnnnnnnnnnnnnnnnnnnnnnnnnnnnnnnnnnnnnnnnnnnnnnnnnnnnnnnnnnnnnnnnnnnnnnnnnnnnnnnnnnnnnnnnnnnnnnnnnnnnnnnnnnnnnnnnnnnnnnnnnnnnnnnnnnnnnnnnnnnnnnnnnnnnnnnnnnnnnnnnnnnnnnnnnnnnnnnnnnnnnnnnnnnnnnnnnnnnnnnnnnnnnnnnnnnnnnnnnnnnnnnnnnnnnnnnnnnnnnnnnnnnnnnnnnnnnnnnnnnnnnnnnnnnnnnnnnnnnnnnnnnnnnnnnnnnnnnnnnnnnnnnnnnnnnnnnnnnnnnnnnnnnnnnnnnnnnnnnnnnnnnnnnnnnnnnnnnnnnnnnnnnnnnnnnnnnnnnnnnnnnnnnnnnnnnnnnnnnnnnnnnnnnnnnnnnnnnnnnnnnnnnnnnnnnnnnnnnnnnnnnnnnnnnnnnnnnnnnnnnnnnnnnnnnnnnnnnnnnnnnnnnnnnnnnnnnnnnnnnnnnnnnnnnnnnnnnnnnnnnnnnnnnnnnnnnnnnnnnnnnnnnnnnnnnnnnnnnnnnnnnnnnnnnnnnnnnnnnnnnnnnnnnnnnnnnnnnnnnnnnnnnnnnnnnnnnnnnnnnnnnnnnnnnnnnnnnnnnnnnnnnnnnnnnnnnnnnnnnnnnnnnnnnnnnnnnnnnnnnnnnnnnnnnnnnnnnnnnnnnnnnnnnnnnnnnnnnnnnnnnnnnnnnnnnnnnnnnnnnnnnnnnnnnnnnnnnnnnnnnnnnnnnnnnnnnnnnnnnnnnnnnnnnnnnnnnnnnnnnnnnnnnnnnnnnnnnnnnnnnnnnnnnnnnnnnnnnnnnnnnnnnnnnnnnnnnnnnnnnnnnnnnnnnnnnnnnnnnnnnnnnnnnnnnnnnnnnnnnnnnnnnnnnnnnnnnnnnnnnnnnnnnnnnnnnnnnnnnnnnnnnnnnnnnnnnnnnnnnnnnnnnnnnnnnnnnnnnnnnnnnnnnnnnnnnnnnnnnnnnnnnnnnnnnnnnnnnnnnnnnnnnnnnnnnnnnnnnnnnnnnnnnnnnnnnnnnnnnnnnnnnnnnnnnnnnnnnnnnnnnnnnnnnnnnnnnnnnnnnnnnnnnnnnnnnnnnnnnnnnnnnnnnnnnnnnnnnnnnnnnnnnnnnnnnnnnnnnnnnnnnnnnnnnnnnnnnnnnnnnnnnnnnnnnnnnnnnnnnnnnnnnnnnnnnnnnnnnnnnnnnnnnnnnnnnnnnnnnnnnnnnnnnnnnnnnnnnnnnnnnnnnnnnnnnnnnnnnnnnnnnnnnnnnnnnnnnnnnnnnnnnnnnnnnnnnnnnnnnnnnnnnnnnnnnnnnnnnnnnnnnnnnnnnnnnnnnnnnnnnnnnnnnnnnnnnnnnnnnnnnnnnnnnnnnnnnnnnnnnnnnnnnnnnnnnnnnnnnnnnnnnnnnnnnnnnnnnnnnnnnnnnnnnnnnnnnnnnnnnnnnnnnnnnnnnnnnnnnnnnnnnnnnnnnnnnnnnnnnnnnnnnnnnnnnnnnnnnnnnnnnnnnnnnnnnnnnnnnnnnnnnnnnnnnnnnnnnnnnnnnnnnnnnnnnnnnnnnnnnnnnnnnnnnnnnnnnnnnnnnnnnnnnnnnnnnnnnnnnnnnnnnnnnnnnnnnnnnnnnnnnnnnnnnnnnnnnnnnnnnnnnnnnnnnnnnnnnnnnnnnnnnnnnnnnnnnnnnnnnnnnnnnnnnnagcgctcgggggtcttgtccaaaatcgggggggctggcccaactctttcagcaaatcagcgcgcttcatgatgaccttcttcacgatgcttggcacccccctgagcggatacacccatcccataaaaaaaatcggggactgtcgtccccgaacgtggaaggattgagagcatggatttttgcgatcgtattactaccgatgaagaaatttctttggttgatttggaaagtttcctggaaaacccgttgttctaagactcgatatactgctagccggcaaccaagtcctcttagagtcccagtccgaatcctcctgtcacgctaccgagaagccccgcacagatgtcaagacatggcagccctgaaagcacgctccctccaaacggaccataggccggaccgtacccgggagcagccggggcagcacaaggctgcggcgctctgaccaccggcgcggtcttgtaaaccggtcctgcgccaggaccgcacggccctagagtatttcctcccaagagacttcccacaacgagaaacggtagagcaaccactccaccgcacatgcccgggaacggcgcatcgccccagtaggcgcacgggttgcctgccggcgcgtatgacgggcctgcacacggagcacccggataggcggcctggcccgggcctccggctagagcgagcgaggcggtaacaatgagaatgacgcagagaatgaaactggaaactggtttcacgatcataccctccttttattcagacaggtctttacactgaaaaagtgtgcaattccaggaagcgctggaaggcctcttccccgtctgttcctgggggcggaggtatcacgggctcggaaccctgtcaagtaaaataattgatgttcaaggccttagattccagttgccaggccggtgatgaaactagcaaagtaacacagtgaaacaacaattgtttataaccatcaaaatgttgacactccgtttgaaccgctataggcgatcaaatcaggtagtgccccgcggccaacttgctttctcgcacaaggagaagacagtaacatcttatgatttccagccatttcagcgtcacagctttgccgagagaacaaaaaggctgaaccgcctgagagggttccgacttgctgctccaattccacttgacttgaacaaggttacgaggaaccatgagaaggcacaaggcatcgcgcctcaccgttcatgaggccggttcgttgcgatcctgaagaacccgtcacgccgagctcggcttcaacccaaccctgtcgagccgccgcggagatcgtggtcggaggatgaatgaaagttaggctgtatctactcttgctcttaatgttcgctgccgtgaacgctcaaatagtcgctaaagcgggaggaatcgcgccggaacagatcttccaaccgaccatcgactggcagaatgccatcggcacgtgggaagttctccccgaggacaatccattgtcggaaaagaaccgagtgggcgaggctaacccccatcgggtcattatgaccctgagaaaggacggcacttgcagggttttcgacaaagctcggccgctgggttcggacggtctgtggacctttgaagaccacgagatggccatcagttttccccctggtgcccgggtcgacttctttgtctacggaatcaaaggggatttcatggttacccggtcaccctctaagggtggcaaagatcaactctggtccaaggtgccatgatcctcaaccaatcaatacgctcgcgcgtttttgtccggagtcgggccggcggcagaatcccatgaatcggaaagggaccatatcctgatggctcgaatcctctatggcgtgatgggcgatgcgcgcgggcacgtaaatcgggccaggaccgtggcccaggggatgcctcatcacgaattcctttttgtcggagcgggcagagttcacgatttgagggcagacgggtactcagtggaggcggtgcccatggcggccacgctttataggaataacagagtggacattcccaggacgcttgccaatgcgtttcgggtattcggcggaaagaaaggggtggtccggcgaattgcccgggtcatagacgattacgatcctcacctgattctcaccgattacgagttcttcaccccgcgggcggctatcatgcggggcaggccatgcgtcagtcttgatcatcagcatgtgctgacccattgccattatcagcctccggcagggcagcgcctcagccgagcaatgacatgcttcgcggtccgacaattgtacagcaaggcttccgtgttcctcgttgtgtcgttttttcccttgcccgtaaaggaccccaaaactaccgtccttctgccgcccctgattcgtggcgcagttctccggtattctccaacagatggagagcatgtgctggtatatcagacctcccccacgtttttccagctgtttcctgtcctggagcggatgaagacgcgattcatcgtatatgggttcggcgacagaccgtcccggaaaaatatcatgttcaagggcccgtcagatggaggctttctggaagatctggcctccgctcggtacgtaatcaccaatggcggccacaatgtaatctctgaggcgctgtatctcggaaagcccgtgttctcatttccgatagccaatgcctacgaacagttcgtcaattcatatttcctggcacagtgcggatatggggcatactcgtgctcgccgaagccctcacccgatattctggcgtccttcgaatcaaagttggaatcatacaggaccgccatccgaggccgaaatttcttcggcaaccaagacatgcttcacgtggtagaccatttgacatcgagcggcggactgataccggcggcttgatgtcacggctcgttttctcatactccggcccgagatcgggctcgcggtgggaggacctcgctgcacgggtggtctaacaagatgttagcctataaatttaggcacacagagcttggtaaaaggtcgttgacatttcctgggggtttggctatactctcagcggtagtttaggtataaattgtgggtgcctattttataacttttgtcaggtgttatgatcagtccctagaatctgcgtgaaaggggactttagggtatgggaatcacgtgctaacttcgacgacaaaagtcgtggcctcgtgccccagccgcgtgaacagactgattcggcgttgctctgccgggcatggtgcttcaggctgcctgttgttccttgtcttgggatttgtacttttatgggcccatcaagcggtcgcctcttcggacggtgtccagaaaccacgcgactacgggtattttgattttcccacttgtgtcagctatgcgctggtgcattcggactcattcgtcaggaatcgtctggacattcaaatcaggtctgcggacgtcaaggacgcgcacgcggaactcttccccaccatacagttgctgactcgctattatttcaatcgtgcaggacagaacaccaccgatgatccgaactgggcgccccccaaaaacagattcaacgtccaggttttcatgcagaactggaacccttttctggcgttgataaaaattcagtccgggggggtcctggtcgatattgccaagatcagtcatttggaccggatatccgaggatgtggccaacatggccaagttgtttcaccgggtccagacactggagaagagcattcaggccagcaagcagcttgtggccctccaccgaaacaaggtgagctacggcaagaacaaggacgaacaggggaccgtggatcctatcgggttgcaagtgtggatgaccacgcttcgagctcaggagcttaaggtcaaagacctggagcgggagctgcaggaaaagaccggtagcctgaagatcttgatgagctacaatcctgatatggggctgcctctggacaccagagacgctgctaatcagatcctgaccggctttaacggccgttttgtcaccttcgcagacatccaggggggcaatctcaggctgaaaatcatggccaagcgggaacaggtccaatcgcagcgggtattgggctcctacgtggccctgttgccccggcccgtactggtcttcgaacagattcagaacgaagtggacagatcgtcgggtatgaactttgccatggggctggattatacgatctgggacggctttgcgcgcgtccgggacatcaaaagacagaaaatggtcgcgcgacaattgaacatcgacaggcggcaatactcggaaaggctgtacgtgacgttccggcagctgaaagcaacgctggacgtatccggggagcgggaagcccttgtccgcgaacaggccaagctctcggaactgtccgaggaaagggccttccttcagtacaagtccggcgcaataggatacgactattacatggacaggcgcatcgacacggttcaagcccagttgaacgctttggccgttgttcaggagagggttgcggcccttatcgatttggccaccatggcaggaggtttgaccaagtacaatgcctcgatacgatactgatggacctcggcctcggcgccgtgccaaggccttcggtgtttttctggcgggtttggtagccatcgggtctttaacgcttgtggcgctgacgcaggagcccaaaagcgctgtttcgagccctgttccggccaaagccgctatagtgccccagattgctgacgccaaatccgaggcggaaatcctgtttcgcggaaagagtttttccgtgctcgatcgcatcattccgctgcgcttctccggagagatcctgtccatagacgtgaacgaaggccaaatggtaaagcagaacgacacgctggtaacgtacagaatggatcgcacaaccatgatccaagtgcacaccttgctgtaccccgtgaatgtccttaatctgaaaaaggcggtgtatgacggcgacctgaacatcaagagaatcaaagacgtcaacattccggtgaaaaagtcccagatcgaggccatggaaaaagagttggcagacatccaggaactcttcacgaagaatttgattcagaaagaggcagtggaaaacaaagagcggcagttggacgcgagcaagaaagacatggtgtccctcaaggattctcttaaacagaccgaggagagcgttgaacgaacaaggggagatcttagtttttccgaggacaagcaaaggagagacgtggaactgctcgagtggcagacgcagcggtcgtatgctccggattccaagataccgctggatatcgctcacctgaaggccccgatatcgggacaggttatctggctaaatcccggcctcaggatccaagccgagctgcccagcggctttcaggcgttgcgcgtagcagaggtgagcccgatggttgtccggtgcaaggtccacgaactggatatcgtgaagctcaagcagggagacagaggcactgtcacctttgatgccattcccgacaagaaatactcgtgcaagataagcagaattccctgggtcagccgaaatccggccctggaagtccctgcggattacgaaatcgaatgtcttttggataattcagacgggacgataaaggacgggcttacctgcaatgtccgggtgagcatagctcagtaagcggctcgattggtcgagagcgccgggccggcatggaatcgcctttcgagacatcctcgggacccgccgaaaatattctttcgccctttacgccaatgcggcttcaaacatgtaagttcaggggtcccgcgcctcgcgggatttgtgcaaaacccgcaggccgcgcgtctcctgagtcccccttaagaaactctatatatcgcagggtttccgacttcttgtttcaggaagtcggaaaccctgcggaataatagaagcttttggagaggggtccggggagagaccttttctcgaaaaggtcctccccggattacgctatatctcgttcggtgcaaacacgatgggcgttccaggcgggtttttcacaatttggctcgcggttacggtcctgccggtcctggctttgatagccatcggcctgagcaggataggcatggcccgccgggttcgatccgtcccggatcgcaaagccaggctcccttgtacggaaatactcattccggtcaaaggggtttttccgcaccaggaagcggcccttcggtccatgctggagcaaaaccacccctgctatgggctgattttcatcctggaccgcgatgatgatcctgccaacgctctggtggaagagttgtgcagccactatctccatgcccgaaaggtcgtggcagggctgagcacgtcctgctgccagaagaaccacaatctcatcgagggcatgaggcatcttacgcccgaaaccgagatcgtggtcttttgcgatgcttccaactgcgccgaacgggattggctggttcgattcacgggcccgctgtgttcgggcgatgcgcaggtggtcaccactttcaggacctttgatccccggccgaggacaattgccggcgtttgtcaggcgatctatgcgtcgtttgttctgatactggacatggtcaagcctaagacgtggggaggggccacggcgatccttcggacgaccttcgagaggctcgacgttattggggcctggtccgggacggtagtggacgatctggtcctgaccaatgttctcgatcgggccggggtgagaatccgagtttgccccgagcaccttctctgctcgcccttgagaaaccagacggtgagagggttcctgggctatttggatcgccagatcctctttcccaagttcaccaatccggtgatatgggctgcgtccgtggtaacgcacctgagcttaacgcttgctctgacggctgtgctgccggtcgggttggctttcctcttcggtctggtgggtcaggcggcgggttgggtgacgtgtggcgtgattgttggttgccttgctgccgtgctgttgctgcgcatgttgaatccgttctccattccgatgtcatcttggctattggcgttcttcccttgtatgtatctcgcgtcttacatttttgtgcgttcattgttcattaactacatagattggcacggcaggcgctactggtgcggaagagggggcaaggtggtgcggatcggctgattggagccgaaacgagcacatttgcaggctttacttttgtagcccatttcagcgaaatgcagcgacaactacgccgtatgaactgccttgaagtcgccccttcccctccacatctcctcctattgacgggaggagacaaagtaaggggagagcataggcgccaacatagtgtctcgactattcgtcctgtggggacggtacgaaaatagcccggcaatttagcgactgtcgcaaaagtcgaaaatatgtcggaatcgtgccacgccctaccctcaccctgccctttcccaaagggagaggggactgcggagctgcttcagagggctccctctccttctgggagagggttggggtgagggagtttcaaggaccggcaacccaatcgtgccacgatgtcagcccttgccagggttttgagacaccctctttattgccgggtcagagagccgaacaaagccggcgcgtgccgtaggtacgcctgaattcctcgtcttttgtcgctcaagccgaaaaatagtttgacacagagcgccaaaaatcactatcagtatatgtgatattgtaggggggacttctaacctcaatccctcctttccttcattccggttctgcaggccgctttcgaacaatcggagcgtaccgattcgcaaggtacgtccctggtcaagcgcaattgtcactccacatacggaatcgaggaagccatgaatcagaaaactgaaaactataacctgctcgtggaagagtggatccccattctgcggaccaatgggaaattcgagcgtgtgggcatctggaccgcgctgacggaggcgggccgcatccgccagatcgctgcgagcaatccgatggacaacgtggccctgctgcgcctcctactggcggtcttgcagtggtgtgcgccggaagcgacagaagacgaactggaagagcttcgctgcgaagacactgtgggcattccttcgcacttgctggaggacaaactcggaatgccagaacagccgaattccgcgttcgatctgttgggcacgactagtgggttttaccaggatcatacggctggcggagtaaaggtcgctgtcaccaacctgctgcacgattttccttctggttccaagattgcgcattttcggcatactcgggaccatcgcgaaggaatgtgcctggcgtgttgcgcgctcggccttgtcaggtggcccggcgtcgcatcagcgggaaccgctggtgccggccagagcatgactgcaagtattaatggaaacacaccagcatactctgtccggattagcgcaacgttactcgccacgctgatgttcacctggccatgtgaccatgcagttgacggcgatgcaccggtttgggcttcggcaaatgaggaatctccgcttggttttttcaaagggatgacttggcgctcccgccgcgtcttgttggcgttccgggacacagagggcgaacgagaggtgcctccccaatgctgttgtctctgcggccaacataccaatcgcttgatccgctcgatccattttcgtccaggttggcaaagattttccaaagagccttggtcggaagatcctcatctgttgcggatcactcgaaggaccggcaagagtttcaagaagaataagattgttccgtcgtggccaagcccgaacgaccgattggaagaccatgctgcagtctggcgttccgtgttggagggacacttgcaacgttcagccgcttccgagaccgaagcgacagagttacacaccacattgctcgctaacagccaggcgctctacaagcatgtcgggctacatacggcctcactgccaagaattagccccgatttggcccatcgtctgttgaatgaaatggaatggctcaagcaattaacatggatcacgacatcgacacggtccggcaattggcgtgaaccgcccaaaggtcatttcgtcgttgaggcgctatgtgcgcctggtgcgaaggggcatgccattcggtcgggactctgcgctcgcagtccgctcaccgagtccggattggaaaaagccttcctgaagctggcgcacggtctagccgtcctcaggcaagcggaccgaaatgcaacggaacaggctgtggacgactggagatctgaagtacgccgaattctccggaaccatattgacccagtgatttacaccactactcccgggtcaccgctgcgccagcaggaagcaacgcgacacgctgatgacgctgttgggggggcggttcggcaggtcgaacggcaacgaacgaaagtagtcgacaaacccgaaggcggacggcggaagggaaacaaagcatgactcagaccgaccagttcattcggcggctcgacgcgctcaaggaaggcgagcgttcgcggctccgcacactcgcggggaaatcgttggacgagaccctccaaggttttgatctgttctccggcttgtggtggcccttgcggcagcagaaccaggcagcgccgcgaagagagacgagttggcttgtggtcaagctattcggggcgtttcccgtccgtcacgtgcgatcagacaggccagaggctggtccaacactggcacgaatcctcggttggtgcgagccacacgatgagcacgctcgcccccgcttccgggggcgattcgatgcgcttctgtgctcgccgctttccgccctggagccgcacctgcgctgggccctgcccgttgtcgccgatgcggtgactgcacgccgggcaaccggcctcgattgggtgcaattgctggacgatctgtcaatttgggaccgcggcgaagagcatcgtcgcggcatagacgtccgtcaagattgggctcgccaatacctggaagccgcaaagtgaaagggggagttgaccatgctgattgaaatccacatcatccagaaccacagtccgtccaatctaaaccgcgacgacctgggcgcgcccaagacgtgcatcttcggcggcgtaatccgcgcccgcatgtccagccagtgccagaaacgcagcatacgcaatcccggtaatcccgatgacgctcacaaccgggagccgggaatgttcgcgcaggcaatgaagggacatataggcaaacggacaaagttctttccctggctggtagagcaagcgctcgcagattcaggaattcctgatggcgagcacgatcgaattgtgctggcggcgcaaagaattgctgtcagcaaggagaaagatgacaagcggacggcagttggggccacaacagacctcaggcgaaagacgcggcaattgatccatctcggaccggaccacgccaagtactttgttgccaaacttgccgaacttcgggacgaggcaagagaccgatatgactacttcctcaaccctgttgtcggctttcaggagatggtgcgtgagcttcttgacgaatcaggcctgaacgagaaggagcgagataagatcgttaaagctagttggacaattgccaagtgccgaatgtctaaactgctccaagctcccgagggggaagagccggaacctgagcctgcgatggaggacgaccaaccaggccctgaacacgcgaaacttctcgctgaacgcctctccgaactccgtatttccgatccgaaccggttcaaggacctgacgaaggccactaccacagacgagaagagccggcttaaggaggatgctcctgaaaagccaaagaaaatggacgagttcatggaagccctcaaaacggtcaatcgttgtgatgccgttgacatcgccctcttcggtcgcatgaccacatcggatgccttcgaagacgtggaagccgccatgcaggtggcacacgccatctctacccacgccgtcgttaatgaggtggactacttcacagctgtggacgatttgggcaagaccggtggtggagcgggccacgtggatgaggcgcagttcaactccgcatgtttctataagtacttttgcctcgactgggatcaactcgtgcataatctcgcgcccgaaccacaaaagccgaaagacaagaaggatgacagctcggaagtgacgaagtggaagaagcaccacagcgactgggccaataaagtgaagcctgatgctgaacgacttgccgcttgtactctcggccactttatccgcgccgccgctctgaccacacccagcgggaagcagaacagcttcgcctccaattgcgagccgtgcggtattcttgtcgagatcaagaagaacgagaagacgccttcgagctacgccaatgcattcgctgaaccggctcgcaagatcggtaacccgccgaatgacgcggccgactgcgtcagcctcgtcgggcggagtatcgcccagctcggcgaccacgtctaccaacttcggaaagcctaccaaacagattccacgttgctatggtatgccctgccgctgtggcgctacccgcttcaaggctgggaacgcgaaaccgacgggagcaaagccaaagtccgaaacgagaagggtgagccgacgaaagactacaaacctgctgttcaattcgcctcaagctgcctcgatgtcctaggcggacgcgatacagagcagcccggcttagttgaagcggtgatcgacgcactgaagctcaacctgaaatgggccgaagtgaaggacctcggcgaggtaaaggggggctgacaatgagtgaagcgcccaacacagtcttccttcgcctggaaggtccgcttcaagcatggggagacaactccaagttcgtgattcgccggacgatggaggcgccaacaaaatccggggtcatcggcctgatctgctgtgcgaggggactgtcgcggcaggaggcccgaaagcatctaccagatttgaacgacttggcgatgggagttcgcatagaccgggcgggcactcgctggtgggattatcacaccgtcggggccggctacggcatcttgacagcgcaaggcatagtcaagaagacggcaagcacgggagattacgaaacactcatcagccggagggagtacctatgtgatgcaagctttctcgtagcacttcaaggtgacgcttcgcttattcagaaagtggtcggtgcgctgattagtccgaaatggccgttattcctgggccgcaagagttgtccgccttccgtgcctgtgatggccctgcctggaccgaatgagtcatggaccaatcctatgcgcgccaagaacggcctccttgaggccctgcagggcattccgtggcgaccccggtacaagattaacgcaccacaagaagacagcaaaccacgcaaatccatcaaattggattccctgatcgaatggcagcctcgtaatggcacgatcgcgcctgccgacgcagagatttggtacgatgcaccggtatcgttcgatccgccggtacaggagcctcggctggtgcagcgatgtcctggcattgaagtaccagtcggtcagccagtccagcatcacacgccgcctccgcctcgcccgcgggccgattataagaacacagagttcaggaaacgccgcgaagatcggctgaattccgattacgggctctgcgtcttttgcaaggctcccgcgacgaccgtgcagcacatcacgtaccgtcgggctggaggcaacgaagaaccggacgatctagcctcgctgtgccggctctgccacgacgcggtgactatgatcgagtacggcctcggtatgggcctggaccggattaatcccgaagagccgcgttggcgtgatcacataatcgcgaaacgggacgaaatccgcaaatggcgcagcgaggaaggacgccgccgcgccctgcgcaagtcccctgcgaacgtccgccgcgaactcctcgaagaggaggtgtgagccatgtaccattctcacctactcatcaacgtcggtgacaatcccgatcagccggactggaacctctgccgccgctggcttcgtaatctgtaccgtgtgcatcagcgcctctgcatggcgtttccgtcagtgctgcctgccgagcacgagcgccaagcagcgtactgccggccgttcaatactgtggactgtccacagcagcatgagttgcctaccgcaaccaacggcggcgatgtgcatctggcacgaagcaggggcaacggttttctttttcgcatcgattacccggtcgatcccaagcaaggaggacgtagaccggttatcatcgtccagtcggctaccaaacccgattgggagtacgccttcggcttgaccaaagacgcgatggatgaccgcgggcaccctatcggaaacgccgattttcttctcagcgctccgccgcaggctaagccggtctccatcgatcttgacggcaagtctctcgttctctccagtgataagcaggactaccacctacgtcctggcaatttggtgcgcttccgactcagggctaacccgacgcggaagattcaggatagttctcccaacgggaaacgcaaacgggtgaatccaaccccgaaggatcacgccgattggctggcccacaaactcgaagaagctattgatggcccgttttgtttcgaagacttcgtccccggctgggcgtacggctggcgcacgaagtacgaaccgcagcccggccaacgcatgcagtggtggtctgtgctgtttgaggggacctttcgtctgaaggacccagtcgtgctcaagcagcttctcgaatccggcatcgggcccggcaaagctttcggtttcggccttctctccatagcgcctgtcaatccctgactccgggagcggcgacatgagaattcaagatctgcacgtactgccgaagttccgtgacgggtggagttacctatatgtcgaacactgccggatcgaccaggaagctcaagccgtcgcgatccacgacgccgcaggcaaagcgcccgttccctgcgcaaatctggctctgttaatgctgggtcccggggtgtccatcacacacgcggcgatttcggtgctggcggaccatgggtgcctggtggcctggtgcggagaagaaggggtccggttttacgctgtgggcatgggcgagactcggagcgcatcaaacctcctgcaccaggcacggatgtgggcggagccaggactccgcatacaggtcgtgcggcgcttctacgagttgcgcttttccgaggaactagatccggcactgacactccggcaaatacgagggatggaaggggtccgcgtccgggacgcctacgccaaagccgctcgggagacaggtgtcccttggtcgggccgaagttaccgccgagacgagtggagcgcttcggatcccgtgaaccgagccctttcgacagctaactcgtgcctgtacggcatctgccatgccgcgatcgtgtccgcgggcttctcgcccgcgctcgggttcatccacaccgggaagatgctgtcgtttgtgtatgacgtcgcggacctgtataaaactgaggtcaccatacccgcggcatttcgagccgcagcggacgggacggatggactggaacgacgggtgcgcctggcatgtcgggatgagtttgtctcaacacggctgctcggaagggtcattccggatatccagatggtgctggagtttccgccgcggaggacggccggcgacggtgaacggttcgattgggaaccggcagcgccgggctcgttgtgggacccggaggagggtcaggtcgaaggcggacgcctctattcgccgatagtggaggaaacggaggccgacgatggtagtgctgatccttgaacgtgtgccgccgggattgcgtggcgaattgtcacggtggttcctggagccgaaggccggggtgttcgtgggccgtgtttcggctatggtgcgggaccggctctgggagaaggcgtgcggtcaggcaaagaaaggcggttgtttgatgatccacgccagtaacaccgagcaaggtttcgcgatacggtcacatggggagccttcccgactgatcgaagacttcgagggcatttttctggtacgaatcccgtgttgaagcggattttttcagtattgtccccacgcacgtgggggtgaaccgacctcgataggcttgaagcggcccaagcgacattgtccccacgcacgtgggggtgaaccgagagtccattcgtctttgtttcaacgagtaacattgtccccacgcacgtgggggtgaaccgattatatactcttggtgctggcccagggtcttattgtccccacgcacgtgggggtgaaccgttaagagcacaaagccatgaaaaaaaccttccattgtccccacgcacgtgggggtgaaccgcggtgggtgcccgtttcgagttttaatatcttattgtccccacgcacgtgggggtgaaccgtatatagtttccaaagaaaaagaccgatttaaattgtccccacgcacgtgggggtgaaccgcgtacccaggatattcatggcgcaaatacgaaattgtccccacgcacgtgggggtgaaccgaggcggtctccgcattggcattggcgctatccattgtccccacgcacgtgggggtgaaccgcataacccgagacttgaagattctcgcaaaagattgtccccacgcacgtgggggtgaaccgtattgtcgcctgctatgcccgtgagtattggcattgtccccacgcacgtgggggtgaaccgcggcttggcccttcggatcaacgtgcggaggtattgtccccacgcacgtgggggtgaaccaggcggctatgcgtgggacgagcacgcgcaggcattgtccccacgcacgtgggggtgaaccgcacgggaacaggtaaaggcggctatcgagataattgtccccacgcacgtgggggtgaacccagttcggttgcgtgttctaggctattgcgggaattgtccccacgcacgtgggggtgaaccgtgccgcgagatcatcgacacccgcagcattgaattgtccccacgcacgtgggggtgaaccgggcgggtgcccgcgggcatcggaatggagatcattgtccccacgcacgtgggggtgaaccgccatcaagaagagaatacgtggagtggttatgattgtccccacgcacgtgggggtgaaccggaaggctacgggcgtatgcccgtgggcaaaacattgtccccacgcacgtgggggtgaaccggattcattctcggatcaaagttcaccgcataaattgtccccacgcacgtgggggtgaaccgaacgggtaaaggccgccggagggaatgttgagattgtccccacgcacgtgggggtgaaccgccgtggccggttttgcctctgccttaacccctcccgccagcagaggggaatgagttccccgcttttgatgggcggggtcacgaaaaccggtgattggttcaaattcaacgcggggctgtataaggatcgctcgtgtgaccttgcatggacggggccttgacggagcgctcatcatgggcaaagatctctttagggcacgagtcacggaggttcaaagacatgagtatgcaggacatctggaagaaggcttccttctccgcagtctatattcttattgcgctcctggtgttcctgatgctccagatctggctggccccccacgtggaaaacgtcccatactccactttcaagaagtacataaccgacggaaagatcacctcagtggtggtgtcatcccgatttctcaaaggatatgagaagatccaggatggctccaaggaaccgctgtttcccaagctgatctacatcactccgagagtggacgatcgcaacctggtggattttctcgaacggaacaacgtagagataatcgcggaaaatgagaatacgttcctgatgacgctcctgtcctggatccttcccgctctgatctttgtggggatatggctctgggccatgaagaaaatgggacagggcacaggaatcatgactctaggcaagaacaaggccagaatcattgcccagaccgatgtaggcgtcacgtttcgcgacgtggccggacaggacgaggccatacaggaattacaggagatactggaattccttcagaacccggaacgattcacccgaatcggggccaaaatccccaaaggcgtcctccttgtgggaccgcccggcacgggcaagaccctcctggccaaggccgtggcaggagaagccggtgtgccgttcttcaatattagcgggtcggatttcatagagatgtttgtgggactgggagcagcgcgggtgagagaccttttcgagcaggcgagcaagatagctccttgcctcgtgttcatcgacgagctggacgccctgggcaaagcccgaggcgcgggggccatcgctggccatgacgagcgggaacagactctcaatcagttgctggtggaaatggacgggttcgaacccaatcaaggcgtagtgatccttgcggccaccaacaggccggagatcctggaccctgccctgctcaggccggggcgcttcgaccgacacatcctcgtggatcgccctgacttgaaaggacgaatcgacatcctcaaggttcatacccgcaacgttcccctttccagggatgtgaacctcgaagtcatcgcccgacgcacaccgggcttcacgggagcggacctggcaaatcttatcaacgagggtgcgcttcttgccgctcgcaaggacaaaaccgaagtggggccgcaagaactcgaggacgccatcgacaggatcatcgcagggctggaaaagaaaaaccgcgtgcttaacgagaaggaaaagaagaccgtcgcatatcacgagagcggccacgccctggtggcatcgtttcgcgaaacagcggaaaaggtccataagatcagcatagtgccgagagggatcggagctttgggctttaccctgcaactgcctaccgaggaccgctatcttatgtcgcggcaggaacttcttgaaaagatcgacgtgctgctcggtggccgcgcagcggaaaccatcatcttccatgacgttaccactggtgcgcaaaacgaccttcagcgagccacggatatcgcgcacagcatggtcacactgtacggtatgacagagcaactaggccccgtcgcgtaccaaaaggcgcccaattcgttcctccagccccgggagctgttcccgaccaaagaggtcagcgaggaaaccgccaagctcatcgatgagg

SEQ ID NO: 992 - DNA, 113558 bp, Artificial Sequence
  Synthetic Oligonucleotide
  misc_feature (1)..(95739): n is a, c, g, or t
nnnnnnnnnnnnnnnnnnnnnnnnnnnnnnnnnnnnnnnnnnnnnnnnnnnnnnnnnnnnnnnnnnnnnnnnnnnnnnnnnnnnnnnnnnnnnnnnnnnnnnnnnnnnnnnnnnnnnnnnnnnnnnnnnnnnnnnnnnnnnnnnnnnnnnnnnnnnnnnnnnnnnnnnnnnnnnnnnnnnnnnnnnnnnnnnnnnnnnnnnnnnnnnnnnnnnnnnnnnnnnnnnnnnnnnnnnnnnnnnnnnnnnnnnnnnnnnnnnnnnnnnnnnnnnnnnnnnnnnnnnnnnnnnnnnnnnnnnnnnnnnnnnnnnnnnnnnnnnnnnnnnnnnnnnnnnnnnnnnnnnnnnnnnnnnnnnnnnnnnnnnnnnnnnnnnnnnnnnnnnnnnnnnnnnnnnnnnnnnnnnnnnnnnnnnnnnnnnnnnnnnnnnnnnnnnnnnnnnnnnnnnnnnnnnnnnnnnnnnnnnnnnnnnnnnnnnnnnnnnnnnnnnnnnnnnnnnnnnnnnnnnnnnnnnnnnnnnnnnnnnnnnnnnnnnnnnnnnnnnnnnnnnnnnnnnnnnnnnnnnnnnnnnnnnnnnnnnnnnnnnnnnnnnnnnnnnnnnnnnnnnnnnnnnnnnnnnnnnnnnnnnnnnnnnnnnnnnnnnnnnnnnnnnnnnnnnnnnnnnnnnnnnnnnnnnnnnnnnnnnnnnnnnnnnnnnnnnnnnnnnnnnnnnnnnnnnnnnnnnnnnnnnnnnnnnnnnnnnnnnnnnnnnnnnnnnnnnnnnnnnnnnnnnnnnnnnnnnnnnnnnnnnnnnnnnnnnnnnnnnnnnnnnnnnnnnnnnnnnnnnnnnnnnnnnnnnnnnnnnnnnnnnnnnnnnnnnnnnnnnnnnnnnnnnnnnnnnnnnnnnnnnnnnnnnnnnnnnnnnnnnnnnnnnnnnnnnnnnnnnnnnnnnnnnnnnnnnnnnnnnnnnnnnnnnnnnnnnnnnnnnnnnnnnnnnnnnnnnnnnnnnnnnnnnnnnnnnnnnnnnnnnnnnnnnnnnnnnnnnnnnnnnnnnnnnnnnnnnnnnnnnnnnnnnnnnnnnnnnnnnnnnnnnnnnnnnnnnnnnnnnnnnnnnnnnnnnnnnnnnnnnnnnnnnnnnnnnnnnnnnnnnnnnnnnnnnnnnnnnnnnnnnnnnnnnnnnnnnnnnnnnnnnnnnnnnnnnnnnnnnnnnnnnnnnnnnnnnnnnnnnnnnnnnnnnnnnnnnnnnnnnnnnnnnnnnnnnnnnnnnnnnnnnnnnnnnnnnnnnnnnnnnnnnnnnnnnnnnnnnnnnnnnnnnnnnnnnnnnnnnnnnnnnnnnnnnnnnnnnnnnnnnnnnnnnnnnnnnnnnnnnnnnnnnnnnnnnnnnnnnnnnnnnnnnnnnnnnnnnnnnnnnnnnnnnnnnnnnnnnnnnnnnnnnnnnnnnnnnnnnnnnnnnnnnnnnnnnnnnnnnnnnnnnnnnnnnnnnnnnnnnnnnnnnnnnnnnnnnnnnnnnnnnnnnnnnnnnnnnnnnnnnnnnnnnnnnnnnnnnnnnnnnnnnnnnnnnnnnnnnnnnnnnnnnnnnnnnnnnnnnnnnnnnnnnnnnnnnnnnnnnnnnnnnnnnnnnnnnnnnnnnnnnnnnnnnnnnnnnnnnnnnnnnnnnnnnnnnnnnnnnnnnnnnnnnnnnnnnnnnnnnnnnnnnnnnnnnnnnnnnnnnnnnnnnnnnnnnnnnnnnnnnnnnnnnnnnnnnnnnnnnnnnnnnnnnnnnnnnnnnnnnnnnnnnnnnnnnnnnnnnnnnnnnnnnnnnnnnnnnnnnnnnnnnnnnnnnnnnnnnnnnnnnnnnnnnnnnnnnnnnnnnnnnnnnnnnnnnnnnnnnnnnnnnnnnnnnnnnnnnnnnnnnnnnnnnnnnnnnnnnnnnnnnnnnnnnnnnnnnnnnnnnnnnnnnnnnnnnnnnnnnnnnnnnnnnnnnnnnnnnnnnnnnnnnnnnnnnnnnnnnnnnnnnnnnnnnnnnnnnnnnnnnnnnnnnnnnnnnnnnnnnnnnnnnnnnnnnnnnnnnnnnnnnnnnnnnnnnnnnnnnnnnnnnnnnnnnnnnnnnnnnnnnnnnnnnnnnnnnnnnnnnnnnnnnnnnnnnnnnnnnnnnnnnnnnnnnnnnnnnnnnnnnnnnnnnnnnnnnnnnnnnnnnnnnnnnnnnnnnnnnnnnnnnnnnnnnnnnnnnnnnnnnnnnnnnnnnnnnnnnnnnnnnnnnnnnnnnnnnnnnnnnnnnnnnnnnnnnnnnnnnnnnnnnnnnnnnnnnnnnnnnnnnnnnnnnnnnnnnnnnnnnnnnnnnnnnnnnnnnnnnnnnnnnnnnnnnnnnnnnnnnnnnnnnnnnnnnnnnnnnnnnnnnnnnnnnnnnnnnnnnnnnnnnnnnnnnnnnnnnnnnnnnnnnnnnnnnnnnnnnnnnnnnnnnnnnnnnnnnnnnnnnnnnnnnnnnnnnnnnnnnnnnnnnnnnnnnnnnnnnnnnnnnnnnnnnnnnnnnnnnnnnnnnnnnnnnnnnnnnnnnnnnnnnnnnnnnnnnnnnnnnnnnnnnnnnnnnnnnnnnnnnnnnnnnnnnnnnnnnnnnnnnnnnnnnnnnnnnnnnnnnnnnnnnnnnnnnnnnnnnnnnnnnnnnnnnnnnnnnnnnnnnnnnnnnnnnnnnnnnnnnnnnnnnnnnnnnnnnnnnnnnnnnnnnnnnnnnnnnnnnnnnnnnnnnnnnnnnnnnnnnnnnnnnnnnnnnnnnnnnnnnnnnnnnnnnnnnnnnnnnnnnnnnnnnnnnnnnnnnnnnnnnnnnnnnnnnnnnnnnnnnnnnnnnnnnnnnnnnnnnnnnnnnnnnnnnnnnnnnnnnnnnnnnnnnnnnnnnnnnnnnnnnnnnnnnnnnnnnnnnnnnnnnnnnnnnnnnnnnnnnnnnnnnnnnnnnnnnnnnnnnnnnnnnnnnnnnnnnnnnnnnnnnnnnnnnnnnnnnnnnnnnnnnnnnnnnnnnnnnnnnnnnnnnnnnnnnnnnnnnnnnnnnnnnnnnnnnnnnnnnnnnnnnnnnnnnnnnnnnnnnnnnnnnnnnnnnnnnnnnnnnnnnnnnnnnnnnnnnnnnnnnnnnnnnnnnnnnnnnnnnnnnnnnnnnnnnnnnnnnnnnnnnnnnnnnnnnnnnnnnnnnnnnnnnnnnnnnnnnnnnnnnnnnnnnnnnnnnnnnnnnnnnnnnnnnnnnnnnnnnnnnnnnnnnnnnnnnnnnnnnnnnnnnnnnnnnnnnnnnnnnnnnnnnnnnnnnnnnnnnnnnnnnnnnnnnnnnnnnnnnnnnnnnnnnnnnnnnnnnnnnnnnnnnnnnnnnnnnnnnnnnnnnnnnnnnnnnnnnnnnnnnnnnnnnnnnnnnnnnnnnnnnnnnnnnnnnnnnnnnnnnnnnnnnnnnnnnnnnnnnnnnnnnnnnnnnnnnnnnnnnnnnnnnnnnnnnnnnnnnnnnnnnnnnnnnnnnnnnnnnnnnnnnnnnnnnnnnnnnnnnnnnnnnnnnnnnnnnnnnnnnnnnnnnnnnnnnnnnnnnnnnnnnnnnnnnnnnnnnnnnnnnnnnnnnnnnnnnnnnnnnnnnnnnnnnnnnnnnnnnnnnnnnnnnnnnnnnnnnnnnnnnnnnnnnnnnnnnnnnnnnnnnnnnnnnnnnnnnnnnnnnnnnnnnnnnnnnnnnnnnnnnnnnnnnnnnnnnnnnnnnnnnnnnnnnnnnnnnnnnnnnnnnnnnnnnnnnnnnnnnnnnnnnnnnnnnnnnnnnnnnnnnnnnnnnnnnnnnnnnnnnnnnnnnnnnnnnnnnnnnnnnnnnnnnnnnnnnnnnnnnnnnnnnnnnnnnnnnnnnnnnnnnnnnnnnnnnnnnnnnnnnnnnnnnnnnnnnnnnnnnnnnnnnnnnnnnnnnnnnnnnnnnnnnnnnnnnnnnnnnnnnnnnnnnnnnnnnnnnnnnnnnnnnnnnnnnnnnnnnnnnnnnnnnnnnnnnnnnnnnnnnnnnnnnnnnnnnnnnnnnnnnnnnnnnnnnnnnnnnnnnnnnnnnnnnnnnnnnnnnnnnnnnnnnnnnnnnnnnnnnnnnnnnnnnnnnnnnnnnnnnnnnnnnnnnnnnnnnnnnnnnnnnnnnnnnnnnnnnnnnnnnnnnnnnnnnnnnnnnnnnnnnnnnnnnnnnnnnnnnnnnnnnnnnnnnnnnnnnnnnnnnnnnnnnnnnnnnnnnnnnnnnnnnnnnnnnnnnnnnnnnnnnnnnnnnnnnnnnnnnnnnnnnnnnnnnnnnnnnnnnnnnnnnnnnnnnnnnnnnnnnnnnnnnnnnnnnnnnnnnnnnnnnnnnnnnnnnnnnnnnnnnnnnnnnnnnnnnnnnnnnnnnnnnnnnnnnnnnnnnnnnnnnnnnnnnnnnnnnnnnnnnnnnnnnnnnnnnnnnnnnnnnnnnnnnnnnnnnnnnnnnnnnnnnnnnnnnnnnnnnnnnnnnnnnnnnnnnnnnnnnnnnnnnnnnnnnnnnnnnnnnnnnnnnnnnnnnnnnnnnnnnnnnnnnnnnnnnnnnnnnnnnnnnnnnnnnnnnnnnnnnnnnnnnnnnnnnnnnnnnnnnnnnnnnnnnnnnnnnnnnnnnnnnnnnnnnnnnnnnnnnnnnnnnnnnnnnnnnnnnnnnnnnnnnnnnnnnnnnnnnnnnnnnnnnnnnnnnnnnnnnnnnnnnnnnnnnnnnnnnnnnnnnnnnnnnnnnnnnnnnnnnnnnnnnnnnnnnnnnnnnnnnnnnnnnnnnnnnnnnnnnnnnnnnnnnnnnnnnnnnnnnnnnnnnnnnnnnnnnnnnnnnnnnnnnnnnnnnnnnnnnnnnnnnnnnnnnnnnnnnnnnnnnnnnnnnnnnnnnnnnnnnnnnnnnnnnnnnnnnnnnnnnnnnnnnnnnnnnnnnnnnnnnnnnnnnnnnnnnnnnnnnnnnnnnnnnnnnnnnnnnnnnnnnnnnnnnnnnnnnnnnnnnnnnnnnnnnnnnnnnnnnnnnnnnnnnnnnnnnnnnnnnnnnnnnnnnnnnnnnnnnnnnnnnnnnnnnnnnnnnnnnnnnnnnnnnnnnnnnnnnnnnnnnnnnnnnnnnnnnnnnnnnnnnnnnnnnnnnnnnnnnnnnnnnnnnnnnnnnnnnnnnnnnnnnnnnnnnnnnnnnnnnnnnnnnnnnnnnnnnnnnnnnnnnnnnnnnnnnnnnnnnnnnnnnnnnnnnnnnnnnnnnnnnnnnnnnnnnnnnnnnnnnnnnnnnnnnnnnnnnnnnnnnnnnnnnnnnnnnnnnnnnnnnnnnnnnnnnnnnnnnnnnnnnnnnnnnnnnnnnnnnnnnnnnnnnnnnnnnnnnnnnnnnnnnnnnnnnnnnnnnnnnnnnnnnnnnnnnnnnnnnnnnnnnnnnnnnnnnnnnnnnnnnnnnnnnnnnnnnnnnnnnnnnnnnnnnnnnnnnnnnnnnnnnnnnnnnnnnnnnnnnnnnnnnnnnnnnnnnnnnnnnnnnnnnnnnnnnnnnnnnnnnnnnnnnnnnnnnnnnnnnnnnnnnnnnnnnnnnnnnnnnnnnnnnnnnnnnnnnnnnnnnnnnnnnnnnnnnnnnnnnnnnnnnnnnnnnnnnnnnnnnnnnnnnnnnnnnnnnnnnnnnnnnnnnnnnnnnnnnnnnnnnnnnnnnnnnnnnnnnnnnnnnnnnnnnnnnnnnnnnnnnnnnnnnnnnnnnnnnnnnnnnnnnnnnnnnnnnnnnnnnnnnnnnnnnnnnnnnnnnnnnnnnnnnnnnnnnnnnnnnnnnnnnnnnnnnnnnnnnnnnnnnnnnnnnnnnnnnnnnnnnnnnnnnnnnnnnnnnnnnnnnnnnnnnnnnnnnnnnnnnnnnnnnnnnnnnnnnnnnnnnnnnnnnnnnnnnnnnnnnnnnnnnnnnnnnnnnnnnnnnnnnnnnnnnnnnnnnnnnnnnnnnnnnnnnnnnnnnnnnnnnnnnnnnnnnnnnnnnnnnnnnnnnnnnnnnnnnnnnnnnnnnnnnnnnnnnnnnnnnnnnnnnnnnnnnnnnnnnnnnnnnnnnnnnnnnnnnnnnnnnnnnnnnnnnnnnnnnnnnnnnnnnnnnnnnnnnnnnnnnnnnnnnnnnnnnnnnnnnnnnnnnnnnnnnnnnnnnnnnnnnnnnnnnnnnnnnnnnnnnnnnnnnnnnnnnnnnnnnnnnnnnnnnnnnnnnnnnnnnnnnnnnnnnnnnnnnnnnnnnnnnnnnnnnnnnnnnnnnnnnnnnnnnnnnnnnnnnnnnnnnnnnnnnnnnnnnnnnnnnnnnnnnnnnnnnnnnnnnnnnnnnnnnnnnnnnnnnnnnnnnnnnnnnnnnnnnnnnnnnnnnnnnnnnnnnnnnnnnnnnnnnnnnnnnnnnnnnnnnnnnnnnnnnnnnnnnnnnnnnnnnnnnnnnnnnnnnnnnnnnnnnnnnnnnnnnnnnnnnnnnnnnnnnnnnnnnnnnnnnnnnnnnnnnnnnnnnnnnnnnnnnnnnnnnnnnnnnnnnnnnnnnnnnnnnnnnnnnnnnnnnnnnnnnnnnnnnnnnnnnnnnnnnnnnnnnnnnnnnnnnnnnnnnnnnnnnnnnnnnnnnnnnnnnnnnnnnnnnnnnnnnnnnnnnnnnnnnnnnnnnnnnnnnnnnnnnnnnnnnnnnnnnnnnnnnnnnnnnnnnnnnnnnnnnnnnnnnnnnnnnnnnnnnnnnnnnnnnnnnnnnnnnnnnnnnnnnnnnnnnnnnnnnnnnnnnnnnnnnnnnnnnnnnnnnnnnnnnnnnnnnnnnnnnnnnnnnnnnnnnnnnnnnnnnnnnnnnnnnnnnnnnnnnnnnnnnnnnnnnnnnnnnnnnnnnnnnnnnnnnnnnnnnnnnnnnnnnnnnnnnnnnnnnnnnnnnnnnnnnnnnnnnnnnnnnnnnnnnnnnnnnnnnnnnnnnnnnnnnnnnnnnnnnnnnnnnnnnnnnnnnnnnnnnnnnnnnnnnnnnnnnnnnnnnnnnnnnnnnnnnnnnnnnnnnnnnnnnnnnnnnnnnnnnnnnnnnnnnnnnnnnnnnnnnnnnnnnnnnnnnnnnnnnnnnnnnnnnnnnnnnnnnnnnnnnnnnnnnnnnnnnnnnnnnnnnnnnnnnnnnnnnnnnnnnnnnnnnnnnnnnnnnnnnnnnnnnnnnnnnnnnnnnnnnnnnnnnnnnnnnnnnnnnnnnnnnnnnnnnnnnnnnnnnnnnnnnnnnnnnnnnnnnnnnnnnnnnnnnnnnnnnnnnnnnnnnnnnnnnnnnnnnnnnnnnnnnnnnnnnnnnnnnnnnnnnnnnnnnnnnnnnnnnnnnnnnnnnnnnnnnnnnnnnnnnnnnnnnnnnnnnnnnnnnnnnnnnnnnnnnnnnnnnnnnnnnnnnnnnnnnnnnnnnnnnnnnnnnnnnnnnnnnnnnnnnnnnnnnnnnnnnnnnnnnnnnnnnnnnnnnnnnnnnnnnnnnnnnnnnnnnnnnnnnnnnnnnnnnnnnnnnnnnnnnnnnnnnnnnnnnnnnnnnnnnnnnnnnnnnnnnnnnnnnnnnnnnnnnnnnnnnnnnnnnnnnnnnnnnnnnnnnnnnnnnnnnnnnnnnnnnnnnnnnnnnnnnnnnnnnnnnnnnnnnnnnnnnnnnnnnnnnnnnnnnnnnnnnnnnnnnnnnnnnnnnnnnnnnnnnnnnnnnnnnnnnnnnnnnnnnnnnnnnnnnnnnnnnnnnnnnnnnnnnnnnnnnnnnnnnnnnnnnnnnnnnnnnnnnnnnnnnnnnnnnnnnnnnnnnnnnnnnnnnnnnnnnnnnnnnnnnnnnnnnnnnnnnnnnnnnnnnnnnnnnnnnnnnnnnnnnnnnnnnnnnnnnnnnnnnnnnnnnnnnnnnnnnnnnnnnnnnnnnnnnnnnnnnnnnnnnnnnnnnnnnnnnnnnnnnnnnnnnnnnnnnnnnnnnnnnnnnnnnnnnnnnnnnnnnnnnnnnnnnnnnnnnnnnnnnnnnnnnnnnnnnnnnnnnnnnnnnnnnnnnnnnnnnnnnnnnnnnnnnnnnnnnnnnnnnnnnnnnnnnnnnnnnnnnnnnnnnnnnnnnnnnnnnnnnnnnnnnnnnnnnnnnnnnnnnnnnnnnnnnnnnnnnnnnnnnnnnnnnnnnnnnnnnnnnnnnnnnnnnnnnnnnnnnnnnnnnnnnnnnnnnnnnnnnnnnnnnnnnnnnnnnnnnnnnnnnnnnnnnnnnnnnnnnnnnnnnnnnnnnnnnnnnnnnnnnnnnnnnnnnnnnnnnnnnnnnnnnnnnnnnnnnnnnnnnnnnnnnnnnnnnnnnnnnnnnnnnnnnnnnnnnnnnnnnnnnnnnnnnnnnnnnnnnnnnnnnnnnnnnnnnnnnnnnnnnnnnnnnnnnnnnnnnnnnnnnnnnnnnnnnnnnnnnnnnnnnnnnnnnnnnnnnnnnnnnnnnnnnnnnnnnnnnnnnnnnnnnnnnnnnnnnnnnnnnnnnnnnnnnnnnnnnnnnnnnnnnnnnnnnnnnnnnnnnnnnnnnnnnnnnnnnnnnnnnnnnnnnnnnnnnnnnnnnnnnnnnnnnnnnnnnnnnnnnnnnnnnnnnnnnnnnnnnnnnnnnnnnnnnnnnnnnnnnnnnnnnnnnnnnnnnnnnnnnnnnnnnnnnnnnnnnnnnnnnnnnnnnnnnnnnnnnnnnnnnnnnnnnnnnnnnnnnnnnnnnnnnnnnnnnnnnnnnnnnnnnnnnnnnnnnnnnnnnnnnnnnnnnnnnnnnnnnnnnnnnnnnnnnnnnnnnnnnnnnnnnnnnnnnnnnnnnnnnnnnnnnnnnnnnnnnnnnnnnnnnnnnnnnnnnnnnnnnnnnnnnnnnnnnnnnnnnnnnnnnnnnnnnnnnnnnnnnnnnnnnnnnnnnnnnnnnnnnnnnnnnnnnnnnnnnnnnnnnnnnnnnnnnnnnnnnnnnnnnnnnnnnnnnnnnnnnnnnnnnnnnnnnnnnnnnnnnnnnnnnnnnnnnnnnnnnnnnnnnnnnnnnnnnnnnnnnnnnnnnnnnnnnnnnnnnnnnnnnnnnnnnnnnnnnnnnnnnnnnnnnnnnnnnnnnnnnnnnnnnnnnnnnnnnnnnnnnnnnnnnnnnnnnnnnnnnnnnnnnnnnnnnnnnnnnnnnnnnnnnnnnnnnnnnnnnnnnnnnnnnnnnnnnnnnnnnnnnnnnnnnnnnnnnnnnnnnnnnnnnnnnnnnnnnnnnnnnnnnnnnnnnnnnnnnnnnnnnnnnnnnnnnnnnnnnnnnnnnnnnnnnnnnnnnnnnnnnnnnnnnnnnnnnnnnnnnnnnnnnnnnnnnnnnnnnnnnnnnnnnnnnnnnnnnnnnnnnnnnnnnnnnnnnnnnnnnnnnnnnnnnnnnnnnnnnnnnnnnnnnnnnnnnnnnnnnnnnnnnnnnnnnnnnnnnnnnnnnnnnnnnnnnnnnnnnnnnnnnnnnnnnnnnnnnnnnnnnnnnnnnnnnnnnnnnnnnnnnnnnnnnnnnnnnnnnnnnnnnnnnnnnnnnnnnnnnnnnnnnnnnnnnnnnnnnnnnnnnnnnnnnnnnnnnnnnnnnnnnnnnnnnnnnnnnnnnnnnnnnnnnnnnnnnnnnnnnnnnnnnnnnnnnnnnnnnnnnnnnnnnnnnnnnnnnnnnnnnnnnnnnnnnnnnnnnnnnnnnnnnnnnnnnnnnnnnnnnnnnnnnnnnnnnnnnnnnnnnnnnnnnnnnnnnnnnnnnnnnnnnnnnnnnnnnnnnnnnnnnnnnnnnnnnnnnnnnnnnnnnnnnnnnnnnnnnnnnnnnnnnnnnnnnnnnnnnnnnnnnnnnnnnnnnnnnnnnnnnnnnnnnnnnnnnnnnnnnnnnnnnnnnnnnnnnnnnnnnnnnnnnnnnnnnnnnnnnnnnnnnnnnnnnnnnnnnnnnnnnnnnnnnnnnnnnnnnnnnnnnnnnnnnnnnnnnnnnnnnnnnnnnnnnnnnnnnnnnnnnnnnnnnnnnnnnnnnnnnnnnnnnnnnnnnnnnnnnnnnnnnnnnnnnnnnnnnnnnnnnnnnnnnnnnnnnnnnnnnnnnnnnnnnnnnnnnnnnnnnnnnnnnnnnnnnnnnnnnnnnnnnnnnnnnnnnnnnnnnnnnnnnnnnnnnnnnnnnnnnnnnnnnnnnnnnnnnnnnnnnnnnnnnnnnnnnnnnnnnnnnnnnnnnnnnnnnnnnnnnnnnnnnnnnnnnnnnnnnnnnnnnnnnnnnnnnnnnnnnnnnnnnnnnnnnnnnnnnnnnnnnnnnnnnnnnnnnnnnnnnnnnnnnnnnnnnnnnnnnnnnnnnnnnnnnnnnnnnnnnnnnnnnnnnnnnnnnnnnnnnnnnnnnnnnnnnnnnnnnnnnnnnnnnnnnnnnnnnnnnnnnnnnnnnnnnnnnnnnnnnnnnnnnnnnnnnnnnnnnnnnnnnnnnnnnnnnnnnnnnnnnnnnnnnnnnnnnnnnnnnnnnnnnnnnnnnnnnnnnnnnnnnnnnnnnnnnnnnnnnnnnnnnnnnnnnnnnnnnnnnnnnnnnnnnnnnnnnnnnnnnnnnnnnnnnnnnnnnnnnnnnnnnnnnnnnnnnnnnnnnnnnnnnnnnnnnnnnnnnnnnnnnnnnnnnnnnnnnnnnnnnnnnnnnnnnnnnnnnnnnnnnnnnnnnnnnnnnnnnnnnnnnnnnnnnnnnnnnnnnnnnnnnnnnnnnnnnnnnnnnnnnnnnnnnnnnnnnnnnnnnnnnnnnnnnnnnnnnnnnnnnnnnnnnnnnnnnnnnnnnnnnnnnnnnnnnnnnnnnnnnnnnnnnnnnnnnnnnnnnnnnnnnnnnnnnnnnnnnnnnnnnnnnnnnnnnnnnnnnnnnnnnnnnnnnnnnnnnnnnnnnnnnnnnnnnnnnnnnnnnnnnnnnnnnnnnnnnnnnnnnnnnnnnnnnnnnnnnnnnnnnnnnnnnnnnnnnnnnnnnnnnnnnnnnnnnnnnnnnnnnnnnnnnnnnnnnnnnnnnnnnnnnnnnnnnnnnnnnnnnnnnnnnnnnnnnnnnnnnnnnnnnnnnnnnnnnnnnnnnnnnnnnnnnnnnnnnnnnnnnnnnnnnnnnnnnnnnnnnnnnnnnnnnnnnnnnnnnnnnnnnnnnnnnnnnnnnnnnnnnnnnnnnnnnnnnnnnnnnnnnnnnnnnnnnnnnnnnnnnnnnnnnnnnnnnnnnnnnnnnnnnnnnnnnnnnnnnnnnnnnnnnnnnnnnnnnnnnnnnnnnnnnnnnnnnnnnnnnnnnnnnnnnnnnnnnnnnnnnnnnnnnnnnnnnnnnnnnnnnnnnnnnnnnnnnnnnnnnnnnnnnnnnnnnnnnnnnnnnnnnnnnnnnnnnnnnnnnnnnnnnnnnnnnnnnnnnnnnnnnnnnnnnnnnnnnnnnnnnnnnnnnnnnnnnnnnnnnnnnnnnnnnnnnnnnnnnnnnnnnnnnnnnnnnnnnnnnnnnnnnnnnnnnnnnnnnnnnnnnnnnnnnnnnnnnnnnnnnnnnnnnnnnnnnnnnnnnnnnnnnnnnnnnnnnnnnnnnnnnnnnnnnnnnnnnnnnnnnnnnnnnnnnnnnnnnnnnnnnnnnnnnnnnnnnnnnnnnnnnnnnnnnnnnnnnnnnnnnnnnnnnnnnnnnnnnnnnnnnnnnnnnnnnnnnnnnnnnnnnnnnnnnnnnnnnnnnnnnnnnnnnnnnnnnnnnnnnnnnnnnnnnnnnnnnnnnnnnnnnnnnnnnnnnnnnnnnnnnnnnnnnnnnnnnnnnnnnnnnnnnnnnnnnnnnnnnnnnnnnnnnnnnnnnnnnnnnnnnnnnnnnnnnnnnnnnnnnnnnnnnnnnnnnnnnnnnnnnnnnnnnnnnnnnnnnnnnnnnnnnnnnnnnnnnnnnnnnnnnnnnnnnnnnnnnnnnnnnnnnnnnnnnnnnnnnnnnnnnnnnnnnnnnnnnnnnnnnnnnnnnnnnnnnnnnnnnnnnnnnnnnnnnnnnnnnnnnnnnnnnnnnnnnnnnnnnnnnnnnnnnnnnnnnnnnnnnnnnnnnnnnnnnnnnnnnnnnnnnnnnnnnnnnnnnnnnnnnnnnnnnnnnnnnnnnnnnnnnnnnnnnnnnnnnnnnnnnnnnnnnnnnnnnnnnnnnnnnnnnnnnnnnnnnnnnnnnnnnnnnnnnnnnnnnnnnnnnnnnnnnnnnnnnnnnnnnnnnnnnnnnnnnnnnnnnnnnnnnnnnnnnnnnnnnnnnnnnnnnnnnnnnnnnnnnnnnnnnnnnnnnnnnnnnnnnnnnnnnnnnnnnnnnnnnnnnnnnnnnnnnnnnnnnnnnnnnnnnnnnnnnnnnnnnnnnnnnnnnnnnnnnnnnnnnnnnnnnnnnnnnnnnnnnnnnnnnnnnnnnnnnnnnnnnnnnnnnnnnnnnnnnnnnnnnnnnnnnnnnnnnnnnnnnnnnnnnnnnnnnnnnnnnnnnnnnnnnnnnnnnnnnnnnnnnnnnnnnnnnnnnnnnnnnnnnnnnnnnnnnnnnnnnnnnnnnnnnnnnnnnnnnnnnnnnnnnnnnnnnnnnnnnnnnnnnnnnnnnnnnnnnnnnnnnnnnnnnnnnnnnnnnnnnnnnnnnnnnnnnnnnnnnnnnnnnnnnnnnnnnnnnnnnnnnnnnnnnnnnnnnnnnnnnnnnnnnnnnnnnnnnnnnnnnnnnnnnnnnnnnnnnnnnnnnnnnnnnnnnnnnnnnnnnnnnnnnnnnnnnnnnnnnnnnnnnnnnnnnnnnnnnnnnnnnnnnnnnnnnnnnnnnnnnnnnnnnnnnnnnnnnnnnnnnnnnnnnnnnnnnnnnnnnnnnnnnnnnnnnnnnnnnnnnnnnnnnnnnnnnnnnnnnnnnnnnnnnnnnnnnnnnnnnnnnnnnnnnnnnnnnnnnnnnnnnnnnnnnnnnnnnnnnnnnnnnnnnnnnnnnnnnnnnnnnnnnnnnnnnnnnnnnnnnnnnnnnnnnnnnnnnnnnnnnnnnnnnnnnnnnnnnnnnnnnnnnnnnnnnnnnnnnnnnnnnnnnnnnnnnnnnnnnnnnnnnnnnnnnnnnnnnnnnnnnnnnnnnnnnnnnnnnnnnnnnnnnnnnnnnnnnnnnnnnnnnnnnnnnnnnnnnnnnnnnnnnnnnnnnnnnnnnnnnnnnnnnnnnnnnnnnnnnnnnnnnnnnnnnnnnnnnnnnnnnnnnnnnnnnnnnnnnnnnnnnnnnnnnnnnnnnnnnnnnnnnnnnnnnnnnnnnnnnnnnnnnnnnnnnnnnnnnnnnnnnnnnnnnnnnnnnnnnnnnnnnnnnnnnnnnnnnnnnnnnnnnnnnnnnnnnnnnnnnnnnnnnnnnnnnnnnnnnnnnnnnnnnnnnnnnnnnnnnnnnnnnnnnnnnnnnnnnnnnnnnnnnnnnnnnnnnnnnnnnnnnnnnnnnnnnnnnnnnnnnnnnnnnnnnnnnnnnnnnnnnnnnnnnnnnnnnnnnnnnnnnnnnnnnnnnnnnnnnnnnnnnnnnnnnnnnnnnnnnnnnnnnnnnnnnnnnnnnnnnnnnnnnnnnnnnnnnnnnnnnnnnnnnnnnnnnnnnnnnnnnnnnnnnnnnnnnnnnnnnnnnnnnnnnnnnnnnnnnnnnnnnnnnnnnnnnnnnnnnnnnnnnnnnnnnnnnnnnnnnnnnnnnnnnnnnnnnnnnnnnnnnnnnnnnnnnnnnnnnnnnnnnnnnnnnnnnnnnnnnnnnnnnnnnnnnnnnnnnnnnnnnnnnnnnnnnnnnnnnnnnnnnnnnnnnnnnnnnnnnnnnnnnnnnnnnnnnnnnnnnnnnnnnnnnnnnnnnnnnnnnnnnnnnnnnnnnnnnnnnnnnnnnnnnnnnnnnnnnnnnnnnnnnnnnnnnnnnnnnnnnnnnnnnnnnnnnnnnnnnnnnnnnnnnnnnnnnnnnnnnnnnnnnnnnnnnnnnnnnnnnnnnnnnnnnnnnnnnnnnnnnnnnnnnnnnnnnnnnnnnnnnnnnnnnnnnnnnnnnnnnnnnnnnnnnnnnnnnnnnnnnnnnnnnnnnnnnnnnnnnnnnnnnnnnnnnnnnnnnnnnnnnnnnnnnnnnnnnnnnnnnnnnnnnnnnnnnnnnnnnnnnnnnnnnnnnnnnnnnnnnnnnnnnnnnnnnnnnnnnnnnnnnnnnnnnnnnnnnnnnnnnnnnnnnnnnnnnnnnnnnnnnnnnnnnnnnnnnnnnnnnnnnnnnnnnnnnnnnnnnnnnnnnnnnnnnnnnnnnnnnnnnnnnnnnnnnnnnnnnnnnnnnnnnnnnnnnnnnnnnnnnnnnnnnnnnnnnnnnnnnnnnnnnnnnnnnnnnnnnnnnnnnnnnnnnnnnnnnnnnnnnnnnnnnnnnnnnnnnnnnnnnnnnnnnnnnnnnnnnnnnnnnnnnnnnnnnnnnnnnnnnnnnnnnnnnnnnnnnnnnnnnnnnnnnnnnnnnnnnnnnnnnnnnnnnnnnnnnnnnnnnnnnnnnnnnnnnnnnnnnnnnnnnnnnnnnnnnnnnnnnnnnnnnnnnnnnnnnnnnnnnnnnnnnnnnnnnnnnnnnnnnnnnnnnnnnnnnnnnnnnnnnnnnnnnnnnnnnnnnnnnnnnnnnnnnnnnnnnnnnnnnnnnnnnnnnnnnnnnnnnnnnnnnnnnnnnnnnnnnnnnnnnnnnnnnnnnnnnnnnnnnnnnnnnnnnnnnnnnnnnnnnnnnnnnnnnnnnnnnnnnnnnnnnnnnnnnnnnnnnnnnnnnnnnnnnnnnnnnnnnnnnnnnnnnnnnnnnnnnnnnnnnnnnnnnnnnnnnnnnnnnnnnnnnnnnnnnnnnnnnnnnnnnnnnnnnnnnnnnnnnnnnnnnnnnnnnnnnnnnnnnnnnnnnnnnnnnnnnnnnnnnnnnnnnnnnnnnnnnnnnnnnnnnnnnnnnnnnnnnnnnnnnnnnnnnnnnnnnnnnnnnnnnnnnnnnnnnnnnnnnnnnnnnnnnnnnnnnnnnnnnnnnnnnnnnnnnnnnnnnnnnnnnnnnnnnnnnnnnnnnnnnnnnnnnnnnnnnnnnnnnnnnnnnnnnnnnnnnnnnnnnnnnnnnnnnnnnnnnnnnnnnnnnnnnnnnnnnnnnnnnnnnnnnnnnnnnnnnnnnnnnnnnnnnnnnnnnnnnnnnnnnnnnnnnnnnnnnnnnnnnnnnnnnnnnnnnnnnnnnnnnnnnnnnnnnnnnnnnnnnnnnnnnnnnnnnnnnnnnnnnnnnnnnnnnnnnnnnnnnnnnnnnnnnnnnnnnnnnnnnnnnnnnnnnnnnnnnnnnnnnnnnnnnnnnnnnnnnnnnnnnnnnnnnnnnnnnnnnnnnnnnnnnnnnnnnnnnnnnnnnnnnnnnnnnnnnnnnnnnnnnnnnnnnnnnnnnnnnnnnnnnnnnnnnnnnnnnnnnnnnnnnnnnnnnnnnnnnnnnnnnnnnnnnnnnnnnnnnnnnnnnnnnnnnnnnnnnnnnnnnnnnnnnnnnnnnnnnnnnnnnnnnnnnnnnnnnnnnnnnnnnnnnnnnnnnnnnnnnnnnnnnnnnnnnnnnnnnnnnnnnnnnnnnnnnnnnnnnnnnnnnnnnnnnnnnnnnnnnnnnnnnnnnnnnnnnnnnnnnnnnnnnnnnnnnnnnnnnnnnnnnnnnnnnnnnnnnnnnnnnnnnnnnnnnnnnnnnnnnnnnnnnnnnnnnnnnnnnnnnnnnnnnnnnnnnnnnnnnnnnnnnnnnnnnnnnnnnnnnnnnnnnnnnnnnnnnnnnnnnnnnnnnnnnnnnnnnnnnnnnnnnnnnnnnnnnnnnnnnnnnnnnnnnnnnnnnnnnnnnnnnnnnnnnnnnnnnnnnnnnnnnnnnnnnnnnnnnnnnnnnnnnnnnnnnnnnnnnnnnnnnnnnnnnnnnnnnnnnnnnnnnnnnnnnnnnnnnnnnnnnnnnnnnnnnnnnnnnnnnnnnnnnnnnnnnnnnnnnnnnnnnnnnnnnnnnnnnnnnnnnnnnnnnnnnnnnnnnnnnnnnnnnnnnnnnnnnnnnnnnnnnnnnnnnnnnnnnnnnnnnnnnnnnnnnnnnnnnnnnnnnnnnnnnnnnnnnnnnnnnnnnnnnnnnnnnnnnnnnnnnnnnnnnnnnnnnnnnnnnnnnnnnnnnnnnnnnnnnnnnnnnnnnnnnnnnnnnnnnnnnnnnnnnnnnnnnnnnnnnnnnnnnnnnnnnnnnnnnnnnnnnnnnnnnnnnnnnnnnnnnnnnnnnnnnnnnnnnnnnnnnnnnnnnnnnnnnnnnnnnnnnnnnnnnnnnnnnnnnnnnnnnnnnnnnnnnnnnnnnnnnnnnnnnnnnnnnnnnnnnnnnnnnnnnnnnnnnnnnnnnnnnnnnnnnnnnnnnnnnnnnnnnnnnnnnnnnnnnnnnnnnnnnnnnnnnnnnnnnnnnnnnnnnnnnnnnnnnnnnnnnnnnnnnnnnnnnnnnnnnnnnnnnnnnnnnnnnnnnnnnnnnnnnnnnnnnnnnnnnnnnnnnnnnnnnnnnnnnnnnnnnnnnnnnnnnnnnnnnnnnnnnnnnnnnnnnnnnnnnnnnnnnnnnnnnnnnnnnnnnnnnnnnnnnnnnnnnnnnnnnnnnnnnnnnnnnnnnnnnnnnnnnnnnnnnnnnnnnnnnnnnnnnnnnnnnnnnnnnnnnnnnnnnnnnnnnnnnnnnnnnnnnnnnnnnnnnnnnnnnnnnnnnnnnnnnnnnnnnnnnnnnnnnnnnnnnnnnnnnnnnnnnnnnnnnnnnnnnnnnnnnnnnnnnnnnnnnnnnnnnnnnnnnnnnnnnnnnnnnnnnnnnnnnnnnnnnnnnnnnnnnnnnnnnnnnnnnnnnnnnnnnnnnnnnnnnnnnnnnnnnnnnnnnnnnnnnnnnnnnnnnnnnnnnnnnnnnnnnnnnnnnnnnnnnnnnnnnnnnnnnnnnnnnnnnnnnnnnnnnnnnnnnnnnnnnnnnnnnnnnnnnnnnnnnnnnnnnnnnnnnnnnnnnnnnnnnnnnnnnnnnnnnnnnnnnnnnnnnnnnnnnnnnnnnnnnnnnnnnnnnnnnnnnnnnnnnnnnnnnnnnnnnnnnnnnnnnnnnnnnnnnnnnnnnnnnnnnnnnnnnnnnnnnnnnnnnnnnnnnnnnnnnnnnnnnnnnnnnnnnnnnnnnnnnnnnnnnnnnnnnnnnnnnnnnnnnnnnnnnnnnnnnnnnnnnnnnnnnnnnnnnnnnnnnnnnnnnnnnnnnnnnnnnnnnnnnnnnnnnnnnnnnnnnnnnnnnnnnnnnnnnnnnnnnnnnnnnnnnnnnnnnnnnnnnnnnnnnnnnnnnnnnnnnnnnnnnnnnnnnnnnnnnnnnnnnnnnnnnnnnnnnnnnnnnnnnnnnnnnnnnnnnnnnnnnnnnnnnnnnnnnnnnnnnnnnnnnnnnnnnnnnnnnnnnnnnnnnnnnnnnnnnnnnnnnnnnnnnnnnnnnnnnnnnnnnnnnnnnnnnnnnnnnnnnnnnnnnnnnnnnnnnnnnnnnnnnnnnnnnnnnnnnnnnnnnnnnnnnnnnnnnnnnnnnnnnnnnnnnnnnnnnnnnnnnnnnnnnnnnnnnnnnnnnnnnnnnnnnnnnnnnnnnnnnnnnnnnnnnnnnnnnnnnnnnnnnnnnnnnnnnnnnnnnnnnnnnnnnnnnnnnnnnnnnnnnnnnnnnnnnnnnnnnnnnnnnnnnnnnnnnnnnnnnnnnnnnnnnnnnnnnnnnnnnnnnnnnnnnnnnnnnnnnnnnnnnnnnnnnnnnnnnnnnnnnnnnnnnnnnnnnnnnnnnnnnnnnnnnnnnnnnnnnnnnnnnnnnnnnnnnnnnnnnnnnnnnnnnnnnnnnnnnnnnnnnnnnnnnnnnnnnnnnnnnnnnnnnnnnnnnnnnnnnnnnnnnnnnnnnnnnnnnnnnnnnnnnnnnnnnnnnnnnnnnnnnnnnnnnnnnnnnnnnnnnnnnnnnnnnnnnnnnnnnnnnnnnnnnnnnnnnnnnnnnnnnnnnnnnnnnnnnnnnnnnnnnnnnnnnnnnnnnnnnnnnnnnnnnnnnnnnnnnnnnnnnnnnnnnnnnnnnnnnnnnnnnnnnnnnnnnnnnnnnnnnnnnnnnnnnnnnnnnnnnnnnnnnnnnnnnnnnnnnnnnnnnnnnnnnnnnnnnnnnnnnnnnnnnnnnnnnnnnnnnnnnnnnnnnnnnnnnnnnnnnnnnnnnnnnnnnnnnnnnnnnnnnnnnnnnnnnnnnnnnnnnnnnnnnnnnnnnnnnnnnnnnnnnnnnnnnnnnnnnnnnnnnnnnnnnnnnnnnnnnnnnnnnnnnnnnnnnnnnnnnnnnnnnnnnnnnnnnnnnnnnnnnnnnnnnnnnnnnnnnnnnnnnnnnnnnnnnnnnnnnnnnnnnnnnnnnnnnnnnnnnnnnnnnnnnnnnnnnnnnnnnnnnnnnnnnnnnnnnnnnnnnnnnnnnnnnnnnnnnnnnnnnnnnnnnnnnnnnnnnnnnnnnnnnnnnnnnnnnnnnnnnnnnnnnnnnnnnnnnnnnnnnnnnnnnnnnnnnnnnnnnnnnnnnnnnnnnnnnnnnnnnnnnnnnnnnnnnnnnnnnnnnnnnnnnnnnnnnnnnnnnnnnnnnnnnnnnnnnnnnnnnnnnnnnnnnnnnnnnnnnnnnnnnnnnnnnnnnnnnnnnnnnnnnnnnnnnnnnnnnnnnnnnnnnnnnnnnnnnnnnnnnnnnnnnnnnnnnnnnnnnnnnnnnnnnnnnnnnnnnnnnnnnnnnnnnnnnnnnnnnnnnnnnnnnnnnnnnnnnnnnnnnnnnnnnnnnnnnnnnnnnnnnnnnnnnnnnnnnnnnnnnnnnnnnnnnnnnnnnnnnnnnnnnnnnnnnnnnnnnnnnnnnnnnnnnnnnnnnnnnnnnnnnnnnnnnnnnnnnnnnnnnnnnnnnnnnnnnnnnnnnnnnnnnnnnnnnnnnnnnnnnnnnnnnnnnnnnnnnnnnnnnnnnnnnnnnnnnnnnnnnnnnnnnnnnnnnnnnnnnnnnnnnnnnnnnnnnnnnnnnnnnnnnnnnnnnnnnnnnnnnnnnnnnnnnnnnnnnnnnnnnnnnnnnnnnnnnnnnnnnnnnnnnnnnnnnnnnnnnnnnnnnnnnnnnnnnnnnnnnnnnnnnnnnnnnnnnnnnnnnnnnnnnnnnnnnnnnnnnnnnnnnnnnnnnnnnnnnnnnnnnnnnnnnnnnnnnnnnnnnnnnnnnnnnnnnnnnnnnnnnnnnnnnnnnnnnnnnnnnnnnnnnnnnnnnnnnnnnnnnnnnnnnnnnnnnnnnnnnnnnnnnnnnnnnnnnnnnnnnnnnnnnnnnnnnnnnnnnnnnnnnnnnnnnnnnnnnnnnnnnnnnnnnnnnnnnnnnnnnnnnnnnnnnnnnnnnnnnnnnnnnnnnnnnnnnnnnnnnnnnnnnnnnnnnnnnnnnnnnnnnnnnnnnnnnnnnnnnnnnnnnnnnnnnnnnnnnnnnnnnnnnnnnnnnnnnnnnnnnnnnnnnnnnnnnnnnnnnnnnnnnnnnnnnnnnnnnnnnnnnnnnnnnnnnnnnnnnnnnnnnnnnnnnnnnnnnnnnnnnnnnnnnnnnnnnnnnnnnnnnnnnnnnnnnnnnnnnnnnnnnnnnnnnnnnnnnnnnnnnnnnnnnnnnnnnnnnnnnnnnnnnnnnnnnnnnnnnnnnnnnnnnnnnnnnnnnnnnnnnnnnnnnnnnnnnnnnnnnnnnnnnnnnnnnnnnnnnnnnnnnnnnnnnnnnnnnnnnnnnnnnnnnnnnnnnnnnnnnnnnnnnnnnnnnnnnnnnnnnnnnnnnnnnnnnnnnnnnnnnnnnnnnnnnnnnnnnnnnnnnnnnnnnnnnnnnnnnnnnnnnnnnnnnnnnnnnnnnnnnnnnnnnnnnnnnnnnnnnnnnnnnnnnnnnnnnnnnnnnnnnnnnnnnnnnnnnnnnnnnnnnnnnnnnnnnnnnnnnnnnnnnnnnnnnnnnnnnnnnnnnnnnnnnnnnnnnnnnnnnnnnnnnnnnnnnnnnnnnnnnnnnnnnnnnnnnnnnnnnnnnnnnnnnnnnnnnnnnnnnnnnnnnnnnnnnnnnnnnnnnnnnnnnnnnnnnnnnnnnnnnnnnnnnnnnnnnnnnnnnnnnnnnnnnnnnnnnnnnnnnnnnnnnnnnnnnnnnnnnnnnnnnnnnnnnnnnnnnnnnnnnnnnnnnnnnnnnnnnnnnnnnnnnnnnnnnnnnnnnnnnnnnnnnnnnnnnnnnnnnnnnnnnnnnnnnnnnnnnnnnnnnnnnnnnnnnnnnnnnnnnnnnnnnnnnnnnnnnnnnnnnnnnnnnnnnnnnnnnnnnnnnnnnnnnnnnnnnnnnnnnnnnnnnnnnnnnnnnnnnnnnnnnnnnnnnnnnnnnnnnnnnnnnnnnnnnnnnnnnnnnnnnnnnnnnnnnnnnnnnnnnnnnnnnnnnnnnnnnnnnnnnnnnnnnnnnnnnnnnnnnnnnnnnnnnnnnnnnnnnnnnnnnnnnnnnnnnnnnnnnnnnnnnnnnnnnnnnnnnnnnnnnnnnnnnnnnnnnnnnnnnnnnnnnnnnnnnnnnnnnnnnnnnnnnnnnnnnnnnnnnnnnnnnnnnnnnnnnnnnnnnnnnnnnnnnnnnnnnnnnnnnnnnnnnnnnnnnnnnnnnnnnnnnnnnnnnnnnnnnnnnnnnnnnnnnnnnnnnnnnnnnnnnnnnnnnnnnnnnnnnnnnnnnnnnnnnnnnnnnnnnnnnnnnnnnnnnnnnnnnnnnnnnnnnnnnnnnnnnnnnnnnnnnnnnnnnnnnnnnnnnnnnnnnnnnnnnnnnnnnnnnnnnnnnnnnnnnnnnnnnnnnnnnnnnnnnnnnnnnnnnnnnnnnnnnnnnnnnnnnnnnnnnnnnnnnnnnnnnnnnnnnnnnnnnnnnnnnnnnnnnnnnnnnnnnnnnnnnnnnnnnnnnnnnnnnnnnnnnnnnnnnnnnnnnnnnnnnnnnnnnnnnnnnnnnnnnnnnnnnnnnnnnnnnnnnnnnnnnnnnnnnnnnnnnnnnnnnnnnnnnnnnnnnnnnnnnnnnnnnnnnnnnnnnnnnnnnnnnnnnnnnnnnnnnnnnnnnnnnnnnnnnnnnnnnnnnnnnnnnnnnnnnnnnnnnnnnnnnnnnnnnnnnnnnnnnnnnnnnnnnnnnnnnnnnnnnnnnnnnnnnnnnnnnnnnnnnnnnnnnnnnnnnnnnnnnnnnnnnnnnnnnnnnnnnnnnnnnnnnnnnnnnnnnnnnnnnnnnnnnnnnnnnnnnnnnnnnnnnnnnnnnnnnnnnnnnnnnnnnnnnnnnnnnnnnnnnnnnnnnnnnnnnnnnnnnnnnnnnnnnnnnnnnnnnnnnnnnnnnnnnnnnnnnnnnnnnnnnnnnnnnnnnnnnnnnnnnnnnnnnnnnnnnnnnnnnnnnnnnnnnnnnnnnnnnnnnnnnnnnnnnnnnnnnnnnnnnnnnnnnnnnnnnnnnnnnnnnnnnnnnnnnnnnnnnnnnnnnnnnnnnnnnnnnnnnnnnnnnnnnnnnnnnnnnnnnnnnnnnnnnnnnnnnnnnnnnnnnnnnnnnnnnnnnnnnnnnnnnnnnnnnnnnnnnnnnnnnnnnnnnnnnnnnnnnnnnnnnnnnnnnnnnnnnnnnnnnnnnnnnnnnnnnnnnnnnnnnnnnnnnnnnnnnnnnnnnnnnnnnnnnnnnnnnnnnnnnnnnnnnnnnnnnnnnnnnnnnnnnnnnnnnnnnnnnnnnnnnnnnnnnnnnnnnnnnnnnnnnnnnnnnnnnnnnnnnnnnnnnnnnnnnnnnnnnnnnnnnnnnnnnnnnnnnnnnnnnnnnnnnnnnnnnnnnnnnnnnnnnnnnnnnnnnnnnnnnnnnnnnnnnnnnnnnnnnnnnnnnnnnnnnnnnnnnnnnnnnnnnnnnnnnnnnnnnnnnnnnnnnnnnnnnnnnnnnnnnnnnnnnnnnnnnnnnnnnnnnnnnnnnnnnnnnnnnnnnnnnnnnnnnnnnnnnnnnnnnnnnnnnnnnnnnnnnnnnnnnnnnnnnnnnnnnnnnnnnnnnnnnnnnnnnnnnnnnnnnnnnnnnnnnnnnnnnnnnnnnnnnnnnnnnnnnnnnnnnnnnnnnnnnnnnnnnnnnnnnnnnnnnnnnnnnnnnnnnnnnnnnnnnnnnnnnnnnnnnnnnnnnnnnnnnnnnnnnnnnnnnnnnnnnnnnnnnnnnnnnnnnnnnnnnnnnnnnnnnnnnnnnnnnnnnnnnnnnnnnnnnnnnnnnnnnnnnnnnnnnnnnnnnnnnnnnnnnnnnnnnnnnnnnnnnnnnnnnnnnnnnnnnnnnnnnnnnnnnnnnnnnnnnnnnnnnnnnnnnnnnnnnnnnnnnnnnnnnnnnnnnnnnnnnnnnnnnnnnnnnnnnnnnnnnnnnnnnnnnnnnnnnnnnnnnnnnnnnnnnnnnnnnnnnnnnnnnnnnnnnnnnnnnnnnnnnnnnnnnnnnnnnnnnnnnnnnnnnnnnnnnnnnnnnnnnnnnnnnnnnnnnnnnnnnnnnnnnnnnnnnnnnnnnnnnnnnnnnnnnnnnnnnnnnnnnnnnnnnnnnnnnnnnnnnnnnnnnnnnnnnnnnnnnnnnnnnnnnnnnnnnnnnnnnnnnnnnnnnnnnnnnnnnnnnnnnnnnnnnnnnnnnnnnnnnnnnnnnnnnnnnnnnnnnnnnnnnnnnnnnnnnnnnnnnnnnnnnnnnnnnnnnnnnnnnnnnnnnnnnnnnnnnnnnnnnnnnnnnnnnnnnnnnnnnnnnnnnnnnnnnnnnnnnnnnnnnnnnnnnnnnnnnnnnnnnnnnnnnnnnnnnnnnnnnnnnnnnnnnnnnnnnnnnnnnnnnnnnnnnnnnnnnnnnnnnnnnnnnnnnnnnnnnnnnnnnnnnnnnnnnnnnnnnnnnnnnnnnnnnnnnnnnnnnnnnnnnnnnnnnnnnnnnnnnnnnnnnnnnnnnnnnnnnnnnnnnnnnnnnnnnnnnnnnnnnnnnnnnnnnnnnnnnnnnnnnnnnnnnnnnnnnnnnnnnnnnnnnnnnnnnnnnnnnnnnnnnnnnnnnnnnnnnnnnnnnnnnnnnnnnnnnnnnnnnnnnnnnnnnnnnnnnnnnnnnnnnnnnnnnnnnnnnnnnnnnnnnnnnnnnnnnnnnnnnnnnnnnnnnnnnnnnnnnnnnnnnnnnnnnnnnnnnnnnnnnnnnnnnnnnnnnnnnnnnnnnnnnnnnnnnnnnnnnnnnnnnnnnnnnnnnnnnnnnnnnnnnnnnnnnnnnnnnnnnnnnnnnnnnnnnnnnnnnnnnnnnnnnnnnnnnnnnnnnnnnnnnnnnnnnnnnnnnnnnnnnnnnnnnnnnnnnnnnnnnnnnnnnnnnnnnnnnnnnnnnnnnnnnnnnnnnnnnnnnnnnnnnnnnnnnnnnnnnnnnnnnnnnnnnnnnnnnnnnnnnnnnnnnnnnnnnnnnnnnnnnnnnnnnnnnnnnnnnnnnnnnnnnnnnnnnnnnnnnnnnnnnnnnnnnnnnnnnnnnnnnnnnnnnnnnnnnnnnnnnnnnnnnnnnnnnnnnnnnnnnnnnnnnnnnnnnnnnnnnnnnnnnnnnnnnnnnnnnnnnnnnnnnnnnnnnnnnnnnnnnnnnnnnnnnnnnnnnnnnnnnnnnnnnnnnnnnnnnnnnnnnnnnnnnnnnnnnnnnnnnnnnnnnnnnnnnnnnnnnnnnnnnnnnnnnnnnnnnnnnnnnnnnnnnnnnnnnnnnnnnnnnnnnnnnnnnnnnnnnnnnnnnnnnnnnnnnnnnnnnnnnnnnnnnnnnnnnnnnnnnnnnnnnnnnnnnnnnnnnnnnnnnnnnnnnnnnnnnnnnnnnnnnnnnnnnnnnnnnnnnnnnnnnnnnnnnnnnnnnnnnnnnnnnnnnnnnnnnnnnnnnnnnnnnnnnnnnnnnnnnnnnnnnnnnnnnnnnnnnnnnnnnnnnnnnnnnnnnnnnnnnnnnnnnnnnnnnnnnnnnnnnnnnnnnnnnnnnnnnnnnnnnnnnnnnnnnnnnnnnnnnnnnnnnnnnnnnnnnnnnnnnnnnnnnnnnnnnnnnnnnnnnnnnnnnnnnnnnnnnnnnnnnnnnnnnnnnnnnnnnnnnnnnnnnnnnnnnnnnnnnnnnnnnnnnnnnnnnnnnnnnnnnnnnnnnnnnnnnnnnnnnnnnnnnnnnnnnnnnnnnnnnnnnnnnnnnnnnnnnnnnnnnnnnnnnnnnnnnnnnnnnnnnnnnnnnnnnnnnnnnnnnnnnnnnnnnnnnnnnnnnnnnnnnnnnnnnnnnnnnnnnnnnnnnnnnnnnnnnnnnnnnnnnnnnnnnnnnnnnnnnnnnnnnnnnnnnnnnnnnnnnnnnnnnnnnnnnnnnnnnnnnnnnnnnnnnnnnnnnnnnnnnnnnnnnnnnnnnnnnnnnnnnnnnnnnnnnnnnnnnnnnnnnnnnnnnnnnnnnnnnnnnnnnnnnnnnnnnnnnnnnnnnnnnnnnnnnnnnnnnnnnnnnnnnnnnnnnnnnnnnnnnnnnnnnnnnnnnnnnnnnnnnnnnnnnnnnnnnnnnnnnnnnnnnnnnnnnnnnnnnnnnnnnnnnnnnnnnnnnnnnnnnnnnnnnnnnnnnnnnnnnnnnnnnnnnnnnnnnnnnnnnnnnnnnnnnnnnnnnnnnnnnnnnnnnnnnnnnnnnnnnnnnnnnnnnnnnnnnnnnnnnnnnnnnnnnnnnnnnnnnnnnnnnnnnnnnnnnnnnnnnnnnnnnnnnnnnnnnnnnnnnnnnnnnnnnnnnnnnnnnnnnnnnnnnnnnnnnnnnnnnnnnnnnnnnnnnnnnnnnnnnnnnnnnnnnnnnnnnnnnnnnnnnnnnnnnnnnnnnnnnnnnnnnnnnnnnnnnnnnnnnnnnnnnnnnnnnnnnnnnnnnnnnnnnnnnnnnnnnnnnnnnnnnnnnnnnnnnnnnnnnnnnnnnnnnnnnnnnnnnnnnnnnnnnnnnnnnnnnnnnnnnnnnnnnnnnnnnnnnnnnnnnnnnnnnnnnnnnnnnnnnnnnnnnnnnnnnnnnnnnnnnnnnnnnnnnnnnnnnnnnnnnnnnnnnnnnnnnnnnnnnnnnnnnnnnnnnnnnnnnnnnnnnnnnnnnnnnnnnnnnnnnnnnnnnnnnnnnnnnnnnnnnnnnnnnnnnnnnnnnnnnnnnnnnnnnnnnnnnnnnnnnnnnnnnnnnnnnnnnnnnnnnnnnnnnnnnnnnnnnnnnnnnnnnnnnnnnnnnnnnnnnnnnnnnnnnnnnnnnnnnnnnnnnnnnnnnnnnnnnnnnnnnnnnnnnnnnnnnnnnnnnnnnnnnnnnnnnnnnnnnnnnnnnnnnnnnnnnnnnnnnnnnnnnnnnnnnnnnnnnnnnnnnnnnnnnnnnnnnnnnnnnnnnnnnnnnnnnnnnnnnnnnnnnnnnnnnnnnnnnnnnnnnnnnnnnnnnnnnnnnnnnnnnnnnnnnnnnnnnnnnnnnnnnnnnnnnnnnnnnnnnnnnnnnnnnnnnnnnnnnnnnnnnnnnnnnnnnnnnnnnnnnnnnnnnnnnnnnnnnnnnnnnnnnnnnnnnnnnnnnnnnnnnnnnnnnnnnnnnnnnnnnnnnnnnnnnnnnnnnnnnnnnnnnnnnnnnnnnnnnnnnnnnnnnnnnnnnnnnnnnnnnnnnnnnnnnnnnnnnnnnnnnnnnnnnnnnnnnnnnnnnnnnnnnnnnnnnnnnnnnnnnnnnnnnnnnnnnnnnnnnnnnnnnnnnnnnnnnnnnnnnnnnnnnnnnnnnnnnnnnnnnnnnnnnnnnnnnnnnnnnnnnnnnnnnnnnnnnnnnnnnnnnnnnnnnnnnnnnnnnnnnnnnnnnnnnnnnnnnnnnnnnnnnnnnnnnnnnnnnnnnnnnnnnnnnnnnnnnnnnnnnnnnnnnnnnnnnnnnnnnnnnnnnnnnnnnnnnnnnnnnnnnnnnnnnnnnnnnnnnnnnnnnnnnnnnnnnnnnnnnnnnnnnnnnnnnnnnnnnnnnnnnnnnnnnnnnnnnnnnnnnnnnnnnnnnnnnnnnnnnnnnnnnnnnnnnnnnnnnnnnnnnnnnnnnnnnnnnnnnnnnnnnnnnnnnnnnnnnnnnnnnnnnnnnnnnnnnnnnnnnnnnnnnnnnnnnnnnnnnnnnnnnnnnnnnnnnnnnnnnnnnnnnnnnnnnnnnnnnnnnnnnnnnnnnnnnnnnnnnnnnnnnnnnnnnnnnnnnnnnnnnnnnnnnnnnnnnnnnnnnnnnnnnnnnnnnnnnnnnnnnnnnnnnnnnnnnnnnnnnnnnnnnnnnnnnnnnnnnnnnnnnnnnnnnnnnnnnnnnnnnnnnnnnnnnnnnnnnnnnnnnnnnnnnnnnnnnnnnnnnnnnnnnnnnnnnnnnnnnnnnnnnnnnnnnnnnnnnnnnnnnnnnnnnnnnnnnnnnnnnnnnnnnnnnnnnnnnnnnnnnnnnnnnnnnnnnnnnnnnnnnnnnnnnnnnnnnnnnnnnnnnnnnnnnnnnnnnnnnnnnnnnnnnnnnnnnnnnnnnnnnnnnnnnnnnnnnnnnnnnnnnnnnnnnnnnnnnnnnnnnnnnnnnnnnnnnnnnnnnnnnnnnnnnnnnnnnnnnnnnnnnnnnnnnnnnnnnnnnnnnnnnnnnnnnnnnnnnnnnnnnnnnnnnnnnnnnnnnnnnnnnnnnnnnnnnnnnnnnnnnnnnnnnnnnnnnnnnnnnnnnnnnnnnnnnnnnnnnnnnnnnnnnnnnnnnnnnnnnnnnnnnnnnnnnnnnnnnnnnnnnnnnnnnnnnnnnnnnnnnnnnnnnnnnnnnnnnnnnnnnnnnnnnnnnnnnnnnnnnnnnnnnnnnnnnnnnnnnnnnnnnnnnnnnnnnnnnnnnnnnnnnnnnnnnnnnnnnnnnnnnnnnnnnnnnnnnnnnnnnnnnnnnnnnnnnnnnnnnnnnnnnnnnnnnnnnnnnnnnnnnnnnnnnnnnnnnnnnnnnnnnnnnnnnnnnnnnnnnnnnnnnnnnnnnnnnnnnnnnnnnnnnnnnnnnnnnnnnnnnnnnnnnnnnnnnnnnnnnnnnnnnnnnnnnnnnnnnnnnnnnnnnnnnnnnnnnnnnnnnnnnnnnnnnnnnnnnnnnnnnnnnnnnnnnnnnnnnnnnnnnnnnnnnnnnnnnnnnnnnnnnnnnnnnnnnnnnnnnnnnnnnnnnnnnnnnnnnnnnnnnnnnnnnnnnnnnnnnnnnnnnnnnnnnnnnnnnnnnnnnnnnnnnnnnnnnnnnnnnnnnnnnnnnnnnnnnnnnnnnnnnnnnnnnnnnnnnnnnnnnnnnnnnnnnnnnnnnnnnnnnnnnnnnnnnnnnnnnnnnnnnnnnnnnnnnnnnnnnnnnnnnnnnnnnnnnnnnnnnnnnnnnnnnnnnnnnnnnnnnnnnnnnnnnnnnnnnnnnnnnnnnnnnnnnnnnnnnnnnnnnnnnnnnnnnnnnnnnnnnnnnnnnnnnnnnnnnnnnnnnnnnnnnnnnnnnnnnnnnnnnnnnnnnnnnnnnnnnnnnnnnnnnnnnnnnnnnnnnnnnnnnnnnnnnnnnnnnnnnnnnnnnnnnnnnnnnnnnnnnnnnnnnnnnnnnnnnnnnnnnnnnnnnnnnnnnnnnnnnnnnnnnnnnnnnnnnnnnnnnnnnnnnnnnnnnnnnnnnnnnnnnnnnnnnnnnnnnnnnnnnnnnnnnnnnnnnnnnnnnnnnnnnnnnnnnnnnnnnnnnnnnnnnnnnnnnnnnnnnnnnnnnnnnnnnnnnnnnnnnnnnnnnnnnnnnnnnnnnnnnnnnnnnnnnnnnnnnnnnnnnnnnnnnnnnnnnnnnnnnnnnnnnnnnnnnnnnnnnnnnnnnnnnnnnnnnnnnnnnnnnnnnnnnnnnnnnnnnnnnnnnnnnnnnnnnnnnnnnnnnnnnnnnnnnnnnnnnnnnnnnnnnnnnnnnnnnnnnnnnnnnnnnnnnnnnnnnnnnnnnnnnnnnnnnnnnnnnnnnnnnnnnnnnnnnnnnnnnnnnnnnnnnnnnnnnnnnnnnnnnnnnnnnnnnnnnnnnnnnnnnnnnnnnnnnnnnnnnnnnnnnnnnnnnnnnnnnnnnnnnnnnnnnnnnnnnnnnnnnnnnnnnnnnnnnnnnnnnnnnnnnnnnnnnnnnnnnnnnnnnnnnnnnnnnnnnnnnnnnnnnnnnnnnnnnnnnnnnnnnnnnnnnnnnnnnnnnnnnnnnnnnnnnnnnnnnnnnnnnnnnnnnnnnnnnnnnnnnnnnnnnnnnnnnnnnnnnnnnnnnnnnnnnnnnnnnnnnnnnnnnnnnnnnnnnnnnnnnnnnnnnnnnnnnnnnnnnnnnnnnnnnnnnnnnnnnnnnnnnnnnnnnnnnnnnnnnnnnnnnnnnnnnnnnnnnnnnnnnnnnnnnnnnnnnnnnnnnnnnnnnnnnnnnnnnnnnnnnnnnnnnnnnnnnnnnnnnnnnnnnnnnnnnnnnnnnnnnnnnnnnnnnnnnnnnnnnnnnnnnnnnnnnnnnnnnnnnnnnnnnnnnnnnnnnnnnnnnnnnnnnnnnnnnnnnnnnnnnnnnnnnnnnnnnnnnnnnnnnnnnnnnnnnnnnnnnnnnnnnnnnnnnnnnnnnnnnnnnnnnnnnnnnnnnnnnnnnnnnnnnnnnnnnnnnnnnnnnnnnnnnnnnnnnnnnnnnnnnnnnnnnnnnnnnnnnnnnnnnnnnnnnnnnnnnnnnnnnnnnnnnnnnnnnnnnnnnnnnnnnnnnnnnnnnnnnnnnnnnnnnnnnnnnnnnnnnnnnnnnnnnnnnnnnnnnnnnnnnnnnnnnnnnnnnnnnnnnnnnnnnnnnnnnnnnnnnnnnnnnnnnnnnnnnnnnnnnnnnnnnnnnnnnnnnnnnnnnnnnnnnnnnnnnnnnnnnnnnnnnnnnnnnnnnnnnnnnnnnnnnnnnnnnnnnnnnnnnnnnnnnnnnnnnnnnnnnnnnnnnnnnnnnnnnnnnnnnnnnnnnnnnnnnnnnnnnnnnnnnnnnnnnnnnnnnnnnnnnnnnnnnnnnnnnnnnnnnnnnnnnnnnnnnnnnnnnnnnnnnnnnnnnnnnnnnnnnnnnnnnnnnnnnnnnnnnnnnnnnnnnnnnnnnnnnnnnnnnnnnnnnnnnnnnnnnnnnnnnnnnnnnnnnnnnnnnnnnnnnnnnnnnnnnnnnnnnnnnnnnnnnnnnnnnnnnnnnnnnnnnnnnnnnnnnnnnnnnnnnnnnnnnnnnnnnnnnnnnnnnnnnnnnnnnnnnnnnnnnnnnnnnnnnnnnnnnnnnnnnnnnnnnnnnnnnnnnnnnnnnnnnnnnnnnnnnnnnnnnnnnnnnnnnnnnnnnnnnnnnnnnnnnnnnnnnnnnnnnnnnnnnnnnnnnnnnnnnnnnnnnnnnnnnnnnnnnnnnnnnnnnnnnnnnnnnnnnnnnnnnnnnnnnnnnnnnnnnnnnnnnnnnnnnnnnnnnnnnnnnnnnnnnnnnnnnnnnnnnnnnnnnnnnnnnnnnnnnnnnnnnnnnnnnnnnnnnnnnnnnnnnnnnnnnnnnnnnnnnnnnnnnnnnnnnnnnnnnnnnnnnnnnnnnnnnnnnnnnnnnnnnnnnnnnnnnnnnnnnnnnnnnnnnnnnnnnnnnnnnnnnnnnnnnnnnnnnnnnnnnnnnnnnnnnnnnnnnnnnnnnnnnnnnnnnnnnnnnnnnnnnnnnnnnnnnnnnnnnnnnnnnnnnnnnnnnnnnnnnnnnnnnnnnnnnnnnnnnnnnnnnnnnnnnnnnnnnnnnnnnnnnnnnnnnnnnnnnnnnnnnnnnnnnnnnnnnnnnnnnnnnnnnnnnnnnnnnnnnnnnnnnnnnnnnnnnnnnnnnnnnnnnnnnnnnnnnnnnnnnnnnnnnnnnnnnnnnnnnnnnnnnnnnnnnnnnnnnnnnnnnnnnnnnnnnnnnnnnnnnnnnnnnnnnnnnnnnnnnnnnnnnnnnnnnnnnnnnnnnnnnnnnnnnnnnnnnnnnnnnnnnnnnnnnnnnnnnnnnnnnnnnnnnnnnnnnnnnnnnnnnnnnnnnnnnnnnnnnnnnnnnnnnnnnnnnnnnnnnnnnnnnnnnnnnnnnnnnnnnnnnnnnnnnnnnnnnnnnnnnnnnnnnnnnnnnnnnnnnnnnnnnnnnnnnnnnnnnnnnnnnnnnnnnnnnnnnnnnnnnnnnnnnnnnnnnnnnnnnnnnnnnnnnnnnnnnnnnnnnnnnnnnnnnnnnnnnnnnnnnnnnnnnnnnnnnnnnnnnnnnnnnnnnnnnnnnnnnnnnnnnnnnnnnnnnnnnnnnnnnnnnnnnnnnnnnnnnnnnnnnnnnnnnnnnnnnnnnnnnnnnnnnnnnnnnnnnnnnnnnnnnnnnnnnnnnnnnnnnnnnnnnnnnnnnnnnnnnnnnnnnnnnnnnnnnnnnnnnnnnnnnnnnnnnnnnnnnnnnnnnnnnnnnnnnnnnnnnnnnnnnnnnnnnnnnnnnnnnnnnnnnnnnnnnnnnnnnnnnnnnnnnnnnnnnnnnnnnnnnnnnnnnnnnnnnnnnnnnnnnnnnnnnnnnnnnnnnnnnnnnnnnnnnnnnnnnnnnnnnnnnnnnnnnnnnnnnnnnnnnnnnnnnnnnnnnnnnnnnnnnnnnnnnnnnnnnnnnnnnnnnnnnnnnnnnnnnnnnnnnnnnnnnnnnnnnnnnnnnnnnnnnnnnnnnnnnnnnnnnnnnnnnnnnnnnnnnnnnnnnnnnnnnnnnnnnnnnnnnnnnnnnnnnnnnnnnnnnnnnnnnnnnnnnnnnnnnnnnnnnnnnnnnnnnnnnnnnnnnnnnnnnnnnnnnnnnnnnnnnnnnnnnnnnnnnnnnnnnnnnnnnnnnnnnnnnnnnnnnnnnnnnnnnnnnnnnnnnnnnnnnnnnnnnnnnnnnnnnnnnnnnnnnnnnnnnnnnnnnnnnnnnnnnnnnnnnnnnnnnnnnnnnnnnnnnnnnnnnnnnnnnnnnnnnnnnnnnnnnnnnnnnnnnnnnnnnnnnnnnnnnnnnnnnnnnnnnnnnnnnnnnnnnnnnnnnnnnnnnnnnnnnnnnnnnnnnnnnnnnnnnnnnnnnnnnnnnnnnnnnnnnnnnnnnnnnnnnnnnnnnnnnnnnnnnnnnnnnnnnnnnnnnnnnnnnnnnnnnnnnnnnnnnnnnnnnnnnnnnnnnnnnnnnnnnnnnnnnnnnnnnnnnnnnnnnnnnnnnnnnnnnnnnnnnnnnnnnnnnnnnnnnnnnnnnnnnnnnnnnnnnnnnnnnnnnnnnnnnnnnnnnnnnnnnnnnnnnnnnnnnnnnnnnnnnnnnnnnnnnnnnnnnnnnnnnnnnnnnnnnnnnnnnnnnnnnnnnnnnnnnnnnnnnnnnnnnnnnnnnnnnnnnnnnnnnnnnnnnnnnnnnnnnnnnnnnnnnnnnnnnnnnnnnnnnnnnnnnnnnnnnnnnnnnnnnnnnnnnnnnnnnnnnnnnnnnnnnnnnnnnnnnnnnnnnnnnnnnnnnnnnnnnnnnnnnnnnnnnnnnnnnnnnnnnnnnnnnnnnnnnnnnnnnnnnnnnnnnnnnnnnnnnnnnnnnnnnnnnnnnnnnnnnnnnnnnnnnnnnnnnnnnnnnnnnnnnnnnnnnnnnnnnnnnnnnnnnnnnnnnnnnnnnnnnnnnnnnnnnnnnnnnnnnnnnnnnnnnnnnnnnnnnnnnnnnnnnnnnnnnnnnnnnnnnnnnnnnnnnnnnnnnnnnnnnnnnnnnnnnnnnnnnnnnnnnnnnnnnnnnnnnnnnnnnnnnnnnnnnnnnnnnnnnnnnnnnnnnnnnnnnnnnnnnnnnnnnnnnnnnnnnnnnnnnnnnnnnnnnnnnnnnnnnnnnnnnnnnnnnnnnnnnnnnnnnnnnnnnnnnnnnnnnnnnnnnnnnnnnnnnnnnnnnnnnnnnnnnnnnnnnnnnnnnnnnnnnnnnnnnnnnnnnnnnnnnnnnnnnnnnnnnnnnnnnnnnnnnnnnnnnnnnnnnnnnnnnnnnnnnnnnnnnnnnnnnnnnnnnnnnnnnnnnnnnnnnnnnnnnnnnnnnnnnnnnnnnnnnnnnnnnnnnnnnnnnnnnnnnnnnnnnnnnnnnnnnnnnnnnnnnnnnnnnnnnnnnnnnnnnnnnnnnnnnnnnnnnnnnnnnnnnnnnnnnnnnnnnnnnnnnnnnnnnnnnnnnnnnnnnnnnnnnnnnnnnnnnnnnnnnnnnnnnnnnnnnnnnnnnnnnnnnnnnnnnnnnnnnnnnnnnnnnnnnnnnnnnnnnnnnnnnnnnnnnnnnnnnnnnnnnnnnnnnnnnnnnnnnnnnnnnnnnnnnnnnnnnnnnnnnnnnnnnnnnnnnnnnnnnnnnnnnnnnnnnnnnnnnnnnnnnnnnnnnnnnnnnnnnnnnnnnnnnnnnnnnnnnnnnnnnnnnnnnnnnnnnnnnnnnnnnnnnnnnnnnnnnnnnnnnnnnnnnnnnnnnnnnnnnnnnnnnnnnnnnnnnnnnnnnnnnnnnnnnnnnnnnnnnnnnnnnnnnnnnnnnnnnnnnnnnnnnnnnnnnnnnnnnnnnnnnnnnnnnnnnnnnnnnnnnnnnnnnnnnnnnnnnnnnnnnnnnnnnnnnnnnnnnnnnnnnnnnnnnnnnnnnnnnnnnnnnnnnnnnnnnnnnnnnnnnnnnnnnnnnnnnnnnnnnnnnnnnnnnnnnnnnnnnnnnnnnnnnnnnnnnnnnnnnnnnnnnnnnnnnnnnnnnnnnnnnnnnnnnnnnnnnnnnnnnnnnnnnnnnnnnnnnnnnnnnnnnnnnnnnnnnnnnnnnnnnnnnnnnnnnnnnnnnnnnnnnnnnnnnnnnnnnnnnnnnnnnnnnnnnnnnnnnnnnnnnnnnnnnnnnnnnnnnnnnnnnnnnnnnnnnnnnnnnnnnnnnnnnnnnnnnnnnnnnnnnnnnnnnnnnnnnnnnnnnnnnnnnnnnnnnnnnnnnnnnnnnnnnnnnnnnnnnnnnnnnnnnnnnnnnnnnnnnnnnnnnnnnnnnnnnnnnnnnnnnnnnnnnnnnnnnnnnnnnnnnnnnnnnnnnnnnnnnnnnnnnnnnnnnnnnnnnnnnnnnnnnnnnnnnnnnnnnnnnnnnnnnnnnnnnnnnnnnnnnnnnnnnnnnnnnnnnnnnnnnnnnnnnnnnnnnnnnnnnnnnnnnnnnnnnnnnnnnnnnnnnnnnnnnnnnnnnnnnnnnnnnnnnnnnnnnnnnnnnnnnnnnnnnnnnnnnnnnnnnnnnnnnnnnnnnnnnnnnnnnnnnnnnnnnnnnnnnnnnnnnnnnnnnnnnnnnnnnnnnnnnnnnnnnnnnnnnnnnnnnnnnnnnnnnnnnnnnnnnnnnnnnnnnnnnnnnnnnnnnnnnnnnnnnnnnnnnnnnnnnnnnnnnnnnnnnnnnnnnnnnnnnnnnnnnnnnnnnnnnnnnnnnnnnnnnnnnnnnnnnnnnnnnnnnnnnnnnnnnnnnnnnnnnnnnnnnnnnnnnnnnnnnnnnnnnnnnnnnnnnnnnnnnnnnnnnnnnnnnnnnnnnnnnnnnnnnnnnnnnnnnnnnnnnnnnnnnnnnnnnnnnnnnnnnnnnnnnnnnnnnnnnnnnnnnnnnnnnnnnnnnnnnnnnnnnnnnnnnnnnnnnnnnnnnnnnnnnnnnnnnnnnnnnnnnnnnnnnnnnnnnnnnnnnnnnnnnnnnnnnnnnnnnnnnnnnnnnnnnnnnnnnnnnnnnnnnnnnnnnnnnnnnnnnnnnnnnnnnnnnnnnnnnnnnnnnnnnnnnnnnnnnnnnnnnnnnnnnnnnnnnnnnnnnnnnnnnnnnnnnnnnnnnnnnnnnnnnnnnnnnnnnnnnnnnnnnnnnnnnnnnnnnnnnnnnnnnnnnnnnnnnnnnnnnnnnnnnnnnnnnnnnnnnnnnnnnnnnnnnnnnnnnnnnnnnnnnnnnnnnnnnnnnnnnnnnnnnnnnnnnnnnnnnnnnnnnnnnnnnnnnnnnnnnnnnnnnnnnnnnnnnnnnnnnnnnnnnnnnnnnnnnnnnnnnnnnnnnnnnnnnnnnnnnnnnnnnnnnnnnnnnnnnnnnnnnnnnnnnnnnnnnnnnnnnnnnnnnnnnnnnnnnnnnnnnnnnnnnnnnnnnnnnnnnnnnnnnnnnnnnnnnnnnnnnnnnnnnnnnnnnnnnnnnnnnnnnnnnnnnnnnnnnnnnnnnnnnnnnnnnnnnnnnnnnnnnnnnnnnnnnnnnnnnnnnnnnnnnnnnnnnnnnnnnnnnnnnnnnnnnnnnnnnnnnnnnnnnnnnnnnnnnnnnnnnnnnnnnnnnnnnnnnnnnnnnnnnnnnnnnnnnnnnnnnnnnnnnnnnnnnnnnnnnnnnnnnnnnnnnnnnnnnnnnnnnnnnnnnnnnnnnnnnnnnnnnnnnnnnnnnnnnnnnnnnnnnnnnnnnnnnnnnnnnnnnnnnnnnnnnnnnnnnnnnnnnnnnnnnnnnnnnnnnnnnnnnnnnnnnnnnnnnnnnnnnnnnnnnnnnnnnnnnnnnnnnnnnnnnnnnnnnnnnnnnnnnnnnnnnnnnnnnnnnnnnnnnnnnnnnnnnnnnnnnnnnnnnnnnnnnnnnnnnnnnnnnnnnnnnnnnnnnnnnnnnnnnnnnnnnnnnnnnnnnnnnnnnnnnnnnnnnnnnnnnnnnnnnnnnnnnnnnnnnnnnnnnnnnnnnnnnnnnnnnnnnnnnnnnnnnnnnnnnnnnnnnnnnnnnnnnnnnnnnnnnnnnnnnnnnnnnnnnnnnnnnnnnnnnnnnnnnnnnnnnnnnnnnnnnnnnnnnnnnnnnnnnnnnnnnnnnnnnnnnnnnnnnnnnnnnnnnnnnnnnnnnnnnnnnnnnnnnnnnnnnnnnnnnnnnnnnnnnnnnnnnnnnnnnnnnnnnnnnnnnnnnnnnnnnnnnnnnnnnnnnnnnnnnnnnnnnnnnnnnnnnnnnnnnnnnnnnnnnnnnnnnnnnnnnnnnnnnnnnnnnnnnnnnnnnnnnnnnnnnnnnnnnnnnnnnnnnnnnnnnnnnnnnnnnnnnnnnnnnnnnnnnnnnnnnnnnnnnnnnnnnnnnnnnnnnnnnnnnnnnnnnnnnnnnnnnnnnnnnnnnnnnnnnnnnnnnnnnnnnnnnnnnnnnnnnnnnnnnnnnnnnnnnnnnnnnnnnnnnnnnnnnnnnnnnnnnnnnnnnnnnnnnnnnnnnnnnnnnnnnnnnnnnnnnnnnnnnnnnnnnnnnnnnnnnnnnnnnnnnnnnnnnnnnnnnnnnnnnnnnnnnnnnnnnnnnnnnnnnnnnnnnnnnnnnnnnnnnnnnnnnnnnnnnnnnnnnnnnnnnnnnnnnnnnnnnnnnnnnnnnnnnnnnnnnnnnnnnnnnnnnnnnnnnnnnnnnnnnnnnnnnnnnnnnnnnnnnnnnnnnnnnnnnnnnnnnnnnnnnnnnnnnnnnnnnnnnnnnnnnnnnnnnnnnnnnnnnnnnnnnnnnnnnnnnnnnnnnnnnnnnnnnnnnnnnnnnnnnnnnnnnnnnnnnnnnnnnnnnnnnnnnnnnnnnnnnnnnnnnnnnnnnnnnnnnnnnnnnnnnnnnnnnnnnnnnnnnnnnnnnnnnnnnnnnnnnnnnnnnnnnnnnnnnnnnnnnnnnnnnnnnnnnnnnnnnnnnnnnnnnnnnnnnnnnnnnnnnnnnnnnnnnnnnnnnnnnnnnnnnnnnnnnnnnnnnnnnnnnnnnnnnnnnnnnnnnnnnnnnnnnnnnnnnnnnnnnnnnnnnnnnnnnnnnnnnnnnnnnnnnnnnnnnnnnnnnnnnnnnnnnnnnnnnnnnnnnnnnnnnnnnnnnnnnnnnnnnnnnnnnnnnnnnnnnnnnnnnnnnnnnnnnnnnnnnnnnnnnnnnnnnnnnnnnnnnnnnnnnnnnnnnnnnnnnnnnnnnnnnnnnnnnnnnnnnnnnnnnnnnnnnnnnnnnnnnnnnnnnnnnnnnnnnnnnnnnnnnnnnnnnnnnnnnnnnnnnnnnnnnnnnnnnnnnnnnnnnnnnnnnnnnnnnnnnnnnnnnnnnnnnnnnnnnnnnnnnnnnnnnnnnnnnnnnnnnnnnnnnnnnnnnnnnnnnnnnnnnnnnnnnnnnnnnnnnnnnnnnnnnnnnnnnnnnnnnnnnnnnnnnnnnnnnnnnnnnnnnnnnnnnnnnnnnnnnnnnnnnnnnnnnnnnnnnnnnnnnnnnnnnnnnnnnnnnnnnnnnnnnnnnnnnnnnnnnnnnnnnnnnnnnnnnnnnnnnnnnnnnnnnnnnnnnnnnnnnnnnnnnnnnnnnnnnnnnnnnnnnnnnnnnnnnnnnnnnnnnnnnnnnnnnnnnnnnnnnnnnnnnnnnnnnnnnnnnnnnnnnnnnnnnnnnnnnnnnnnnnnnnnnnnnnnnnnnnnnnnnnnnnnnnnnnnnnnnnnnnnnnnnnnnnnnnnnnnnnnnnnnnnnnnnnnnnnnnnnnnnnnnnnnnnnnnnnnnnnnnnnnnnnnnnnnnnnnnnnnnnnnnnnnnnnnnnnnnnnnnnnnnnnnnnnnnnnnnnnnnnnnnnnnnnnnnnnnnnnnnnnnnnnnnnnnnnnnnnnnnnnnnnnnnnnnnnnnnnnnnnnnnnnnnnnnnnnnnnnnnnnnnnnnnnnnnnnnnnnnnnnnnnnnnnnnnnnnnnnnnnnnnnnnnnnnnnnnnnnnnnnnnnnnnnnnnnnnnnnnnnnnnnnnnnnnnnnnnnnnnnnnnnnnnnnnnnnnnnnnnnnnnnnnnnnnnnnnnnnnnnnnnnnnnnnnnnnnnnnnnnnnnnnnnnnnnnnnnnnnnnnnnnnnnnnnnnnnnnnnnnnnnnnnnnnnnnnnnnnnnnnnnnnnnnnnnnnnnnnnnnnnnnnnnnnnnnnnnnnnnnnnnnnnnnnnnnnnnnnnnnnnnnnnnnnnnnnnnnnnnnnnnnnnnnnnnnnnnnnnnnnnnnnnnnnnnnnnnnnnnnnnnnnnnnnnnnnnnnnnnnnnnnnnnnnnnnnnnnnnnnnnnnnnnnnnnnnnnnnnnnnnnnnnnnnnnnnnnnnnnnnnnnnnnnnnnnnnnnnnnnnnnnnnnnnnnnnnnnnnnnnnnnnnnnnnnnnnnnnnnnnnnnnnnnnnnnnnnnnnnnnnnnnnnnnnnnnnnnnnnnnnnnnnnnnnnnnnnnnnnnnnnnnnnnnnnnnnnnnnnnnnnnnnnnnnnnnnnnnnnnnnnnnnnnnnnnnnnnnnnnnnnnnnnnnnnnnnnnnnnnnnnnnnnnnnnnnnnnnnnnnnnnnnnnnnnnnnnnnnnnnnnnnnnnnnnnnnnnnnnnnnnnnnnnnnnnnnnnnnnnnnnnnnnnnnnnnnnnnnnnnnnnnnnnnnnnnnnnnnnnnnnnnnnnnnnnnnnnnnnnnnnnnnnnnnnnnnnnnnnnnnnnnnnnnnnnnnnnnnnnnnnnnnnnnnnnnnnnnnnnnnnnnnnnnnnnnnnnnnnnnnnnnnnnnnnnnnnnnnnnnnnnnnnnnnnnnnnnnnnnnnnnnnnnnnnnnnnnnnnnnnnnnnnnnnnnnnnnnnnnnnnnnnnnnnnnnnnnnnnnnnnnnnnnnnnnnnnnnnnnnnnnnnnnnnnnnnnnnnnnnnnnnnnnnnnnnnnnnnnnnnnnnnnnnnnnnnnnnnnnnnnnnnnnnnnnnnnnnnnnnnnnnnnnnnnnnnnnnnnnnnnnnnnnnnnnnnnnnnnnnnnnnnnnnnnnnnnnnnnnnnnnnnnnnnnnnnnnnnnnnnnnnnnnnnnnnnnnnnnnnnnnnnnnnnnnnnnnnnnnnnnnnnnnnnnnnnnnnnnnnnnnnnnnnnnnnnnnnnnnnnnnnnnnnnnnnnnnnnnnnnnnnnnnnnnnnnnnnnnnnnnnnnnnnnnnnnnnnnnnnnnnnnnnnnnnnnnnnnnnnnnnnnnnnnnnnnnnnnnnnnnnnnnnnnnnnnnnnnnnnnnnnnnnnnnnnnnnnnnnnnnnnnnnnnnnnnnnnnnnnnnnnnnnnnnnnnnnnnnnnnnnnnnnnnnnnnnnnnnnnnnnnnnnnnnnnnnnnnnnnnnnnnnnnnnnnnnnnnnnnnnnnnnnnnnnnnnnnnnnnnnnnnnnnnnnnnnnnnnnnnnnnnnnnnnnnnnnnnnnnnnnnnnnnnnnnnnnnnnnnnnnnnnnnnnnnnnnnnnnnnnnnnnnnnnnnnnnnnnnnnnnnnnnnnnnnnnnnnnnnnnnnnnnnnnnnnnnnnnnnnnnnnnnnnnnnnnnnnnnnnnnnnnnnnnnnnnnnnnnnnnnnnnnnnnnnnnnnnnnnnnnnnnnnnnnnnnnnnnnnnnnnnnnnnnnnnnnnnnnnnnnnnnnnnnnnnnnnnnnnnnnnnnnnnnnnnnnnnnnnnnnnnnnnnnnnnnnnnnnnnnnnnnnnnnnnnnnnnnnnnnnnnnnnnnnnnnnnnnnnnnnnnnnnnnnnnnnnnnnnnnnnnnnnnnnnnnnnnnnnnnnnnnnnnnnnnnnnnnnnnnnnnnnnnnnnnnnnnnnnnnnnnnnnnnnnnnnnnnnnnnnnnnnnnnnnnnnnnnnnnnnnnnnnnnnnnnnnnnnnnnnnnnnnnnnnnnnnnnnnnnnnnnnnnnnnnnnnnnnnnnnnnnnnnnnnnnnnnnnnnnnnnnnnnnnnnnnnnnnnnnnnnnnnnnnnnnnnnnnnnnnnnnnnnnnnnnnnnnnnnnnnnnnnnnnnnnnnnnnnnnnnnnnnnnnnnnnnnnnnnnnnnnnnnnnnnnnnnnnnnnnnnnnnnnnnnnnnnnnnnnnnnnnnnnnnnnnnnnnnnnnnnnnnnnnnnnnnnnnnnnnnnnnnnnnnnnnnnnnnnnnnnnnnnnnnnnnnnnnnnnnnnnnnnnnnnnnnnnnnnnnnnnnnnnnnnnnnnnnnnnnnnnnnnnnnnnnnnnnnnnnnnnnnnnnnnnnnnnnnnnnnnnnnnnnnnnnnnnnnnnnnnnnnnnnnnnnnnnnnnnnnnnnnnnnnnnnnnnnnnnnnnnnnnnnnnnnnnnnnnnnnnnnnnnnnnnnnnnnnnnnnnnnnnnnnnnnnnnnnnnnnnnnnnnnnnnnnnnnnnnnnnnnnnnnnnnnnnnnnnnnnnnnnnnnnnnnnnnnnnnnnnnnnnnnnnnnnnnnnnnnnnnnnnnnnnnnnnnnnnnnnnnnnnnnnnnnnnnnnnnnnnnnnnnnnnnnnnnnnnnnnnnnnnnnnnnnnnnnnnnnnnnnnnnnnnnnnnnnnnnnnnnnnnnnnnnnnnnnnnnnnnnnnnnnnnnnnnnnnnnnnnnnnnnnnnnnnnnnnnnnnnnnnnnnnnnnnnnnnnnnnnnnnnnnnnnnnnnnnnnnnnnnnnnnnnnnnnnnnnnnnnnnnnnnnnnnnnnnnnnnnnnnnnnnnnnnnnnnnnnnnnnnnnnnnnnnnnnnnnnnnnnnnnnnnnnnnnnnnnnnnnnnnnnnnnnnnnnnnnnnnnnnnnnnnnnnnnnnnnnnnnnnnnnnnnnnnnnnnnnnnnnnnnnnnnnnnnnnnnnnnnnnnnnnnnnnnnnnnnnnnnnnnnnnnnnnnnnnnnnnnnnnnnnnnnnnnnnnnnnnnnnnnnnnnnnnnnnnnnnnnnnnnnnnnnnnnnnnnnnnnnnnnnnnnnnnnnnnnnnnnnnnnnnnnnnnnnnnnnnnnnnnnnnnnnnnnnnnnnnnnnnnnnnnnnnnnnnnnnnnnnnnnnnnnnnnnnnnnnnnnnnnnnnnnnnnnnnnnnnnnnnnnnnnnnnnnnnnnnnnnnnnnnnnnnnnnnnnnnnnnnnnnnnnnnnnnnnnnnnnnnnnnnnnnnnnnnnnnnnnnnnnnnnnnnnnnnnnnnnnnnnnnnnnnnnnnnnnnnnnnnnnnnnnnnnnnnnnnnnnnnnnnnnnnnnnnnnnnnnnnnnnnnnnnnnnnnnnnnnnnnnnnnnnnnnnnnnnnnnnnnnnnnnnnnnnnnnnnnnnnnnnnnnnnnnnnnnnnnnnnnnnnnnnnnnnnnnnnnnnnnnnnnnnnnnnnnnnnnnnnnnnnnnnnnnnnnnnnnnnnnnnnnnnnnnnnnnnnnnnnnnnnnnnnnnnnnnnnnnnnnnnnnnnnnnnnnnnnnnnnnnnnnnnnnnnnnnnnnnnnnnnnnnnnnnnnnnnnnnnnnnnnnnnnnnnnnnnnnnnnnnnnnnnnnnnnnnnnnnnnnnnnnnnnnnnnnnnnnnnnnnnnnnnnnnnnnnnnnnnnnnnnnnnnnnnnnnnnnnnnnnnnnnnnnnnnnnnnnnnnnnnnnnnnnnnnnnnnnnnnnnnnnnnnnnnnnnnnnnnnnnnnnnnnnnnnnnnnnnnnnnnnnnnnnnnnnnnnnnnnnnnnnnnnnnnnnnnnnnnnnnnnnnnnnnnnnnnnnnnnnnnnnnnnnnnnnnnnnnnnnnnnnnnnnnnnnnnnnnnnnnnnnnnnnnnnnnnnnnnnnnnnnnnnnnnnnnnnnnnnnnnnnnnnnnnnnnnnnnnnnnnnnnnnnnnnnnnnnnnnnnnnnnnnnnnnnnnnnnnnnnnnnnnnnnnnnnnnnnnnnnnnnnnnnnnnnnnnnnnnnnnnnnnnnnnnnnnnnnnnnnnnnnnnnnnnnnnnnnnnnnnnnnnnnnnnnnnnnnnnnnnnnnnnnnnnnnnnnnnnnnnnnnnnnnnnnnnnnnnnnnnnnnnnnnnnnnnnnnnnnnnnnnnnnnnnnnnnnnnnnnnnnnnnnnnnnnnnnnnnnnnnnnnnnnnnnnnnnnnnnnnnnnnnnnnnnnnnnnnnnnnnnnnnnnnnnnnnnnnnnnnnnnnnnnnnnnnnnnnnnnnnnnnnnnnnnnnnnnnnnnnnnnnnnnnnnnnnnnnnnnnnnnnnnnnnnnnnnnnnnnnnnnnnnnnnnnnnnnnnnnnnnnnnnnnnnnnnnnnnnnnnnnnnnnnnnnnnnnnnnnnnnnnnnnnnnnnnnnnnnnnnnnnnnnnnnnnnnnnnnnnnnnnnnnnnnnnnnnnnnnnnnnnnnnnnnnnnnnnnnnnnnnnnnnnnnnnnnnnnnnnnnnnnnnnnnnnnnnnnnnnnnnnnnnnnnnnnnnnnnnnnnnnnnnnnnnnnnnnnnnnnnnnnnnnnnnnnnnnnnnnnnnnnnnnnnnnnnnnnnnnnnnnnnnnnnnnnnnnnnnnnnnnnnnnnnnnnnnnnnnnnnnnnnnnnnnnnnnnnnnnnnnnnnnnnnnnnnnnnnnnnnnnnnnnnnnnnnnnnnnnnnnnnnnnnnnnnnnnnnnnnnnnnnnnnnnnnnnnnnnnnnnnnnnnnnnnnnnnnnnnnnnnnnnnnnnnnnnnnnnnnnnnnnnnnnnnnnnnnnnnnnnnnnnnnnnnnnnnnnnnnnnnnnnnnnnnnnnnnnnnnnnnnnnnnnnnnnnnnnnnnnnnnnnnnnnnnnnnnnnnnnnnnnnnnnnnnnnnnnnnnnnnnnnnnnnnnnnnnnnnnnnnnnnnnnnnnnnnnnnnnnnnnnnnnnnnnnnnnnnnnnnnnnnnnnnnnnnnnnnnnnnnnnnnnnnnnnnnnnnnnnnnnnnnnnnnnnnnnnnnnnnnnnnnnnnnnnnnnnnnnnnnnnnnnnnnnnnnnnnnnnnnnnnnnnnnnnnnnnnnnnnnnnnnnnnnnnnnnnnnnnnnnnnnnnnnnnnnnnnnnnnnnnnnnnnnnnnnnnnnnnnnnnnnnnnnnnnnnnnnnnnnnnnnnnnnnnnnnnnnnnnnnnnnnnnnnnnnnnnnnnnnnnnnnnnnnnnnnnnnnnnnnnnnnnnnnnnnnnnnnnnnnnnnnnnnnnnnnnnnnnnnnnnnnnnnnnnnnnnnnnnnnnnnnnnnnnnnnnnnnnnnnnnnnnnnnnnnnnnnnnnnnnnnnnnnnnnnnnnnnnnnnnnnnnnnnnnnnnnnnnnnnnnnnnnnnnnnnnnnnnnnnnnnnnnnnnnnnnnnnnnnnnnnnnnnnnnnnnnnnnnnnnnnnnnnnnnnnnnnnnnnnnnnnnnnnnnnnnnnnnnnnnnnnnnnnnnnnnnnnnnnnnnnnnnnnnnnnnnnnnnnnnnnnnnnnnnnnnnnnnnnnnnnnnnnnnnnnnnnnnnnnnnnnnnnnnnnnnnnnnnnnnnnnnnnnnnnnnnnnnnnnnnnnnnnnnnnnnnnnnnnnnnnnnnnnnnnnnnnnnnnnnnnnnnnnnnnnnnnnnnnnnnnnnnnnnnnnnnnnnnnnnnnnnnnnnnnnnnnnnnnnnnnnnnnnnnnnnnnnnnnnnnnnnnnnnnnnnnnnnnnnnnnnnnnnnnnnnnnnnnnnnnnnnnnnnnnnnnnnnnnnnnnnnnnnnnnnnnnnnnnnnnnnnnnnnnnnnnnnnnnnnnnnnnnnnnnnnnnnnnnnnnnnnnnnnnnnnnnnnnnnnnnnnnnnnnnnnnnnnnnnnnnnnnnnnnnnnnnnnnnnnnnnnnnnnnnnnnnnnnnnnnnnnnnnnnnnnnnnnnnnnnnnnnnnnnnnnnnnnnnnnnnnnnnnnnnnnnnnnnnnnnnnnnnnnnnnnnnnnnnnnnnnnnnnnnnnnnnnnnnnnnnnnnnnnnnnnnnnnnnnnnnnnnnnnnnnnnnnnnnnnnnnnnnnnnnnnnnnnnnnnnnnnnnnnnnnnnnnnnnnnnnnnnnnnnnnnnnnnnnnnnnnnnnnnnnnnnnnnnnnnnnnnnnnnnnnnnnnnnnnnnnnnnnnnnnnnnnnnnnnnnnnnnnnnnnnnnnnnnnnnnnnnnnnnnnnnnnnnnnnnnnnnnnnnnnnnnnnnnnnnnnnnnnnnnnnnnnnnnnnnnnnnnnnnnnnnnnnnnnnnnnnnnnnnnnnnnnnnnnnnnnnnnnnnnnnnnnnnnnnnnnnnnnnnnnnnnnnnnnnnnnnnnnnnnnnnnnnnnnnnnnnnnnnnnnnnnnnnnnnnnnnnnnnnnnnnnnnnnnnnnnnnnnnnnnnnnnnnnnnnnnnnnnnnnnnnnnnnnnnnnnnnnnnnnnnnnnnnnnnnnnnnnnnnnnnnnnnnnnnnnnnnnnnnnnnnnnnnnnnnnnnnnnnnnnnnnnnnnnnnnnnnnnnnnnnnnnnnnnnnnnnnnnnnnnnnnnnnnnnnnnnnnnnnnnnnnnnnnnnnnnnnnnnnnnnnnnnnnnnnnnnnnnnnnnnnnnnnnnnnnnnnnnnnnnnnnnnnnnnnnnnnnnnnnnnnnnnnnnnnnnnnnnnnnnnnnnnnnnnnnnnnnnnnnnnnnnnnnnnnnnnnnnnnnnnnnnnnnnnnnnnnnnnnnnnnnnnnnnnnnnnnnnnnnnnnnnnnnnnnnnnnnnnnnnnnnnnnnnnnnnnnnnnnnnnnnnnnnnnnnnnnnnnnnnnnnnnnnnnnnnnnnnnnnnnnnnnnnnnnnnnnnnnnnnnnnnnnnnnnnnnnnnnnnnnnnnnnnnnnnnnnnnnnnnnnnnnnnnnnnnnnnnnnnnnnnnnnnnnnnnnnnnnnnnnnnnnnnnnnnnnnnnnnnnnnnnnnnnnnnnnnnnnnnnnnnnnnnnnnnnnnnnnnnnnnnnnnnnnnnnnnnnnnnnnnnnnnnnnnnnnnnnnnnnnnnnnnnnnnnnnnnnnnnnnnnnnnnnnnnnnnnnnnnnnnnnnnnnnnnnnnnnnnnnnnnnnnnnnnnnnnnnnnnnnnnnnnnnnnnnnnnnnnnnnnnnnnnnnnnnnnnnnnnnnnnnnnnnnnnnnnnnnnnnnnnnnnnnnnnnnnnnnnnnnnnnnnnnnnnnnnnnnnnnnnnnnnnnnnnnnnnnnnnnnnnnnnnnnnnnnnnnnnnnnnnnnnnnnnnnnnnnnnnnnnnnnnnnnnnnnnnnnnnnnnnnnnnnnnnnnnnnnnnnnnnnnnnnnnnnnnnnnnnnnnnnnnnnnnnnnnnnnnnnnnnnnnnnnnnnnnnnnnnnnnnnnnnnnnnnnnnnnnnnnnnnnnnnnnnnnnnnnnnnnnnnnnnnnnnnnnnnnnnnnnnnnnnnnnnnnnnnnnnnnnnnnnnnnnnnnnnnnnnnnnnnnnnnnnnnnnnnnnnnnnnnnnnnnnnnnnnnnnnnnnnnnnnnnnnnnnnnnnnnnnnnnnnnnnnnnnnnnnnnnnnnnnnnnnnnnnnnnnnnnnnnnnnnnnnnnnnnnnnnnnnnnnnnnnnnnnnnnnnnnnnnnnnnnnnnnnnnnnnnnnnnnnnnnnnnnnnnnnnnnnnnnnnnnnnnnnnnnnnnnnnnnnnnnnnnnnnnnnnnnnnnnnnnnnnnnnnnnnnnnnnnnnnnnnnnnnnnnnnnnnnnnnnnnnnnnnnnnnnnnnnnnnnnnnnnnnnnnnnnnnnnnnnnnnnnnnnnnnnnnnnnnnnnnnnnnnnnnnnnnnnnnnnnnnnnnnnnnnnnnnnnnnnnnnnnnnnnnnnnnnnnnnnnnnnnnnnnnnnnnnnnnnnnnnnnnnnnnnnnnnnnnnnnnnnnnnnnnnnnnnnnnnnnnnnnnnnnnnnnnnnnnnnnnnnnnnnnnnnnnnnnnnnnnnnnnnnnnnnnnnnnnnnnnnnnnnnnnnnnnnnnnnnnnnnnnnnnnnnnnnnnnnnnnnnnnnnnnnnnnnnnnnnnnnnnnnnnnnnnnnnnnnnnnnnnnnnnnnnnnnnnnnnnnnnnnnnnnnnnnnnnnnnnnnnnnnnnnnnnnnnnnnnnnnnnnnnnnnnnnnnnnnnnnnnnnnnnnnnnnnnnnnnnnnnnnnnnnnnnnnnnnnnnnnnnnnnnnnnnnnnnnnnnnnnnnnnnnnnnnnnnnnnnnnnnnnnnnnnnnnnnnnnnnnnnnnnnnnnnnnnnnnnnnnnnnnnnnnnnnnnnnnnnnnnnnnnnnnnnnnnnnnnnnnnnnnnnnnnnnnnnnnnnnnnnnnnnnnnnnnnnnnnnnnnnnnnnnnnnnnnnnnnnnnnnnnnnnnnnnnnnnnnnnnnnnnnnnnnnnnnnnnnnnnnnnnnnnnnnnnnnnnnnnnnnnnnnnnnnnnnnnnnnnnnnnnnnnnnnnnnnnnnnnnnnnnnnnnnnnnnnnnnnnnnnnnnnnnnnnnnnnnnnnnnnnnnnnnnnnnnnnnnnnnnnnnnnnnnnnnnnnnnnnnnnnnnnnnnnnnnnnnnnnnnnnnnnnnnnnnnnnnnnnnnnnnnnnnnnnnnnnnnnnnnnnnnnnnnnnnnnnnnnnnnnnnnnnnnnnnnnnnnnnnnnnnnnnnnnnnnnnnnnnnnnnnnnnnnnnnnnnnnnnnnnnnnnnnnnnnnnnnnnnnnnnnnnnnnnnnnnnnnnnnnnnnnnnnnnnnnnnnnnnnnnnnnnnnnnnnnnnnnnnnnnnnnnnnnnnnnnnnnnnnnnnnnnnnnnnnnnnnnnnnnnnnnnnnnnnnnnnnnnnnnnnnnnnnnnnnnnnnnnnnnnnnnnnnnnnnnnnnnnnnnnnnnnnnnnnnnnnnnnnnnnnnnnnnnnnnnnnnnnnnnnnnnnnnnnnnnnnnnnnnnnnnnnnnnnnnnnnnnnnnnnnnnnnnnnnnnnnnnnnnnnnnnnnnnnnnnnnnnnnnnnnnnnnnnnnnnnnnnnnnnnnnnnnnnnnnnnnnnnnnnnnnnnnnnnnnnnnnnnnnnnnnnnnnnnnnnnnnnnnnnnnnnnnnnnnnnnnnnnnnnnnnnnnnnnnnnnnnnnnnnnnnnnnnnnnnnnnnnnnnnnnnnnnnnnnnnnnnnnnnnnnnnnnnnnnnnnnnnnnnnnnnnnnnnnnnnnnnnnnnnnnnnnnnnnnnnnnnnnnnnnnnnnnnnnnnnnnnnnnnnnnnnnnnnnnnnnnnnnnnnnnnnnnnnnnnnnnnnnnnnnnnnnnnnnnnnnnnnnnnnnnnnnnnnnnnnnnnnnnnnnnnnnnnnnnnnnnnnnnnnnnnnnnnnnnnnnnnnnnnnnnnnnnnnnnnnnnnnnnnnnnnnnnnnnnnnnnnnnnnnnnnnnnnnnnnnnnnnnnnnnnnnnnnnnnnnnnnnnnnnnnnnnnnnnnnnnnnnnnnnnnnnnnnnnnnnnnnnnnnnnnnnnnnnnnnnnnnnnnnnnnnnnnnnnnnnnnnnnnnnnnnnnnnnnnnnnnnnnnnnnnnnnnnnnnnnnnnnnnnnnnnnnnnnnnnnnnnnnnnnnnnnnnnnnnnnnnnnnnnnnnnnnnnnnnnnnnnnnnnnnnnnnnnnnnnnnnnnnnnnnnnnnnnnnnnnnnnnnnnnnnnnnnnnnnnnnnnnnnnnnnnnnnnnnnnnnnnnnnnnnnnnnnnnnnnnnnnnnnnnnnnnnnnnnnnnnnnnnnnnnnnnnnnnnnnnnnnnnnnnnnnnnnnnnnnnnnnnnnnnnnnnnnnnnnnnnnnnnnnnnnnnnnnnnnnnnnnnnnnnnnnnnnnnnnnnnnnnnnnnnnnnnnnnnnnnnnnnnnnnnnnnnnnnnnnnnnnnnnnnnnnnnnnnnnnnnnnnnnnnnnnnnnnnnnnnnnnnnnnnnnnnnnnnnnnnnnnnnnnnnnnnnnnnnnnnnnnnnnnnnnnnnnnnnnnnnnnnnnnnnnnnnnnnnnnnnnnnnnnnnnnnnnnnnnnnnnnnnnnnnnnnnnnnnnnnnnnnnnnnnnnnnnnnnnnnnnnnnnnnnnnnnnnnnnnnnnnnnnnnnnnnnnnnnnnnnnnnnnnnnnnnnnnnnnnnnnnnnnnnnnnnnnnnnnnnnnnnnnnnnnnnnnnnnnnnnnnnnnnnnnnnnnnnnnnnnnnnnnnnnnnnnnnnnnnnnnnnnnnnnnnnnnnnnnnnnnnnnnnnnnnnnnnnnnnnnnnnnnnnnnnnnnnnnnnnnnnnnnnnnnnnnnnnnnnnnnnnnnnnnnnnnnnnnnnnnnnnnnnnnnnnnnnnnnnnnnnnnnnnnnnnnnnnnnnnnnnnnnnnnnnnnnnnnnnnnnnnnnnnnnnnnnnnnnnnnnnnnnnnnnnnnnnnnnnnnnnnnnnnnnnnnnnnnnnnnnnnnnnnnnnnnnnnnnnnnnnnnnnnnnnnnnnnnnnnnnnnnnnnnnnnnnnnnnnnnnnnnnnnnnnnnnnnnnnnnnnnnnnnnnnnnnnnnnnnnnnnnnnnnnnnnnnnnnnnnnnnnnnnnnnnnnnnnnnnnnnnnnnnnnnnnnnnnnnnnnnnnnnnnnnnnnnnnnnnnnnnnnnnnnnnnnnnnnnnnnnnnnnnnnnnnnnnnnnnnnnnnnnnnnnnnnnnnnnnnnnnnnnnnnnnnnnnnnnnnnnnnnnnnnnnnnnnnnnnnnnnnnnnnnnnnnnnnnnnnnnnnnnnnnnnnnnnnnnnnnnnnnnnnnnnnnnnnnnnnnnnnnnnnnnnnnnnnnnnnnnnnnnnnnnnnnnnnnnnnnnnnnnnnnnnnnnnnnnnnnnnnnnnnnnnnnnnnnnnnnnnnnnnnnnnnnnnnnnnnnnnnnnnnnnnnnnnnnnnnnnnnnnnnnnnnnnnnnnnnnnnnnnnnnnnnnnnnnnnnnnnnnnnnnnnnnnnnnnnnnnnnnnnnnnnnnnnnnnnnnnnnnnnnnnnnnnnnnnnnnnnnnnnnnnnnnnnnnnnnnnnnnnnnnnnnnnnnnnnnnnnnnnnnnnnnnnnnnnnnnnnnnnnnnnnnnnnnnnnnnnnnnnnnnnnnnnnnnnnnnnnnnnnnnnnnnnnnnnnnnnnnnnnnnnnnnnnnnnnnnnnnnnnnnnnnnnnnnnnnnnnnnnnnnnnnnnnnnnnnnnnnnnnnnnnnnnnnnnnnnnnnnnnnnnnnnnnnnnnnnnnnnnnnnnnnnnnnnnnnnnnnnnnnnnnnnnnnnnnnnnnnnnnnnnnnnnnnnnnnnnnnnnnnnnnnnnnnnnnnnnnnnnnnnnnnnnnnnnnnnnnnnnnnnnnnnnnnnnnnnnnnnnnnnnnnnnnnnnnnnnnnnnnnnnnnnnnnnnnnnnnnnnnnnnnnnnnnnnnnnnnnnnnnnnnnnnnnnnnnnnnnnnnnnnnnnnnnnnnnnnnnnnnnnnnnnnnnnnnnnnnnnnnnnnnnnnnnnnnnnnnnnnnnnnnnnnnnnnnnnnnnnnnnnnnnnnnnnnnnnnnnnnnnnnnnnnnnnnnnnnnnnnnnnnnnnnnnnnnnnnnnnnnnnnnnnnnnnnnnnnnnnnnnnnnnnnnnnnnnnnnnnnnnnnnnnnnnnnnnnnnnnnnnnnnnnnnnnnnnnnnnnnnnnnnnnnnnnnnnnnnnnnnnnnnnnnnnnnnnnnnnnnnnnnnnnnnnnnnnnnnnnnnnnnnnnnnnnnnnnnnnnnnnnnnnnnnnnnnnnnnnnnnnnnnnnnnnnnnnnnnnnnnnnnnnnnnnnnnnnnnnnnnnnnnnnnnnnnnnnnnnnnnnnnnnnnnnnnnnnnnnnnnnnnnnnnnnnnnnnnnnnnnnnnnnnnnnnnnnnnnnnnnnnnnnnnnnnnnnnnnnnnnnnnnnnnnnnnnnnnnnnnnnnnnnnnnnnnnnnnnnnnnnnnnnnnnnnnnnnnnnnnnnnnnnnnnnnnnnnnnnnnnnnnnnnnnnnnnnnnnnnnnnnnnnnnnnnnnnnnnnnnnnnnnnnnnnnnnnnnnnnnnnnnnnnnnnnnnnnnnnnnnnnnnnnnnnnnnnnnnnnnnnnnnnnnnnnnnnnnnnnnnnnnnnnnnnnnnnnnnnnnnnnnnnnnnnnnnnnnnnnnnnnnnnnnnnnnnnnnnnnnnnnnnnnnnnnnnnnnnnnnnnnnnnnnnnnnnnnnnnnnnnnnnnnnnnnnnnnnnnnnnnnnnnnnnnnnnnnnnnnnnnnnnnnnnnnnnnnnnnnnnnnnnnnnnnnnnnnnnnnnnnnnnnnnnnnnnnnnnnnnnnnnnnnnnnnnnnnnnnnnnnnnnnnnnnnnnnnnnnnnnnnnnnnnnnnnnnnnnnnnnnnnnnnnnnnnnnnnnnnnnnnnnnnnnnnnnnnnnnnnnnnnnnnnnnnnnnnnnnnnnnnnnnnnnnnnnnnnnnnnnnnnnnnnnnnnnnnnnnnnnnnnnnnnnnnnnnnnnnnnnnnnnnnnnnnnnnnnnnnnnnnnnnnnnnnnnnnnnnnnnnnnnnnnnnnnnnnnnnnnnnnnnnnnnnnnnnnnnnnnnnnnnnnnnnnnnnnnnnnnnnnnnnnnnnnnnnnnnnnnnnnnnnnnnnnnnnnnnnnnnnnnnnnnnnnnnnnnnnnnnnnnnnnnnnnnnnnnnnnnnnnnnnnnnnnnnnnnnnnnnnnnnnnnnnnnnnnnnnnnnnnnnnnnnnnnnnnnnnnnnnnnnnnnnnnnnnnnnnnnnnnnnnnnnnnnnnnnnnnnnnnnnnnnnnnnnnnnnnnnnnnnnnnnnnnnnnnnnnnnnnnnnnnnnnnnnnnnnnnnnnnnnnnnnnnnnnnnnnnnnnnnnnnnnnnnnnnnnnnnnnnnnnnnnnnnnnnnnnnnnnnnnnnnnnnnnnnnnnnnnnnnnnnnnnnnnnnnnnnnnnnnnnnnnnnnnnnnnnnnnnnnnnnnnnnnnnnnnnnnnnnnnnnnnnnnnnnnnnnnnnnnnnnnnnnnnnnnnnnnnnnnnnnnnnnnnnnnnnnnnnnnnnnnnnnnnnnnnnnnnnnnnnnnnnnnnnnnnnnnnnnnnnnnnnnnnnnnnnnnnnnnnnnnnnnnnnnnnnnnnnnnnnnnnnnnnnnnnnnnnnnnnnnnnnnnnnnnnnnnnnnnnnnnnnnnnnnnnnnnnnnnnnnnnnnnnnnnnnnnnnnnnnnnnnnnnnnnnnnnnnnnnnnnnnnnnnnnnnnnnnnnnnnnnnnnnnnnnnnnnnnnnnnnnnnnnnnnnnnnnnnnnnnnnnnnnnnnnnnnnnnnnnnnnnnnnnnnnnnnnnnnnnnnnnnnnnnnnnnnnnnnnnnnnnnnnnnnnnnnnnnnnnnnnnnnnnnnnnnnnnnnnnnnnnnnnnnnnnnnnnnnnnnnnnnnnnnnnnnnnnnnnnnnnnnnnnnnnnnnnnnnnnnnnnnnnnnnnnnnnnnnnnnnnnnnnnnnnnnnnnnnnnnnnnnnnnnnnnnnnnnnnnnnnnnnnnnnnnnnnnnnnnnnnnnnnnnnnnnnnnnnnnnnnnnnnnnnnnnnnnnnnnnnnnnnnnnnnnnnnnnnnnnnnnnnnnnnnnnnnnnnnnnnnnnnnnnnnnnnnnnnnnnnnnnnnnnnnnnnnnnnnnnnnnnnnnnnnnnnnnnnnnnnnnnnnnnnnnnnnnnnnnnnnnnnnnnnnnnnnnnnnnnnnnnnnnnnnnnnnnnnnnnnnnnnnnnnnnnnnnnnnnnnnnnnnnnnnnnnnnnnnnnnnnnnnnnnnnnnnnnnnnnnnnnnnnnnnnnnnnnnnnnnnnnnnnnnnnnnnnnnnnnnnnnnnnnnnnnnnnnnnnnnnnnnnnnnnnnnnnnnnnnnnnnnnnnnnnnnnnnnnnnnnnnnnnnnnnnnnnnnnnnnnnnnnnnnnnnnnnnnnnnnnnnnnnnnnnnnnnnnnnnnnnnnnnnnnnnnnnnnnnnnnnnnnnnnnnnnnnnnnnnnnnnnnnnnnnnnnnnnnnnnnnnnnnnnnnnnnnnnnnnnnnnnnnnnnnnnnnnnnnnnnnnnnnnnnnnnnnnnnnnnnnnnnnnnnnnnnnnnnnnnnnnnnnnnnnnnnnnnnnnnnnnnnnnnnnnnnnnnnnnnnnnnnnnnnnnnnnnnnnnnnnnnnnnnnnnnnnnnnnnnnnnnnnnnnnnnnnnnnnnnnnnnnnnnnnnnnnnnnnnnnnnnnnnnnnnnnnnnnnnnnnnnnnnnnnnnnnnnnnnnnnnnnnnnnnnnnnnnnnnnnnnnnnnnnnnnnnnnnnnnnnnnnnnnnnnnnnnnnnnnnnnnnnnnnnnnnnnnnnnnnnnnnnnnnnnnnnnnnnnnnnnnnnnnnnnnnnnnnnnnnnnnnnnnnnnnnnnnnnnnnnnnnnnnnnnnnnnnnnnnnnnnnnnnnnnnnnnnnnnnnnnnnnnnnnnnnnnnnnnnnnnnnnnnnnnnnnnnnnnnnnnnnnnnnnnnnnnnnnnnnnnnnnnnnnnnnnnnnnnnnnnnnnnnnnnnnnnnnnnnnnnnnnnnnnnnnnnnnnnnnnnnnnnnnnnnnnnnnnnnnnnnnnnnnnnnnnnnnnnnnnnnnnnnnnnnnnnnnnnnnnnnnnnnnnnnnnnnnnnnnnnnnnnnnnnnnnnnnnnnnnnnnnnnnnnnnnnnnnnnnnnnnnnnnnnnnnnnnnnnnnnnnnnnnnnnnnnnnnnnnnnnnnnnnnnnnnnnnnnnnnnnnnnnnnnnnnnnnnnnnnnnnnnnnnnnnnnnnnnnnnnnnnnnnnnnnnnnnnnnnnnnnnnnnnnnnnnnnnnnnnnnnnnnnnnnnnnnnnnnnnnnnnnnnnnnnnnnnnnnnnnnnnnnnnnnnnnnnnnnnnnnnnnnnnnnnnnnnnnnnnnnnnnnnnnnnnnnnnnnnnnnnnnnnnnnnnnnnnnnnnnnnnnnnnnnnnnnnnnnnnnnnnnnnnnnnnnnnnnnnnnnnnnnnnnnnnnnnnnnnnnnnnnnnnnnnnnnnnnnnnnnnnnnnnnnnnnnnnnnnnnnnnnnnnnnnnnnnnnnnnnnnnnnnnnnnnnnnnnnnnnnnnnnnnnnnnnnnnnnnnnnnnnnnnnnnnnnnnnnnnnnnnnnnnnnnnnnnnnnnnnnnnnnnnnnnnnnnnnnnnnnnnnnnnnnnnnnnnnnnnnnnnnnnnnnnnnnnnnnnnnnnnnnnnnnnnnnnnnnnnnnnnnnnnnnnnnnnnnnnnnnnnnnnnnnnnnnnnnnnnnnnnnnnnnnnnnnnnnnnnnnnnnnnnnnnnnnnnnnnnnnnnnnnnnnnnnnnnnnnnnnnnnnnnnnnnnnnnnnnnnnnnnnnnnnnnnnnnnnnnnnnnnnnnnnnnnnnnnnnnnnnnnnnnnnnnnnnnnnnnnnnnnnnnnnnnnnnnnnnnnnnnnnnnnnnnnnnnnnnnnnnnnnnnnnnnnnnnnnnnnnnnnnnnnnnnnnnnnnnnnnnnnnnnnnnnnnnnnnnnnnnnnnnnnnnnnnnnnnnnnnnnnnnnnnnnnnnnnnnnnnnnnnnnnnnnnnnnnnnnnnnnnnnnnnnnnnnnnnnnnnnnnnnnnnnnnnnnnnnnnnnnnnnnnnnnnnnnnnnnnnnnnnnnnnnnnnnnnnnnnnnnnnnnnnnnnnnnnnnnnnnnnnnnnnnnnnnnnnnnnnnnnnnnnnnnnnnnnnnnnnnnnnnnnnnnnnnnnnnnnnnnnnnnnnnnnnnnnnnnnnnnnnnnnnnnnnnnnnnnnnnnnnnnnnnnnnnnnnnnnnnnnnnnnnnnnnnnnnnnnnnnnnnnnnnnnnnnnnnnnnnnnnnnnnnnnnnnnnnnnnnnnnnnnnnnnnnnnnnnnnnnnnnnnnnnnnnnnnnnnnnnnnnnnnnnnnnnnnnnnnnnnnnnnnnnnnnnnnnnnnnnnnnnnnnnnnnnnnnnnnnnnnnnnnnnnnnnnnnnnnnnnnnnnnnnnnnnnnnnnnnnnnnnnnnnnnnnnnnnnnnnnnnnnnnnnnnnnnnnnnnnnnnnnnnnnnnnnnnnnnnnnnnnnnnnnnnnnnnnnnnnnnnnnnnnnnnnnnnnnnnnnnnnnnnnnnnnnnnnnnnnnnnnnnnnnnnnnnnnnnnnnnnnnnnnnnnnnnnnnnnnnnnnnnnnnnnnnnnnnnnnnnnnnnnnnnnnnnnnnnnnnnnnnnnnnnnnnnnnnnnnnnnnnnnnnnnnnnnnnnnnnnnnnnnnnnnnnnnnnnnnnnnnnnnnnnnnnnnnnnnnnnnnnnnnnnnnnnnnnnnnnnnnnnnnnnnnnnnnnnnnnnnnnnnnnnnnnnnnnnnnnnnnnnnnnnnnnnnnnnnnnnnnnnnnnnnnnnnnnnnnnnnnnnnnnnnnnnnnnnnnnnnnnnnnnnnnnnnnnnnnnnnnnnnnnnnnnnnnnnnnnnnnnnnnnnnnnnnnnnnnnnnnnnnnnnnnnnnnnnnnnnnnnnnnnnnnnnnnnnnnnnnnnnnnnnnnnnnnnnnnnnnnnnnnnnnnnnnnnnnnnnnnnnnnnnnnnnnnnnnnnnnnnnnnnnnnnnnnnnnnnnnnnnnnnnnnnnnnnnnnnnnnnnnnnnnnnnnnnnnnnnnnnnnnnnnnnnnnnnnnnnnnnnnnnnnnnnnnnnnnnnnnnnnnnnnnnnnnnnnnnnnnnnnnnnnnnnnnnnnnnnnnnnnnnnnnnnnnnnnnnnnnnnnnnnnnnnnnnnnnnnnnnnnnnnnnnnnnnnnnnnnnnnnnnnnnnnnnnnnnnnnnnnnnnnnnnnnnnnnnnnnnnnnnnnnnnnnnnnnnnnnnnnnnnnnnnnnnnnnnnnnnnnnnnnnnnnnnnnnnnnnnnnnnnnnnnnnnnnnnnnnnnnnnnnnnnnnnnnnnnnnnnnnnnnnnnnnnnnnnnnnnnnnnnnnnnnnnnnnnnnnnnnnnnnnnnnnnnnnnnnnnnnnnnnnnnnnnnnnnnnnnnnnnnnnnnnnnnnnnnnnnnnnnnnnnnnnnnnnnnnnnnnnnnnnnnnnnnnnnnnnnnnnnnnnnnnnnnnnnnnnnnnnnnnnnnnnnnnnnnnnnnnnnnnnnnnnnnnnnnnnnnnnnnnnnnnnnnnnnnnnnnnnnnnnnnnnnnnnnnnnnnnnnnnnnnnnnnnnnnnnnnnnnnnnnnnnnnnnnnnnnnnnnnnnnnnnnnnnnnnnnnnnnnnnnnnnnnnnnnnnnnnnnnnnnnnnnnnnnnnnnnnnnnnnnnnnnnnnnnnnnnnnnnnnnnnnnnnnnnnnnnnnnnnnnnnnnnnnnnnnnnnnnnnnnnnnnnnnnnnnnnnnnnnnnnnnnnnnnnnnnnnnnnnnnnnnnnnnnnnnnnnnnnnnnnnnnnnnnnnnnnnnnnnnnnnnnnnnnnnnnnnnnnnnnnnnnnnnnnnnnnnnnnnnnnnnnnnnnnnnnnnnnnnnnnnnnnnnnnnnnnnnnnnnnnnnnnnnnnnnnnnnnnnnnnnnnnnnnnnnnnnnnnnnnnnnnnnnnnnnnnnnnnnnnnnnnnnnnnnnnnnnnnnnnnnnnnnnnnnnnnnnnnnnnnnnnnnnnnnnnnnnnnnnnnnnnnnnnnnnnnnnnnnnnnnnnnnnnnnnnnnnnnnnnnnnnnnnnnnnnnnnnnnnnnnnnnnnnnnnnnnnnnnnnnnnnnnnnnnnnnnnnnnnnnnnnnnnnnnnnnnnnnnnnnnnnnnnnnnnnnnnnnnnnnnnnnnnnnnnnnnnnnnnnnnnnnnnnnnnnnnnnnnnnnnnnnnnnnnnnnnnnnnnnnnnnnnnnnnnnnnnnnnnnnnnnnnnnnnnnnnnnnnnnnnnnnnnnnnnnnnnnnnnnnnnnnnnnnnnnnnnnnnnnnnnnnnnnnnnnnnnnnnnnnnnnnnnnnnnnnnnnnnnnnnnnnnnnnnnnnnnnnnnnnnnnnnnnnnnnnnnnnnnnnnnnnnnnnnnnnnnnnnnnnnnnnnnnnnnnnnnnnnnnnnnnnnnnnnnnnnnnnnnnnnnnnnnnnnnnnnnnnnnnnnnnnnnnnnnnnnnnnnnnnnnnnnnnnnnnnnnnnnnnnnnnnnnnnnnnnnnnnnnnnnnnnnnnnnnnnnnnnnnnnnnnnnnnnnnnnnnnnnnnnnnnnnnnnnnnnnnnnnnnnnnnnnnnnnnnnnnnnnnnnnnnnnnnnnnnnnnnnnnnnnnnnnnnnnnnnnnnnnnnnnnnnnnnnnnnnnnnnnnnnnnnnnnnnnnnnnnnnnnnnnnnnnnnnnnnnnnnnnnnnnnnnnnnnnnnnnnnnnnnnnnnnnnnnnnnnnnnnnnnnnnnnnnnnnnnnnnnnnnnnnnnnnnnnnnnnnnnnnnnnnnnnnnnnnnnnnnnnnnnnnnnnnnnnnnnnnnnnnnnnnnnnnnnnnnnnnnnnnnnnnnnnnnnnnnnnnnnnnnnnnnnnnnnnnnnnnnnnnnnnnnnnnnnnnnnnnnnnnnnnnnnnnnnnnnnnnnnnnnnnnnnnnnnnnnnnnnnnnnnnnnnnnnnnnnnnnnnnnnnnnnnnnnnnnnnnnnnnnnnnnnnnnnnnnnnnnnnnnnnnnnnnnnnnnnnnnnnnnnnnnnnnnnnnnnnnnnnnnnnnnnnnnnnnnnnnnnnnnnnnnnnnnnnnnnnnnnnnnnnnnnnnnnnnnnnnnnnnnnnnnnnnnnnnnnnnnnnnnnnnnnnnnnnnnnnnnnnnnnnnnnnnnnnnnnnnnnnnnnnnnnnnnnnnnnnnnnnnnnnnnnnnnnnnnnnnnnnnnnnnnnnnnnnnnnnnnnnnnnnnnnnnnnnnnnnnnnnnnnnnnnnnnnnnnnnnnnnnnnnnnnnnnnnnnnnnnnnnnnnnnnnnnnnnnnnnnnnnnnnnnnnnnnnnnnnnnnnnnnnnnnnnnnnnnnnnnnnnnnnnnnnnnnnnnnnnnnnnnnnnnnnnnnnnnnnnnnnnnnnnnnnnnnnnnnnnnnnnnnnnnnnnnnnnnnnnnnnnnnnnnnnnnnnnnnnnnnnnnnnnnnnnnnnnnnnnnnnnnnnnnnnnnnnnnnnnnnnnnnnnnnnnnnnnnnnnnnnnnnnnnnnnnnnnnnnnnnnnnnnnnnnnnnnnnnnnnnnnnnnnnnnnnnnnnnnnnnnnnnnnnnnnnnnnnnnnnnnnnnnnnnnnnnnnnnnnnnnnnnnnnnnnnnnnnnnnnnnnnnnnnnnnnnnnnnnnnnnnnnnnnnnnnnnnnnnnnnnnnnnnnnnnnnnnnnnnnnnnnnnnnnnnnnnnnnnnnnnnnnnnnnnnnnnnnnnnnnnnnnnnnnnnnnnnnnnnnnnnnnnnnnnnnnnnnnnnnnnnnnnnnnnnnnnnnnnnnnnnnnnnnnnnnnnnnnnnnnnnnnnnnnnnnnnnnnnnnnnnnnnnnnnnnnnnnnnnnnnnnnnnnnnnnnnnnnnnnnnnnnnnnnnnnnnnnnnnnnnnnnnnnnnnnnnnnnnnnnnnnnnnnnnnnnnnnnnnnnnnnnnnnnnnnnnnnnnnnnnnnnnnnnnnnnnnnnnnnnnnnnnnnnnnnnnnnnnnnnnnnnnnnnnnnnnnnnnnnnnnnnnnnnnnnnnnnnnnnnnnnnnnnnnnnnnnnnnnnnnnnnnnnnnnnnnnnnnnnnnnnnnnnnnnnnnnnnnnnnnnnnnnnnnnnnnnnnnnnnnnnnnnnnnnnnnnnnnnnnnnnnnnnnnnnnnnnnnnnnnnnnnnnnnnnnnnnnnnnnnnnnnnnnnnnnnnnnnnnnnnnnnnnnnnnnnnnnnnnnnnnnnnnnnnnnnnnnnnnnnnnnnnnnnnnnnnnnnnnnnnnnnnnnnnnnnnnnnnnnnnnnnnnnnnnnnnnnnnnnnnnnnnnnnnnnnnnnnnnnnnnnnnnnnnnnnnnnnnnnnnnnnnnnnnnnnnnnnnnnnnnnnnnnnnnnnnnnnnnnnnnnnnnnnnnnnnnnnnnnnnnnnnnnnnnnnnnnnnnnnnnnnnnnnnnnnnnnnnnnnnnnnnnnnnnnnnnnnnnnnnnnnnnnnnnnnnnnnnnnnnnnnnnnnnnnnnnnnnnnnnnnnnnnnnnnnnnnnnnnnnnnnnnnnnnnnnnnnnnnnnnnnnnnnnnnnnnnnnnnnnnnnnnnnnnnnnnnnnnnnnnnnnnnnnnnnnnnnnnnnnnnnnnnnnnnnnnnnnnnnnnnnnnnnnnnnnnnnnnnnnnnnnnnnnnnnnnnnnnnnnnnnnnnnnnnnnnnnnnnnnnnnnnnnnnnnnnnnnnnnnnnnnnnnnnnnnnnnnnnnnnnnnnnnnnnnnnnnnnnnnnnnnnnnnnnnnnnnnnnnnnnnnnnnnnnnnnnnnnnnnnnnnnnnnnnnnnnnnnnnnnnnnnnnnnnnnnnnnnnnnnnnnnnnnnnnnnnnnnnnnnnnnnnnnnnnnnnnnnnnnnnnnnnnnnnnnnnnnnnnnnnnnnnnnnnnnnnnnnnnnnnnnnnnnnnnnnnnnnnnnnnnnnnnnnnnnnnnnnnnnnnnnnnnnnnnnnnnnnnnnnnnnnnnnnnnnnnnnnnnnnnnnnnnnnnnnnnnnnnnnnnnnnnnnnnnnnnnnnnnnnnnnnnnnnnnnnnnnnnnnnnnnnnnnnnnnnnnnnnnnnnnnnnnnnnnnnnnnnnnnnnnnnnnnnnnnnnnnnnnnnnnnnnnnnnnnnnnnnnnnnnnnnnnnnnnnnnnnnnnnnnnnnnnnnnnnnnnnnnnnnnnnnnnnnnnnnnnnnnnnnnnnnnnnnnnnnnnnnnnnnnnnnnnnnnnnnnnnnnnnnnnnnnnnnnnnnnnnnnnnnnnnnnnnnnnnnnnnnnnnnnnnnnnnnnnnnnnnnnnnnnnnnnnnnnnnnnnnnnnnnnnnnnnnnnnnnnnnnnnnnnnnnnnnnnnnnnnnnnnnnnnnnnnnnnnnnnnnnnnnnnnnnnnnnnnnnnnnnnnnnnnnnnnnnnnnnnnnnnnnnnnnnnnnnnnnnnnnnnnnnnnnnnnnnnnnnnnnnnnnnnnnnnnnnnnnnnnnnnnnnnnnnnnnnnnnnnnnnnnnnnnnnnnnnnnnnnnnnnnnnnnnnnnnnnnnnnnnnnnnnnnnnnnnnnnnnnnnnnnnnnnnnnnnnnnnnnnnnnnnnnnnnnnnnnnnnnnnnnnnnnnnnnnnnnnnnnnnnnnnnnnnnnnnnnnnnnnnnnnnnnnnnnnnnnnnnnnnnnnnnnnnnnnnnnnnnnnnnnnnnnnnnnnnnnnnnnnnnnnnnnnnnnnnnnnnnnnnnnnnnnnnnnnnnnnnnnnnnnnnnnnnnnnnnnnnnnnnnnnnnnnnnnnnnnnnnnnnnnnnnnnnnnnnnnnnnnnnnnnnnnnnnnnnnnnnnnnnnnnnnnnnnnnnnnnnnnnnnnnnnnnnnnnnnnnnnnnnnnnnnnnnnnnnnnnnnnnnnnnnnnnnnnnnnnnnnnnnnnnnnnnnnnnnnnnnnnnnnnnnnnnnnnnnnnnnnnnnnnnnnnnnnnnnnnnnnnnnnnnnnnnnnnnnnnnnnnnnnnnnnnnnnnnnnnnnnnnnnnnnnnnnnnnnnnnnnnnnnnnnnnnnnnnnnnnnnnnnnnnnnnnnnnnnnnnnnnnnnnnnnnnnnnnnnnnnnnnnnnnnnnnnnnnnnnnnnnnnnnnnnnnnnnnnnnnnnnnnnnnnnnnnnnnnnnnnnnnnnnnnnnnnnnnnnnnnnnnnnnnnnnnnnnnnnnnnnnnnnnnnnnnnnnnnnnnnnnnnnnnnnnnnnnnnnnnnnnnnnnnnnnnnnnnnnnnnnnnnnnnnnnnnnnnnnnnnnnnnnnnnnnnnnnnnnnnnnnnnnnnnnnnnnnnnnnnnnnnnnnnnnnnnnnnnnnnnnnnnnnnnnnnnnnnnnnnnnnnnnnnnnnnnnnnnnnnnnnnnnnnnnnnnnnnnnnnnnnnnnnnnnnnnnnnnnnnnnnnnnnnnnnnnnnnnnnnnnnnnnnnnnnnnnnnnnnnnnnnnnnnnnnnnnnnnnnnnnnnnnnnnnnnnnnnnnnnnnnnnnnnnnnnnnnnnnnnnnnnnnnnnnnnnnnnnnnnnnnnnnnnnnnnnnnnnnnnnnnnnnnnnnnnnnnnnnnnnnnnnnnnnnnnnnnnnnnnnnnnnnnnnnnnnnnnnnnnnnnnnnnnnnnnnnnnnnnnnnnnnnnnnnnnnnnnnnnnnnnnnnnnnnnnnnnnnnnnnnnnnnnnnnnnnnnnnnnnnnnnnnnnnnnnnnnnnnnnnnnnnnnnnnnnnnnnnnnnnnnnnnnnnnnnnnnnnnnnnnnnnnnnnnnnnnnnnnnnnnnnnnnnnnnnnnnnnnnnnnnnnnnnnnnnnnnnnnnnnnnnnnnnnnnnnnnnnnnnnnnnnnnnnnnnnnnnnnnnnnnnnnnnnnnnnnnnnnnnnnnnnnnnnnnnnnnnnnnnnnnnnnnnnnnnnnnnnnnnnnnnnnnnnnnnnnnnnnnnnnnnnnnnnnnnnnnnnnnnnnnnnnnnnnnnnnnnnnnnnnnnnnnnnnnnnnnnnnnnnnnnnnnnnnnnnnnnnnnnnnnnnnnnnnnnnnnnnnnnnnnnnnnnnnnnnnnnnnnnnnnnnnnnnnnnnnnnnnnnnnnnnnnnnnnnnnnnnnnnnnnnnnnnnnnnnnnnnnnnnnnnnnnnnnnnnnnnnnnnnnnnnnnnnnnnnnnnnnnnnnnnnnnnnnnnnnnnnnnnnnnnnnnnnnnnnnnnnnnnnnnnnnnnnnnnnnnnnnnnnnnnnnnnnnnnnnnnnnnnnnnnnnnnnnnnnnnnnnnnnnnnnnnnnnnnnnnnnnnnnnnnnnnnnnnnnnnnnnnnnnnnnnnnnnnnnnnnnnnnnnnnnnnnnnnnnnnnnnnnnnnnnnnnnnnnnnnnnnnnnnnnnnnnnnnnnnnnnnnnnnnnnnnnnnnnnnnnnnnnnnnnnnnnnnnnnnnnnnnnnnnnnnnnnnnnnnnnnnnnnnnnnnnnnnnnnnnnnnnnnnnnnnnnnnnnnnnnnnnnnnnnnnnnnnnnnnnnnnnnnnnnnnnnnnnnnnnnnnnnnnnnnnnnnnnnnnnnnnnnnnnnnnnnnnnnnnnnnnnnnnnnnnnnnnnnnnnnnnnnnnnnnnnnnnnnnnnnnnnnnnnnnnnnnnnnnnnnnnnnnnnnnnnnnnnnnnnnnnnnnnnnnnnnnnnnnnnnnnnnnnnnnnnnnnnnnnnnnnnnnnnnnnnnnnnnnnnnnnnnnnnnnnnnnnnnnnnnnnnnnnnnnnnnnnnnnnnnnnnnnnnnnnnnnnnnnnnnnnnnnnnnnnnnnnnnnnnnnnnnnnnnnnnnnnnnnnnnnnnnnnnnnnnnnnnnnnnnnnnnnnnnnnnnnnnnnnnnnnnnnnnnnnnnnnnnnnnnnnnnnnnnnnnnnnnnnnnnnnnnnnnnnnnnnnnnnnnnnnnnnnnnnnnnnnnnnnnnnnnnnnnnnnnnnnnnnnnnnnnnnnnnnnnnnnnnnnnnnnnnnnnnnnnnnnnnnnnnnnnnnnnnnnnnnnnnnnnnnnnnnnnnnnnnnnnnnnnnnnnnnnnnnnnnnnnnnnnnnnnnnnnnnnnnnnnnnnnnnnnnnnnnnnnnnnnnnnnnnnnnnnnnnnnnnnnnnnnnnnnnnnnnnnnnnnnnnnnnnnnnnnnnnnnnnnnnnnnnnnnnnnnnnnnnnnnnnnnnnnnnnnnnnnnnnnnnnnnnnnnnnnnnnnnnnnnnnnnnnnnnnnnnnnnnnnnnnnnnnnnnnnnnnnnnnnnnnnnnnnnnnnnnnnnnnnnnnnnnnnnnnnnnnnnnnnnnnnnnnnnnnnnnnnnnnnnnnnnnnnnnnnnnnnnnnnnnnnnnnnnnnnnnnnnnnnnnnnnnnnnnnnnnnnnnnnnnnnnnnnnnnnnnnnnnnnnnnnnnnnnnnnnnnnnnnnnnnnnnnnnnnnnnnnnnnnnnnnnnnnnnnnnnnnnnnnnnnnnnnnnnnnnnnnnnnnnnnnnnnnnnnnnnnnnnnnnnnnnnnnnnnnnnnnnnnnnnnnnnnnnnnnnnnnnnnnnnnnnnnnnnnnnnnnnnnnnnnnnnnnnnnnnnnnnnnnnnnnnnnnnnnnnnnnnnnnnnnnnnnnnnnnnnnnnnnnnnnnnnnnnnnnnnnnnnnnnnnnnnnnnnnnnnnnnnnnnnnnnnnnnnnnnnnnnnnnnnnnnnnnnnnnnnnnnnnnnnnnnnnnnnnnnnnnnnnnnnnnnnnnnnnnnnnnnnnnnnnnnnnnnnnnnnnnnnnnnnnnnnnnnnnnnnnnnnnnnnnnnnnnnnnnnnnnnnnnnnnnnnnnnnnnnnnnnnnnnnnnnnnnnnnnnnnnnnnnnnnnnnnnnnnnnnnnnnnnnnnnnnnnnnnnnnnnnnnnnnnnnnnnnnnnnnnnnnnnnnnnnnnnnnnnnnnnnnnnnnnnnnnnnnnnnnnnnnnnnnnnnnnnnnnnnnnnnnnnnnnnnnnnnnnnnnnnnnnnnnnnnnnnnnnnnnnnnnnnnnnnnnnnnnnnnnnnnnnnnnnnnnnnnnnnnnnnnnnnnnnnnnnnnnnnnnnnnnnnnnnnnnnnnnnnnnnnnnnnnnnnnnnnnnnnnnnnnnnnnnnnnnnnnnnnnnnnnnnnnnnnnnnnnnnnnnnnnnnnnnnnnnnnnnnnnnnnnnnnnnnnnnnnnnnnnnnnnnnnnnnnnnnnnnnnnnnnnnnnnnnnnnnnnnnnnnnnnnnnnnnnnnnnnnnnnnnnnnnnnnnnnnnnnnnnnnnnnnnnnnnnnnnnnnnnnnnnnnnnnnnnnnnnnnnnnnnnnnnnnnnnnnnnnnnnnnnnnnnnnnnnnnnnnnnnnnnnnnnnnnnnnnnnnnnnnnnnnnnnnnnnnnnnnnnnnnnnnnnnnnnnnnnnnnnnnnnnnnnnnnnnnnnnnnnnnnnnnnnnnnnnnnnnnnnnnnnnnnnnnnnnnnnnnnnnnnnnnnnnnnnnnnnnnnnnnnnnnnnnnnnnnnnnnnnnnnnnnnnnnnnnnnnnnnnnnnnnnnnnnnnnnnnnnnnnnnnnnnnnnnnnnnnnnnnnnnnnnnnnnnnnnnnnnnnnnnnnnnnnnnnnnnnnnnnnnnnnnnnnnnnnnnnnnnnnnnnnnnnnnnnnnnnnnnnnnnnnnnnnnnnnnnnnnnnnnnnnnnnnnnnnnnnnnnnnnnnnnnnnnnnnnnnnnnnnnnnnnnnnnnnnnnnnnnnnnnnnnnnnnnnnnnnnnnnnnnnnnnnnnnnnnnnnnnnnnnnnnnnnnnnnnnnnnnnnnnnnnnnnnnnnnnnnnnnnnnnnnnnnnnnnnnnnnnnnnnnnnnnnnnnnnnnnnnnnnnnnnnnnnnnnnnnnnnnnnnnnnnnnnnnnnnnnnnnnnnnnnnnnnnnnnnnnnnnnnnnnnnnnnnnnnnnnnnnnnnnnnnnnnnnnnnnnnnnnnnnnnnnnnnnnnnnnnnnnnnnnnnnnnnnnnnnnnnnnnnnnnnnnnnnnnnnnnnnnnnnnnnnnnnnnnnnnnnnnnnnnnnnnnnnnnnnnnnnnnnnnnnnnnnnnnnnnnnnnnnnnnnnnnnnnnnnnnnnnnnnnnnnnnnnnnnnnnnnnnnnnnnnnnnnnnnnnnnnnnnnnnnnnnnnnnnnnnnnnnnnnnnnnnnnnnnnnnnnnnnnnnnnnnnnnnnnnnnnnnnnnnnnnnnnnnnnnnnnnnnnnnnnnnnnnnnnnnnnnnnnnnnnnnnnnnnnnnnnnnnnnnnnnnnnnnnnnnnnnnnnnnnnnnnnnnnnnnnnnnnnnnnnnnnnnnnnnnnnnnnnnnnnnnnnnnnnnnnnnnnnnnnnnnnnnnnnnnnnnnnnnnnnnnnnnnnnnnnnnnnnnnnnnnnnnnnnnnnnnnnnnnnnnnnnnnnnnnnnnnnnnnnnnnnnnnnnnnnnnnnnnnnnnnnnnnnnnnnnnnnnnnnnnnnnnnnnnnnnnnnnnnnnnnnnnnnnnnnnnnnnnnnnnnnnnnnnnnnnnnnnnnnnnnnnnnnnnnnnnnnnnnnnnnnnnnnnnnnnnnnnnnnnnnnnnnnnnnnnnnnnnnnnnnnnnnnnnnnnnnnnnnnnnnnnnnnnnnnnnnnnnnnnnnnnnnnnnnnnnnnnnnnnnnnnnnnnnnnnnnnnnnnnnnnnnnnnnnnnnnnnnnnnnnnnnnnnnnnnnnnnnnnnnnnnnnnnnnnnnnnnnnnnnnnnnnnnnnnnnnnnnnnnnnnnnnnnnnnnnnnnnnnnnnnnnnnnnnnnnnnnnnnnnnnnnnnnnnnnnnnnnnnnnnnnnnnnnnnnnnnnnnnnnnnnnnnnnnnnnnnnnnnnnnnnnnnnnnnnnnnnnnnnnnnnnnnnnnnnnnnnnnnnnnnnnnnnnnnnnnnnnnnnnnnnnnnnnnnnnnnnnnnnnnnnnnnnnnnnnnnnnnnnnnnnnnnnnnnnnnnnnnnnnnnnnnnnnnnnnnnnnnnnnnnnnnnnnnnnnnnnnnnnnnnnnnnnnnnnnnnnnnnnnnnnnnnnnnnnnnnnnnnnnnnnnnnnnnnnnnnnnnnnnnnnnnnnnnnnnnnnnnnnnnnnnnnnnnnnnnnnnnnnnnnnnnnnnnnnnnnnnnnnnnnnnnnnnnnnnnnnnnnnnnnnnnnnnnnnnnnnnnnnnnnnnnnnnnnnnnnnnnnnnnnnnnnnnnnnnnnnnnnnnnnnnnnnnnnnnnnnnnnnnnnnnnnnnnnnnnnnnnnnnnnnnnnnnnnnnnnnnnnnnnnnnnnnnnnnnnnnnnnnnnnnnnnnnnnnnnnnnnnnnnnnnnnnnnnnnnnnnnnnnnnnnnnnnnnnnnnnnnnnnnnnnnnnnnnnnnnnnnnnnnnnnnnnnnnnnnnnnnnnnnnnnnnnnnnnnnnnnnnnnnnnnnnnnnnnnnnnnnnnnnnnnnnnnnnnnnnnnnnnnnnnnnnnnnnnnnnnnnnnnnnnnnnnnnnnnnnnnnnnnnnnnnnnnnnnnnnnnnnnnnnnnnnnnnnnnnnnnnnnnnnnnnnnnnnnnnnnnnnnnnnnnnnnnnnnnnnnnnnnnnnnnnnnnnnnnnnnnnnnnnnnnnnnnnnnnnnnnnnnnnnnnnnnnnnnnnnnnnnnnnnnnnnnnnnnnnnnnnnnnnnnnnnnnnnnnnnnnnnnnnnnnnnnnnnnnnnnnnnnnnnnnnnnnnnnnnnnnnnnnnnnnnnnnnnnnnnnnnnnnnnnnnnnnnnnnnnnnnnnnnnnnnnnnnnnnnnnnnnnnnnnnnnnnnnnnnnnnnnnnnnnnnnnnnnnnnnnnnnnnnnnnnnnnnnnnnnnnnnnnnnnnnnnnnnnnnnnnnnnnnnnnnnnnnnnnnnnnnnnnnnnnnnnnnnnnnnnnnnnnnnnnnnnnnnnnnnnnnnnnnnnnnnnnnnnnnnnnnnnnnnnnnnnnnnnnnnnnnnnnnnnnnnnnnnnnnnnnnnnnnnnnnnnnnnnnnnnnnnnnnnnnnnnnnnnnnnnnnnnnnnnnnnnnnnnnnnnnnnnnnnnnnnnnnnnnnnnnnnnnnnnnnnnnnnnnnnnnnnnnnnnnnnnnnnnnnnnnnnnnnnnnnnnnnnnnnnnnnnnnnnnnnnnnnnnnnnnnnnnnnnnnnnnnnnnnnnnnnnnnnnnnnnnnnnnnnnnnnnnnnnnnnnnnnnnnnnnnnnnnnnnnnnnnnnnnnnnnnnnnnnnnnnnnnnnnnnnnnnnnnnnnnnnnnnnnnnnnnnnnnnnnnnnnnnnnnnnnnnnnnnnnnnnnnnnnnnnnnnnnnnnnnnnnnnnnnnnnnnnnnnnnnnnnnnnnnnnnnnnnnnnnnnnnnnnnnnnnnnnnnnnnnnnnnnnnnnnnnnnnnnnnnnnnnnnnnnnnnnnnnnnnnnnnnnnnnnnnnnnnnnnnnnnnnnnnnnnnnnnnnnnnnnnnnnnnnnnnnnnnnnnnnnnnnnnnnnnnnnnnnnnnnnnnnnnnnnnnnnnnnnnnnnnnnnnnnnnnnnnnnnnnnnnnnnnnnnnnnnnnnnnnnnnnnnnnnnnnnnnnnnnnnnnnnnnnnnnnnnnnnnnnnnnnnnnnnnnnnnnnnnnnnnnnnnnnnnnnnnnnnnnnnnnnnnnnnnnnnnnnnnnnnnnnnnnnnnnnnnnnnnnnnnnnnnnnnnnnnnnnnnnnnnnnnnnnnnnnnnnnnnnnnnnnnnnnnnnnnnnnnnnnnnnnnnnnnnnnnnnnnnnnnnnnnnnnnnnnnnnnnnnnnnnnnnnnnnnnnnnnnnnnnnnnnnnnnnnnnnnnnnnnnnnnnnnnnnnnnnnnnnnnnnnnnnnnnnnnnnnnnnnnnnnnnnnnnnnnnnnnnnnnnnnnnnnnnnnnnnnnnnnnnnnnnnnnnnnnnnnnnnnnnnnnnnnnnnnnnnnnnnnnnnnnnnnnnnnnnnnnnnnnnnnnnnnnnnnnnnnnnnnnnnnnnnnnnnnnnnnnnnnnnnnnnnnnnnnnnnnnnnnnnnnnnnnnnnnnnnnnnnnnnnnnnnnnnnnnnnnnnnnnnnnnnnnnnnnnnnnnnnnnnnnnnnnnnnnnnnnnnnnnnnnnnnnnnnnnnnnnnnnnnnnnnnnnnnnnnnnnnnnnnnnnnnnnnnnnnnnnnnnnnnnnnnnnnnnnnnnnnnnnnnnnnnnnnnnnnnnnnnnnnnnnnnnnnnnnnnnnnnnnnnnnnnnnnnnnnnnnnnnnnnnnnnnnnnnnnnnnnnnnnnnnnnnnnnnnnnnnnnnnnnnnnnnnnnnnnnnnnnnnnnnnnnnnnnnnnnnnnnnnnnnnnnnnnnnnnnnnnnnnnnnnnnnnnnnnnnnnnnnnnnnnnnnnnnnnnnnnnnnnnnnnnnnnnnnnnnnnnnnnnnnnnnnnnnnnnnnnnnnnnnnnnnnnnnnnnnnnnnnnnnnnnnnnnnnnnnnnnnnnnnnnnnnnnnnnnnnnnnnnnnnnnnnnnnnnnnnnnnnnnnnnnnnnnnnnnnnnnnnnnnnnnnnnnnnnnnnnnnnnnnnnnnnnnnnnnnnnnnnnnnnnnnnnnnnnnnnnnnnnnnnnnnnnnnnnnnnnnnnnnnnnnnnnnnnnnnnnnnnnnnnnnnnnnnnnnnnnnnnnnnnnnnnnnnnnnnnnnnnnnnnnnnnnnnnnnnnnnnnnnnnnnnnnnnnnnnnnnnnnnnnnnnnnnnnnnnnnnnnnnnnnnnnnnnnnnnnnnnnnnnnnnnnnnnnnnnnnnnnnnnnnnnnnnnnnnnnnnnnnnnnnnnnnnnnnnnnnnnnnnnnnnnnnnnnnnnnnnnnnnnnnnnnnnnnnnnnnnnnnnnnnnnnnnnnnnnnnnnnnnnnnnnnnnnnnnnnnnnnnnnnnnnnnnnnnnnnnnnnnnnnnnnnnnnnnnnnnnnnnnnnnnnnnnnnnnnnnnnnnnnnnnnnnnnnnnnnnnnnnnnnnnnnnnnnnnnnnnnnnnnnnnnnnnnnnnnnnnnnnnnnnnnnnnnnnnnnnnnnnnnnnnnnnnnnnnnnnnnnnnnnnnnnnnnnnnnnnnnnnnnnnnnnnnnnnnnnnnnnnnnnnnnnnnnnnnnnnnnnnnnnnnnnnnnnnnnnnnnnnnnnnnnnnnnnnnnnnnnnnnnnnnnnnnnnnnnnnnnnnnnnnnnnnnnnnnnnnnnnnnnnnnnnnnnnnnnnnnnnnnnnnnnnnnnnnnnnnnnnnnnnnnnnnnnnnnnnnnnnnnnnnnnnnnnnnnnnnnnnnnnnnnnnnnnnnnnnnnnnnnnnnnnnnnnnnnnnnnnnnnnnnnnnnnnnnnnnnnnnnnnnnnnnnnnnnnnnnnnnnnnnnnnnnnnnnnnnnnnnnnnnnnnnnnnnnnnnnnnnnnnnnnnnnnnnnnnnnnnnnnnnnnnnnnnnnnnnnnnnnnnnnnnnnnnnnnnnnnnnnnnnnnnnnnnnnnnnnnnnnnnnnnnnnnnnnnnnnnnnnnnnnnnnnnnnnnnnnnnnnnnnnnnnnnnnnnnnnnnnnnnnnnnnnnnnnnnnnnnnnnnnnnnnnnnnnnnnnnnnnnnnnnnnnnnnnnnnnnnnnnnnnnnnnnnnnnnnnnnnnnnnnnnnnnnnnnnnnnnnnnnnnnnnnnnnnnnnnnnnnnnnnnnnnnnnnnnnnnnnnnnnnnnnnnnnnnnnnnnnnnnnnnnnnnnnnnnnnnnnnnnnnnnnnnnnnnnnnnnnnnnnnnnnnnnnnnnnnnnnnnnnnnnnnnnnnnnnnnnnnnnnnnnnnnnnnnnnnnnnnnnnnnnnnnnnnnnnnnnnnnnnnnnnnnnnnnnnnnnnnnnnnnnnnnnnnnnnnnnnnnnnnnnnnnnnnnnnnnnnnnnnnnnnnnnnnnnnnnnnnnnnnnnnnnnnnnnnnnnnnnnnnnnnnnnnnnnnnnnnnnnnnnnnnnnnnnnnnnnnnnnnnnnnnnnnnnnnnnnnnnnnnnnnnnnnnnnnnnnnnnnnnnnnnnnnnnnnnnnnnnnnnnnnnnnnnnnnnnnnnnnnnnnnnnnnnnnnnnnnnnnnnnnnnnnnnnnnnnnnnnnnnnnnnnnnnnnnnnnnnnnnnnnnnnnnnnnnnnnnnnnnnnnnnnnnnnnnnnnnnnnnnnnnnnnnnnnnnnnnnnnnnnnnnnnnnnnnnnnnnnnnnnnnnnnnnnnnnnnnnnnnnnnnnnnnnnnnnnnnnnnnnnnnnnnnnnnnnnnnnnnnnnnnnnnnnnnnnnnnnnnnnnnnnnnnnnnnnnnnnnnnnnnnnnnnnnnnnnnnnnnnnnnnnnnnnnnnnnnnnnnnnnnnnnnnnnnnnnnnnnnnnnnnnnnnnnnnnnnnnnnnnnnnnnnnnnnnnnnnnnnnnnnnnnnnnnnnnnnnnnnnnnnnnnnnnnnnnnnnnnnnnnnnnnnnnnnnnnnnnnnnnnnnnnnnnnnnnnnnnnnnnnnnnnnnnnnnnnnnnnnnnnnnnnnnnnnnnnnnnnnnnnnnnnnnnnnnnnnnnnnnnnnnnnnnnnnnnnnnnnnnnnnnnnnnnnnnnnnnnnnnnnnnnnnnnnnnnnnnnnnnnnnnnnnnnnnnnnnnnnnnnnnnnnnnnnnnnnnnnnnnnnnnnnnnnnnnnnnnnnnnnnnnnnnnnnnnnnnnnnnnnnnnnnnnnnnnnnnnnnnnnnnnnnnnnnnnnnnnnnnnnnnnnnnnnnnnnnnnnnnnnnnnnnnnnnnnnnnnnnnnnnnnnnnnnnnnnnnnnnnnnnnnnnnnnnnnnnnnnnnnnnnnnnnnnnnnnnnnnnnnnnnnnnnnnnnnnnnnnnnnnnnnnnnnnnnnnnnnnnnnnnnnnnnnnnnnnnnnnnnnnnnnnnnnnnnnnnnnnnnnnnnnnnnnnnnnnnnnnnnnnnnnnnnnnnnnnnnnnnnnnnnnnnnnnnnnnnnnnnnnnnnnnnnnnnnnnnnnnnnnnnnnnnnnnnnnnnnnnnnnnnnnnnnnnnnnnnnnnnnnnnnnnnnnnnnnnnnnnnnnnnnnnnnnnnnnnnnnnnnnnnnnnnnnnnnnnnnnnnnnnnnnnnnnnnnnnnnnnnnnnnnnnnnnnnnnnnnnnnnnnnnnnnnnnnnnnnnnnnnnnnnnnnnnnnnnnnnnnnnnnnnnnnnnnnnnnnnnnnnnnnnnnnnnnnnnnnnnnnnnnnnnnnnnnnnnnnnnnnnnnnnnnnnnnnnnnnnnnnnnnnnnnnnnnnnnnnnnnnnnnnnnnnnnnnnnnnnnnnnnnnnnnnnnnnnnnnnnnnnnnnnnnnnnnnnnnnnnnnnnnnnnnnnnnnnnnnnnnnnnnnnnnnnnnnnnnnnnnnnnnnnnnnnnnnnnnnnnnnnnnnnnnnnnnnnnnnnnnnnnnnnnnnnnnnnnnnnnnnnnnnnnnnnnnnnnnnnnnnnnnnnnnnnnnnnnnnnnnnnnnnnnnnnnnnnnnnnnnnnnnnnnnnnnnnnnnnnnnnnnnnnnnnnnnnnnnnnnnnnnnnnnnnnnnnnnnnnnnnnnnnnnnnnnnnnnnnnnnnnnnnnnnnnnnnnnnnnnnnnnnnnnnnnnnnnnnnnnnnnnnnnnnnnnnnnnnnnnnnnnnnnnnnnnnnnnnnnnnnnnnnnnnnnnnnnnnnnnnnnnnnnnnnnnnnnnnnnnnnnnnnnnnnnnnnnnnnnnnnnnnnnnnnnnnnnnnnnnnnnnnnnnnnnnnnnnnnnnnnnnnnnnnnnnnnnnnnnnnnnnnnnnnnnnnnnnnnnnnnnnnnnnnnnnnnnnnnnnnnnnnnnnnnnnnnnnnnnnnnnnnnnnnnnnnnnnnnnnnnnnnnnnnnnnnnnnnnnnnnnnnnnnnnnnnnnnnnnnnnnnnnnnnnnnnnnnnnnnnnnnnnnnnnnnnnnnnnnnnnnnnnnnnnnnnnnnnnnnnnnnnnnnnnnnnnnnnnnnnnnnnnnnnnnnnnnnnnnnnnnnnnnnnnnnnnnnnnnnnnnnnnnnnnnnnnnnnnnnnnnnnnnnnnnnnnnnnnnnnnnnnnnnnnnnnnnnnnnnnnnnnnnnnnnnnnnnnnnnnnnnnnnnnnnnnnnnnnnnnnnnnnnnnnnnnnnnnnnnnnnnnnnnnnnnnnnnnnnnnnnnnnnnnnnnnnnnnnnnnnnnnnnnnnnnnnnnnnnnnnnnnnnnnnnnnnnnnnnnnnnnnnnnnnnnnnnnnnnnnnnnnnnnnnnnnnnnnnnnnnnnnnnnnnnnnnnnnnnnnnnnnnnnnnnnnnnnnnnnnnnnnnnnnnnnnnnnnnnnnnnnnnnnnnnnnnnnnnnnnnnnnnnnnnnnnnnnnnnnnnnnnnnnnnnnnnnnnnnnnnnnnnnnnnnnnnnnnnnnnnnnnnnnnnnnnnnnnnnnnnnnnnnnnnnnnnnnnnnnnnnnnnnnnnnnnnnnnnnnnnnnnnnnnnnnnnnnnnnnnnnnnnnnnnnnnnnnnnnnnnnnnnnnnnnnnnnnnnnnnnnnnnnnnnnnnnnnnnnnnnnnnnnnnnnnnnnnnnnnnnnnnnnnnnnnnnnnnnnnnnnnnnnnnnnnnnnnnnnnnnnnnnnnnnnnnnnnnnnnnnnnnnnnnnnnnnnnnnnnnnnnnnnnnnnnnnnnnnnnnnnnnnnnnnnnnnnnnnnnnnnnnnnnnnnnnnnnnnnnnnnnnnnnnnnnnnnnnnnnnnnnnnnnnnnnnnnnnnnnnnnnnnnnnnnnnnnnnnnnnnnnnnnnnnnnnnnnnnnnnnnnnnnnnnnnnnnnnnnnnnnnnnnnnnnnnnnnnnnnnnnnnnnnnnnnnnnnnnnnnnnnnnnnnnnnnnnnnnnnnnnnnnnnnnnnnnnnnnnnnnnnnnnnnnnnnnnnnnnnnnnnnnnnnnnnnnnnnnnnnnnnnnnnnnnnnnnnnnnnnnnnnnnnnnnnnnnnnnnnnnnnnnnnnnnnnnnnnnnnnnnnnnnnnnnnnnnnnnnnnnnnnnnnnnnnnnnnnnnnnnnnnnnnnnnnnnnnnnnnnnnnnnnnnnnnnnnnnnnnnnnnnnnnnnnnnnnnnnnnnnnnnnnnnnnnnnnnnnnnnnnnnnnnnnnnnnnnnnnnnnnnnnnnnnnnnnnnnnnnnnnnnnnnnnnnnnnnnnnnnnnnnnnnnnnnnnnnnnnnnnnnnnnnnnnnnnnnnnnnnnnnnnnnnnnnnnnnnnnnnnnnnnnnnnnnnnnnnnnnnnnnnnnnnnnnnnnnnnnnnnnnnnnnnnnnnnnnnnnnnnnnnnnnnnnnnnnnnnnnnnnnnnnnnnnnnnnnnnnnnnnnnnnnnnnnnnnnnnnnnnnnnnnnnnnnnnnnnnnnnnnnnnnnnnnnnnnnnnnnnnnnnnnnnnnnnnnnnnnnnnnnnnnnnnnnnnnnnnnnnnnnnnnnnnnnnnnnnnnnnnnnnnnnnnnnnnnnnnnnnnnnnnnnnnnnnnnnnnnnnnnnnnnnnnnnnnnnnnnnnnnnnnnnnnnnnnnnnnnnnnnnnnnnnnnnnnnnnnnnnnnnnnnnnnnnnnnnnnnnnnnnnnnnnnnnnnnnnnnnnnnnnnnnnnnnnnnnnnnnnnnnnnnnnnnnnnnnnnnnnnnnnnnnnnnnnnnnnnnnnnnnnnnnnnnnnnnnnnnnnnnnnnnnnnnnnnnnnnnnnnnnnnnnnnnnnnnnnnnnnnnnnnnnnnnnnnnnnnnnnnnnnnnnnnnnnnnnnnnnnnnnnnnnnnnnnnnnnnnnnnnnnnnnnnnnnnnnnnnnnnnnnnnnnnnnnnnnnnnnnnnnnnnnnnnnnnnnnnnnnnnnnnnnnnnnnnnnnnnnnnnnnnnnnnnnnnnnnnnnnnnnnnnnnnnnnnnnnnnnnnnnnnnnnnnnnnnnnnnnnnnnnnnnnnnnnnnnnnnnnnnnnnnnnnnnnnnnnnnnnnnnnnnnnnnnnnnnnnnnnnnnnnnnnnnnnnnnnnnnnnnnnnnnnnnnnnnnnnnnnnnnnnnnnnnnnnnnnnnnnnnnnnnnnnnnnnnnnnnnnnnnnnnnnnnnnnnnnnnnnnnnnnnnnnnnnnnnnnnnnnnnnnnnnnnnnnnnnnnnnnnnnnnnnnnnnnnnnnnnnnnnnnnnnnnnnnnnnnnnnnnnnnnnnnnnnnnnnnnnnnnnnnnnnnnnnnnnnnnnnnnnnnnnnnnnnnnnnnnnnnnnnnnnnnnnnnnnnnnnnnnnnnnnnnnnnnnnnnnnnnnnnnnnnnnnnnnnnnnnnnnnnnnnnnnnnnnnnnnnnnnnnnnnnnnnnnnnnnnnnnnnnnnnnnnnnnnnnnnnnnnnnnnnnnnnnnnnnnnnnnnnnnnnnnnnnnnnnnnnnnnnnnnnnnnnnnnnnnnnnnnnnnnnnnnnnnnnnnnnnnnnnnnnnnnnnnnnnnnnnnnnnnnnnnnnnnnnnnnnnnnnnnnnnnnnnnnnnnnnnnnnnnnnnnnnnnnnnnnnnnnnnnnnnnnnnnnnnnnnnnnnnnnnnnnnnnnnnnnnnnnnnnnnnnnnnnnnnnnnnnnnnnnnnnnnnnnnnnnnnnnnnnnnnnnnnnnnnnnnnnnnnnnnnnnnnnnnnnnnnnnnnnnnnnnnnnnnnnnnnnnnnnnnnnnnnnnnnnnnnnnnnnnnnnnnnnnnnnnnnnnnnnnnnnnnnnnnnnnnnnnnnnnnnnnnnnnnnnnnnnnnnnnnnnnnnnnnnnnnnnnnnnnnnnnnnnnnnnnnnnnnnnnnnnnnnnnnnnnnnnnnnnnnnnnnnnnnnnnnnnnnnnnnnnnnnnnnnnnnnnnnnnnnnnnnnnnnnnnnnnnnnnnnnnnnnnnnnnnnnnnnnnnnnnnnnnnnnnnnnnnnnnnnnnnnnnnnnnnnnnnnnnnnnnnnnnnnnnnnnnnnnnnnnnnnnnnnnnnnnnnnnnnnnnnnnnnnnnnnnnnnnnnnnnnnnnnnnnnnnnnnnnnnnnnnnnnnnnnnnnnnnnnnnnnnnnnnnnnnnnnnnnnnnnnnnnnnnnnnnnnnnnnnnnnnnnnnnnnnnnnnnnnnnnnnnnnnnnnnnnnnnnnnnnnnnnnnnnnnnnnnnnnnnnnnnnnnnnnnnnnnnnnnnnnnnnnnnnnnnnnnnnnnnnnnnnnnnnnnnnnnnnnnnnnnnnnnnnnnnnnnnnnnnnnnnnnnnnnnnnnnnnnnnnnnnnnnnnnnnnnnnnnnnnnnnnnnnnnnnnnnnnnnnnnnnnnnnnnnnnnnnnnnnnnnnnnnnnnnnnnnnnnnnnnnnnnnnnnnnnnnnnnnnnnnnnnnnnnnnnnnnnnnnnnnnnnnnnnnnnnnnnnnnnnnnnnnnnnnnnnnnnnnnnnnnnnnnnnnnnnnnnnnnnnnnnnnnnnnnnnnnnnnnnnnnnnnnnnnnnnnnnnnnnnnnnnnnnnnnnnnnnnnnnnnnnnnnnnnnnnnnnnnnnnnnnnnnnnnnnnnnnnnnnnnnnnnnnnnnnnnnnnnnnnnnnnnnnnnnnnnnnnnnnnnnnnnnnnnnnnnnnnnnnnnnnnnnnnnnnnnnnnnnnnnnnnnnnnnnnnnnnnnnnnnnnnnnnnnnnnnnnnnnnnnnnnnnnnnnnnnnnnnnnnnnnnnnnnnnnnnnnnnnnnnnnnnnnnnnnnnnnnnnnnnnnnnnnnnnnnnnnnnnnnnnnnnnnnnnnnnnnnnnnnnnnnnnnnnnnnnnnnnnnnnnnnnnnnnnnnnnnnnnnnnnnnnnnnnnnnnnnnnnnnnnnnnnnnnnnnnnnnnnnnnnnnnnnnnnnnnnnnnnnnnnnnnnnnnnnnnnnnnnnnnnnnnnnnnnnnnnnnnnnnnnnnnnnnnnnnnnnnnnnnnnnnnnnnnnnnnnnnnnnnnnnnnnnnnnnnnnnnnnnnnnnnnnnnnnnnnnnnnnnnnnnnnnnnnnnnnnnnnnnnnnnnnnnnnnnnnnnnnnnnnnnnnnnnnnnnnnnnnnnnnnnnnnnnnnnnnnnnnnnnnnnnnnnnnnnnnnnnnnnnnnnnnnnnnnnnnnnnnnnnnnnnnnnnnnnnnnnnnnnnnnnnnnnnnnnnnnnnnnnnnnnnnnnnnnnnnnnnnnnnnnnnnnnnnnnnnnnnnnnnnnnnnnnnnnnnnnnnnnnnnnnnnnnnnnnnnnnnnnnnnnnnnnnnnnnnnnnnnnnnnnnnnnnnnnnnnnnnnnnnnnnnnnnnnnnnnnnnnnnnnnnnnnnnnnnnnnnnnnnnnnnnnnnnnnnnnnnnnnnnnnnnnnnnnnnnnnnnnnnnnnnnnnnnnnnnnnnnnnnnnnnnnnnnnnnnnnnnnnnnnnnnnnnnnnnnnnnnnnnnnnnnnnnnnnnnnnnnnnnnnnnnnnnnnnnnnnnnnnnnnnnnnnnnnnnnnnnnnnnnnnnnnnnnnnnnnnnnnnnnnnnnnnnnnnnnnnnnnnnnnnnnnnnnnnnnnnnnnnnnnnnnnnnnnnnnnnnnnnnnnnnnnnnnnnnnnnnnnnnnnnnnnnnnnnnnnnnnnnnnnnnnnnnnnnnnnnnnnnnnnnnnnnnnnnnnnnnnnnnnnnnnnnnnnnnnnnnnnnnnnnnnnnnnnnnnnnnnnnnnnnnnnnnnnnnnnnnnnnnnnnnnnnnnnnnnnnnnnnnnnnnnnnnnnnnnnnnnnnnnnnnnnnnnnnnnnnnnnnnnnnnnnnnnnnnnnnnnnnnnnnnnnnnnnnnnnnnnnnnnnnnnnnnnnnnnnnnnnnnnnnnnnnnnnnnnnnnnnnnnnnnnnnnnnnnnnnnnnnnnnnnnnnnnnnnnnnnnnnnnnnnnnnnnnnnnnnnnnnnnnnnnnnnnnnnnnnnnnnnnnnnnnnnnnnnnnnnnnnnnnnnnnnnnnnnnnnnnnnnnnnnnnnnnnnnnnnnnnnnnnnnnnnnnnnnnnnnnnnnnnnnnnnnnnnnnnnnnnnnnnnnnnnnnnnnnnnnnnnnnnnnnnnnnnnnnnnnnnnnnnnnnnnnnnnnnnnnnnnnnnnnnnnnnnnnnnnnnnnnnnnnnnnnnnnnnnnnnnnnnnnnnnnnnnnnnnnnnnnnnnnnnnnnnnnnnnnnnnnnnnnnnnnnnnnnnnnnnnnnnnnnnnnnnnnnnnnnnnnnnnnnnnnnnnnnnnnnnnnnnnnnnnnnnnnnnnnnnnnnnnnnnnnnnnnnnnnnnnnnnnnnnnnnnnnnnnnnnnnnnnnnnnnnnnnnnnnnnnnnnnnnnnnnnnnnnnnnnnnnnnnnnnnnnnnnnnnnnnnnnnnnnnnnnnnnnnnnnnnnnnnnnnnnnnnnnnnnnnnnnnnnnnnnnnnnnnnnnnnnnnnnnnnnnnnnnnnnnnnnnnnnnnnnnnnnnnnnnnnnnnnnnnnnnnnnnnnnnnnnnnnnnnnnnnnnnnnnnnnnnnnnnnnnnnnnnnnnnnnnnnnnnnnnnnnnnnnnnnnnnnnnnnnnnnnnnnnnnnnnnnnnnnnnnnnnnnnnnnnnnnnnnnnnnnnnnnnnnnnnnnnnnnnnnnnnnnnnnnnnnnnnnnnnnnnnnnnnnnnnnnnnnnnnnnnnnnnnnnnnnnnnnnnnnnnnnnnnnnnnnnnnnnnnnnnnnnnnnnnnnnnnnnnnnnnnnnnnnnnnnnnnnnnnnnnnnnnnnnnnnnnnnnnnnnnnnnnnnnnnnnnnnnnnnnnnnnnnnnnnnnnnnnnnnnnnnnnnnnnnnnnnnnnnnnnnnnnnnnnnnnnnnnnnnnnnnnnnnnnnnnnnnnnnnnnnnnnnnnnnnnnnnnnnnnnnnnnnnnnnnnnnnnnnnnnnnnnnnnnnnnnnnnnnnnnnnnnnnnnnnnnnnnnnnnnnnnnnnnnnnnnnnnnnnnnnnnnnnnnnnnnnnnnnnnnnnnnnnnnnnnnnnnnnnnnnnnnnnnnnnnnnnnnnnnnnnnnnnnnnnnnnnnnnnnnnnnnnnnnnnnnnnnnnnnnnnnnnnnnnnnnnnnnnnnnnnnnnnnnnnnnnnnnnnnnnnnnnnnnnnnnnnnnnnnnnnnnnnnnnnnnnnnnnnnnnnnnnnnnnnnnnnnnnnnnnnnnnnnnnnnnnnnnnnnnnnnnnnnnnnnnnnnnnnnnnnnnnnnnnnnnnnnnnnnnnnnnnnnnnnnnnnnnnnnnnnnnnnnnnnnnnnnnnnnnnnnnnnnnnnnnnnnnnnnnnnnnnnnnnnnnnnnnnnnnnnnnnnnnnnnnnnnnnnnnnnnnnnnnnnnnnnnnnnnnnnnnnnnnnnnnnnnnnnnnnnnnnnnnnnnnnnnnnnnnnnnnnnnnnnnnnnnnnnnnnnnnnnnnnnnnnnnnnnnnnnnnnnnnnnnnnnnnnnnnnnnnnnnnnnnnnnnnnnnnnnnnnnnnnnnnnnnnnnnnnnnnnnnnnnnnnnnnnnnnnnnnnnnnnnnnnnnnnnnnnnnnnnnnnnnnnnnnnnnnnnnnnnnnnnnnnnnnnnnnnnnnnnnnnnnnnnnnnnnnnnnnnnnnnnnnnnnnnnnnnnnnnnnnnnnnnnnnnnnnnnnnnnnnnnnnnnnnnnnnnnnnnnnnnnnnnnnnnnnnnnnnnnnnnnnnnnnnnnnnnnnnnnnnnnnnnnnnnnnnnnnnnnnnnnnnnnnnnnnnnnnnnnnnnnnnnnnnnnnnnnnnnnnnnnnnnnnnnnnnnnnnnnnnnnnnnnnnnnnnnnnnnnnnnnnnnnnnnnnnnnnnnnnnnnnnnnnnnnnnnnnnnnnnnnnnnnnnnnnnnnnnnnnnnnnnnnnnnnnnnnnnnnnnnnnnnnnnnnnnnnnnnnnnnnnnnnnnnnnnnnnnnnnnnnnnnnnnnnnnnnnnnnnnnnnnnnnnnnnnnnnnnnnnnnnnnnnnnnnnnnnnnnnnnnnnnnnnnnnnnnnnnnnnnnnnnnnnnnnnnnnnnnnnnnnnnnnnnnnnnnnnnnnnnnnnnnnnnnnnnnnnnnnnnnnnnnnnnnnnnnnnnnnnnnnnnnnnnnnnnnnnnnnnnnnnnnnnnnnnnnnnnnnnnnnnnnnnnnnnnnnnnnnnnnnnnnnnnnnnnnnnnnnnnnnnnnnnnnnnnnnnnnnnnnnnnnnnnnnnnnnnnnnnnnnnnnnnnnnnnnnnnnnnnnnnnnnnnnnnnnnnnnnnnnnnnnnnnnnnnnnnnnnnnnnnnnnnnnnnnnnnnnnnnnnnnnnnnnnnnnnnnnnnnnnnnnnnnnnnnnnnnnnnnnnnnnnnnnnnnnnnnnnnnnnnnnnnnnnnnnnnnnnnnnnnnnnnnnnnnnnnnnnnnnnnnnnnnnnnnnnnnnnnnnnnnnnnnnnnnnnnnnnnnnnnnnnnnnnnnnnnnnnnnnnnnnnnnnnnnnnnnnnnnnnnnnnnnnnnnnnnnnnnnnnnnnnnnnnnnnnnnnnnnnnnnnnnnnnnnnnnnnnnnnnnnnnnnnnnnnnnnnnnnnnnnnnnnnnnnnnnnnnnnnnnnnnnnnnnnnnnnnnnnnnnnnnnnnnnnnnnnnnnnnnnnnnnnnnnnnnnnnnnnnnnnnnnnnnnnnnnnnnnnnnnnnnnnnnnnnnnnnnnnnnnnnnnnnnnnnnnnnnnnnnnnnnnnnnnnnnnnnnnnnnnnnnnnnnnnnnnnnnnnnnnnnnnnnnnnnnnnnnnnnnnnnnnnnnnnnnnnnnnnnnnnnnnnnnnnnnnnnnnnnnnnnnnnnnnnnnnnnnnnnnnnnnnnnnnnnnnnnnnnnnnnnnnnnnnnnnnnnnnnnnnnnnnnnnnnnnnnnnnnnnnnnnnnnnnnnnnnnnnnnnnnnnnnnnnnnnnnnnnnnnnnnnnnnnnnnnnnnnnnnnnnnnnnnnnnnnnnnnnnnnnnnnnnnnnnnnnnnnnnnnnnnnnnnnnnnnnnnnnnnnnnnnnnnnnnnnnnnnnnnnnnnnnnnnnnnnnnnnnnnnnnnnnnnnnnnnnnnnnnnnnnnnnnnnnnnnnnnnnnnnnnnnnnnnnnnnnnnnnnnnnnnnnnnnnnnnnnnnnnnnnnnnnnnnnnnnnnnnnnnnnnnnnnnnnnnnnnnnnnnnnnnnnnnnnnnnnnnnnnnnnnnnnnnnnnnnnnnnnnnnnnnnnnnnnnnnnnnnnnnnnnnnnnnnnnnnnnnnnnnnnnnnnnnnnnnnnnnnnnnnnnnnnnnnnnnnnnnnnnnnnnnnnnnnnnnnnnnnnnnnnnnnnnnnnnnnnnnnnnnnnnnnnnnnnnnnnnnnnnnnnnnnnnnnnnnnnnnnnnnnnnnnnnnnnnnnnnnnnnnnnnnnnnnnnnnnnnnnnnnnnnnnnnnnnnnnnnnnnnnnnnnnnnnnnnnnnnnnnnnnnnnnnnnnnnnnnnnnnnnnnnnnnnnnnnnnnnnnnnnnnnnnnnnnnnnnnnnnnnnnnnnnnnnnnnnnnnnnnnnnnnnnnnnnnnnnnnnnnnnnnnnnnnnnnnnnnnnnnnnnnnnnnnnnnnnnnnnnnnnnnnnnnnnnnnnnnnnnnnnnnnnnnnnnnnnnnnnnnnnnnnnnnnnnnnnnnnnnnnnnnnnnnnnnnnnnnnnnnnnnnnnnnnnnnnnnnnnnnnnnnnnnnnnnnnnnnnnnnnnnnnnnnnnnnnnnnnnnnnnnnnnnnnnnnnnnnnnnnnnnnnnnnnnnnnnnnnnnnnnnnnnnnnnnnnnnnnnnnnnnnnnnnnnnnnnnnnnnnnnnnnnnnnnnnnnnnnnnnnnnnnnnnnnnnnnnnnnnnnnnnnnnnnnnnnnnnnnnnnnnnnnnnnnnnnnnnnnnnnnnnnnnnnnnnnnnnnnnnnnnnnnnnnnnnnnnnnnnnnnnnnnnnnnnnnnnnnnnnnnnnnnnnnnnnnnnnnnnnnnnnnnnnnnnnnnnnnnnnnnnnnnnnnnnnnnnnnnnnnnnnnnnnnnnnnnnnnnnnnnnnnnnnnnnnnnnnnnnnnnnnnnnnnnnnnnnnnnnnnnnnnnnnnnnnnnnnnnnnnnnnnnnnnnnnnnnnnnnnnnnnnnnnnnnnnnnnnnnnnnnnnnnnnnnnnnnnnnnnnnnnnnnnnnnnnnnnnnnnnnnnnnnnnnnnnnnnnnnnnnnnnnnnnnnnnnnnnnnnnnnnnnnnnnnnnnnnnnnnnnnnnnnnnnnnnnnnnnnnnnnnnnnnnnnnnnnnnnnnnnnnnnnnnnnnnnnnnnnnnnnnnnnnnnnnnnnnnnnnnnnnnnnnnnnnnnnnnnnnnnnnnnnnnnnnnnnnnnnnnnnnnnnnnnnnnnnnnnnnnnnnnnnnnnnnnnnnnnnnnnnnnnnnnnnnnnnnnnnnnnnnnnnnnnnnnnnnnnnnnnnnnnnnnnnnnnnnnnnnnnnnnnnnnnnnnnnnnnnnnnnnnnnnnnnnnnnnnnnnnnnnnnnnnnnnnnnnnnnnnnnnnnnnnnnnnnnnnnnnnnnnnnnnnnnnnnnnnnnnnnnnnnnnnnnnnnnnnnnnnnnnnnnnnnnnnnnnnnnnnnnnnnnnnnnnnnnnnnnnnnnnnnnnnnnnnnnnnnnnnnnnnnnnnnnnnnnnnnnnnnnnnnnnnnnnnnnnnnnnnnnnnnnnnnnnnnnnnnnnnnnnnnnnnnnnnnnnnnnnnnnnnnnnnnnnnnnnnnnnnnnnnnnnnnnnnnnnnnnnnnnnnnnnnnnnnnnnnnnnnnnnnnnnnnnnnnnnnnnnnnnnnnnnnnnnnnnnnnnnnnnnnnnnnnnnnnnnnnnnnnnnnnnnnnnnnnnnnnnnnnnnnnnnnnnnnnnnnnnnnnnnnnnnnnnnnnnnnnnnnnnnnnnnnnnnnnnnnnnnnnnnnnnnnnnnnnnnnnnnnnnnnnnnnnnnnnnnnnnnnnnnnnnnnnnnnnnnnnnnnnnnnnnnnnnnnnnnnnnnnnnnnnnnnnnnnnnnnnnnnnnnnnnnnnnnnnnnnnnnnnnnnnnnnnnnnnnnnnnnnnnnnnnnnnnnnnnnnnnnnnnnnnnnnnnnnnnnnnnnnnnnnnnnnnnnnnnnnnnnnnnnnnnnnnnnnnnnnnnnnnnnnnnnnnnnnnnnnnnnnnnnnnnnnnnnnnnnnnnnnnnnnnnnnnnnnnnnnnnnnnnnnnnnnnnnnnnnnnnnnnnnnnnnnnnnnnnnnnnnnnnnnnnnnnnnnnnnnnnnnnnnnnnnnnnnnnnnnnnnnnnnnnnnnnnnnnnnnnnnnnnnnnnnnnnnnnnnnnnnnnnnnnnnnnnnnnnnnnnnnnnnnnnnnnnnnnnnnnnnnnnnnnnnnnnnnnnnnnnnnnnnnnnnnnnnnnnnnnnnnnnnnnnnnnnnnnnnnnnnnnnnnnnnnnnnnnnnnnnnnnnnnnnnnnnnnnnnnnnnnnnnnnnnnnnnnnnnnnnnnnnnnnnnnnnnnnnnnnnnnnnnnnnnnnnnnnnnnnnnnnnnnnnnnnnnnnnnnnnnnnnnnnnnnnnnnnnnnnnnnnnnnnnnnnnnnnnnnnnnnnnnnnnnnnnnnnnnnnnnnnnnnnnnnnnnnnnnnnnnnnnnnnnnnnnnnnnnnnnnnnnnnnnnnnnnnnnnnnnnnnnnnnnnnnnnnnnnnnnnnnnnnnnnnnnnnnnnnnnnnnnnnnnnnnnnnnnnnnnnnnnnnnnnnnnnnnnnnnnnnnnnnnnnnnnnnnnnnnnnnnnnnnnnnnnnnnnnnnnnnnnnnnnnnnnnnnnnnnnnnnnnnnnnnnnnnnnnnnnnnnnnnnnnnnnnnnnnnnnnnnnnnnnnnnnnnnnnnnnnnnnnnnnnnnnnnnnnnnnnnnnnnnnnnnnnnnnnnnnnnnnnnnnnnnnnnnnnnnnnnnnnnnnnnnnnnnnnnnnnnnnnnnnnnnnnnnnnnnnnnnnnnnnnnnnnnnnnnnnnnnnnnnnnnnnnnnnnnnnnnnnnnnnnnnnnnnnnnnnnnnnnnnnnnnnnnnnnnnnnnnnnnnnnnnnnnnnnnnnnnnnnnnnnnnnnnnnnnnnnnnnnnnnnnnnnnnnnnnnnnnnnnnnnnnnnnnnnnnnnnnnnnnnnnnnnnnnnnnnnnnnnnnnnnnnnnnnnnnnnnnnnnnnnnnnnnnnnnnnnnnnnnnnnnnnnnnnnnnnnnnnnnnnnnnnnnnnnnnnnnnnnnnnnnnnnnnnnnnnnnnnnnnnnnnnnnnnnnnnnnnnnnnnnnnnnnnnnnnnnnnnnnnnnnnnnnnnnnnnnnnnnnnnnnnnnnnnnnnnnnnnnnnnnnnnnnnnnnnnnnnnnnnnnnnnnnnnnnnnnnnnnnnnnnnnnnnnnnnnnnnnnnnnnnnnnnnnnnnnnnnnnnnnnnnnnnnnnnnnnnnnnnnnnnnnnnnnnnnnnnnnnnnnnnnnnnnnnnnnnnnnnnnnnnnnnnnnnnnnnnnnnnnnnnnnnnnnnnnnnnnnnnnnnnnnnnnnnnnnnnnnnnnnnnnnnnnnnnnnnnnnnnnnnnnnnnnnnnnnnnnnnnnnnnnnnnnnnnnnnnnnnnnnnnnnnnnnnnnnnnnnnnnnnnnnnnnnnnnnnnnnnnnnnnnnnnnnnnnnnnnnnnnnnnnnnnnnnnnnnnnnnnnnnnnnnnnnnnnnnnnnnnnnnnnnnnnnnnnnnnnnnnnnnnnnnnnnnnnnnnnnnnnnnnnnnnnnnnnnnnnnnnnnnnnnnnnnnnnnnnnnnnnnnnnnnnnnnnnnnnnnnnnnnnnnnnnnnnnnnnnnnnnnnnnnnnnnnnnnnnnnnnnnnnnnnnnnnnnnnnnnnnnnnnnnnnnnnnnnnnnnnnnnnnnnnnnnnnnnnnnnnnnnnnnnnnnnnnnnnnnnnnnnnnnnnnnnnnnnnnnnnnnnnnnnnnnnnnnnnnnnnnnnnnnnnnnnnnnnnnnnnnnnnnnnnnnnnnnnnnnnnnnnnnnnnnnnnnnnnnnnnnnnnnnnnnnnnnnnnnnnnnnnnnnnnnnnnnnnnnnnnnnnnnnnnnnnnnnnnnnnnnnnnnnnnnnnnnnnnnnnnnnnnnnnnnnnnnnnnnnnnnnnnnnnnnnnnnnnnnnnnnnnnnnnnnnnnnnnnnnnnnnnnnnnnnnnnnnnnnnnnnnnnnnnnnnnnnnnnnnnnnnnnnnnnnnnnnnnnnnnnnnnnnnnnnnnnnnnnnnnnnnnnnnnnnnnnnnnnnnnnnnnnnnnnnnnnnnnnnnnnnnnnnnnnnnnnnnnnnnnnnnnnnnnnnnnnnnnnnnnnnnnnnnnnnnnnnnnnnnnnnnnnnnnnnnnnnnnnnnnnnnnnnnnnnnnnnnnnnnnnnnnnnnnnnnnnnnnnnnnnnnnnnnnnnnnnnnnnnnnnnnnnnnnnnnnnnnnnnnnnnnnnnnnnnnnnnnnnnnnnnnnnnnnnnnnnnnnnnnnnnnnnnnnnnnnnnnnnnnnnnnnnnnnnnnnnnnnnnnnnnnnnnnnnnnnnnnnnnnnnnnnnnnnnnnnnnnnnnnnnnnnnnnnnnnnnnnnnnnnnnnnnnnnnnnnnnnnnnnnnnnnnnnnnnnnnnnnnnnnnnnnnnnnnnnnnnnnnnnnnnnnnnnnnnnnnnnnnnnnnnnnnnnnnnnnnnnnnnnnnnnnnnnnnnnnnnnnnnnnnnnnnnnnnnnnnnnnnnnnnnnnnnnnnnnnnnnnnnnnnnnnnnnnnnnnnnnnnnnnnnnnnnnnnnnnnnnnnnnnnnnnnnnnnnnnnnnnnnnnnnnnnnnnnnnnnnnnnnnnnnnnnnnnnnnnnnnnnnnnnnnnnnnnnnnnnnnnnnnnnnnnnnnnnnnnnnnnnnnnnnnnnnnnnnnnnnnnnnnnnnnnnnnnnnnnnnnnnnnnnnnnnnnnnnnnnnnnnnnnnnnnnnnnnnnnnnnnnnnnnnnnnnnnnnnnnnnnnnnnnnnnnnnnnnnnnnnnnnnnnnnnnnnnnnnnnnnnnnnnnnnnnnnnnnnnnnnnnnnnnnnnnnnnnnnnnnnnnnnnnnnnnnnnnnnnnnnnnnnnnnnnnnnnnnnnnnnnnnnnnnnnnnnnnnnnnnnnnnnnnnnnnnnnnnnnnnnnnnnnnnnnnnnnnnnnnnnnnnnnnnnnnnnnnnnnnnnnnnnnnnnnnnnnnnnnnnnnnnnnnnnnnnnnnnnnnnnnnnnnnnnnnnnnnnnnnnnnnnnnnnnnnnnnnnnnnnnnnnnnnnnnnnnnnnnnnnnnnnnnnnnnnnnnnnnnnnnnnnnnnnnnnnnnnnnnnnnnnnnnnnnnnnnnnnnnnnnnnnnnnnnnnnnnnnnnnnnnnnnnnnnnnnnnnnnnnnnnnnnnnnnnnnnnnnnnnnnnnnnnnnnnnnnnnnnnnnnnnnnnnnnnnnnnnnnnnnnnnnnnnnnnnnnnnnnnnnnnnnnnnnnnnnnnnnnnnnnnnnnnnnnnnnnnnnnnnnnnnnnnnnnnnnnnnnnnnnnnnnnnnnnnnnnnnnnnnnnnnnnnnnnnnnnnnnnnnnnnnnnnnnnnnnnnnnnnnnnnnnnnnnnnnnnnnnnnnnnnnnnnnnnnnnnnnnnnnnnnnnnnnnnnnnnnnnnnnnnnnnnnnnnnnnnnnnnnnnnnnnnnnnnnnnnnnnnnnnnnnnnnnnnnnnnnnnnnnnnnnnnnnnnnnnnnnnnnnnnnnnnnnnnnnnnnnnnnnnnnnnnnnnnnnnnnnnnnnnnnnnnnnnnnnnnnnnnnnnnnnnnnnnnnnnnnnnnnnnnnnnnnnnnnnnnnnnnnnnnnnnnnnnnnnnnnnnnnnnnnnnnnnnnnnnnnnnnnnnnnnnnnnnnnnnnnnnnnnnnnnnnnnnnnnnnnnnnnnnnnnnnnnnnnnnnnnnnnnnnnnnnnnnnnnnnnnnnnnnnnnnnnnnnnnnnnnnnnnnnnnnnnnnnnnnnnnnnnnnnnnnnnnnnnnnnnnnnnnnnnnnnnnnnnnnnnnnnnnnnnnnnnnnnnnnnnnnnnnnnnnnnnnnnnnnnnnnnnnnnnnnnnnnnnnnnnnnnnnnnnnnnnnnnnnnnnnnnnnnnnnnnnnnnnnnnnnnnnnnnnnnnnnnnnnnnnnnnnnnnnnnnnnnnnnnnnnnnnnnnnnnnnnnnnnnnnnnnnnnnnnnnnnnnnnnnnnnnnnnnnnnnnnnnnnnnnnnnnnnnnnnnnnnnnnnnnnnnnnnnnnnnnnnnnnnnnnnnnnnnnnnnnnnnnnnnnnnnnnnnnnnnnnnnnnnnnnnnnnnnnnnnnnnnnnnnnnnnnnnnnnnnnnnnnnnnnnnnnnnnnnnnnnnnnnnnnnnnnnnnnnnnnnnnnnnnnnnnnnnnnnnnnnnnnnnnnnnnnnnnnnnnnnnnnnnnnnnnnnnnnnnnnnnnnnnnnnnnnnnnnnnnnnnnnnnnnnnnnnnnnnnnnnnnnnnnnnnnnnnnnnnnnnnnnnnnnnnnnnnnnnnnnnnnnnnnnnnnnnnnnnnnnnnnnnnnnnnnnnnnnnnnnnnnnnnnnnnnnnnnnnnnnnnnnnnnnnnnnnnnnnnnnnnnnnnnnnnnnnnnnnnnnnnnnnnnnnnnnnnnnnnnnnnnnnnnnnnnnnnnnnnnnnnnnnnnnnnnnnnnnnnnnnnnnnnnnnnnnnnnnnnnnnnnnnnnnnnnnnnnnnnnnnnnnnnnnnnnnnnnnnnnnnnnnnnnnnnnnnnnnnnnnnnnnnnnnnnnnnnnnnnnnnnnnnnnnnnnnnnnnnnnnnnnnnnnnnnnnnnnnnnnnnnnnnnnnnnnnnnnnnnnnnnnnnnnnnnnnnnnnnnnnnnnnnnnnnnnnnnnnnnnnnnnnnnnnnnnnnnnnnnnnnnnnnnnnnnnnnnnnnnnnnnnnnnnnnnnnnnnnnnnnnnnnnnnnnnnnnnnnnnnnnnnnnnnnnnnnnnnnnnnnnnnnnnnnnnnnnnnnnnnnnnnnnnnnnnnnnnnnnnnnnnnnnnnnnnnnnnnnnnnnnnnnnnnnnnnnnnnnnnnnnnnnnnnnnnnnnnnnnnnnnnnnnnnnnnnnnnnnnnnnnnnnnnnnnnnnnnnnnnnnnnnnnnnnnnnnnnnnnnnnnnnnnnnnnnnnnnnnnnnnnnnnnnnnnnnnnnnnnnnnnnnnnnnnnnnnnnnnnnnnnnnnnnnnnnnnnnnnnnnnnnnnnnnnnnnnnnnnnnnnnnnnnnnnnnnnnnnnnnnnnnnnnnnnnnnnnnnnnnnnnnnnnnnnnnnnnnnnnnnnnnnnnnnnnnnnnnnnnnnnnnnnnnnnnnnnnnnnnnnnnnnnnnnnnnnnnnnnnnnnnnnnnnnnnnnnnnnnnnnnnnnnnnnnnnnnnnnnnnnnnnnnnnnnnnnnnnnnnnnnnnnnnnnnnnnnnnnnnnnnnnnnnnnnnnnnnnnnnnnnnnnnnnnnnnnnnnnnnnnnnnnnnnnnnnnnnnnnnnnnnnnnnnnnnnnnnnnnnnnnnnnnnnnnnnnnnnnnnnnnnnnnnnnnnnnnnnnnnnnnnnnnnnnnnnnnnnnnnnnnnnnnnnnnnnnnnnnnnnnnnnnnnnnnnnnnnnnnnnnnnnnnnnnnnnnnnnnnnnnnnnnnnnnnnnnnnnnnnnnnnnnnnnnnnnnnnnnnnnnnnnnnnnnnnnnnnnnnnnnnnnnnnnnnnnnnnnnnnnnnnnnnnnnnnnnnnnnnnnnnnnnnnnnnnnnnnnnnnnnnnnnnnnnnnnnnnnnnnnnnnnnnnnnnnnnnnnnnnnnnnnnnnnnnnnnnnnnnnnnnnnnnnnnnnnnnnnnnnnnnnnnnnnnnnnnnnnnnnnnnnnnnnnnnnnnnnnnnnnnnnnnnnnnnnnnnnnnnnnnnnnnnnnnnnnnnnnnnnnnnnnnnnnnnnnnnnnnnnnnnnnnnnnnnnnnnnnnnnnnnnnnnnnnnnnnnnnnnnnnnnnnnnnnnnnnnnnnnnnnnnnnnnnnnnnnnnnnnnnnnnnnnnnnnnnnnnnnnnnnnnnnnnnnnnnnnnnnnnnnnnnnnnnnnnnnnnnnnnnnnnnnnnnnnnnnnnnnnnnnnnnnnnnnnnnnnnnnnnnnnnnnnnnnnnnnnnnnnnnnnnnnnnnnnnnnnnnnnnnnnnnnnnnnnnnnnnnnnnnnnnnnnnnnnnnnnnnnnnnnnnnnnnnnnnnnnnnnnnnnnnnnnnnnnnnnnnnnnnnnnnnnnnnnnnnnnnnnnnnnnnnnnnnnnnnnnnnnnnnnnnnnnnnnnnnnnnnnnnnnnnnnnnnnnnnnnnnnnnnnnnnnnnnnnnnnnnnnnnnnnnnnnnnnnnnnnnnnnnnnnnnnnnnnnnnnnnnnnnnnnnnnnnnnnnnnnnnnnnnnnnnnnnnnnnnnnnnnnnnnnnnnnnnnnnnnnnnnnnnnnnnnnnnnnnnnnnnnnnnnnnnnnnnnnnnnnnnnnnnnnnnnnnnnnnnnnnnnnnnnnnnnnnnnnnnnnnnnnnnnnnnnnnnnnnnnnnnnnnnnnnnnnnnnnnnnnnnnnnnnnnnnnnnnnnnnnnnnnnnnnnnnnnnnnnnnnnnnnnnnnnnnnnnnnnnnnnnnnnnnnnnnnnnnnnnnnnnnnnnnnnnnnnnnnnnnnnnnnnnnnnnnnnnnnnnnnnnnnnnnnnnnnnnnnnnnnnnnnnnnnnnnnnnnnnnnnnnnnnnnnnnnnnnnnnnnnnnnnnnnnnnnnnnnnnnnnnnnnnnnnnnnnnnnnnnnnnnnnnnnnnnnnnnnnnnnnnnnnnnnnnnnnnnnnnnnnnnnnnnnnnnnnnnnnnnnnnnnnnnnnnnnnnnnnnnnnnnnnnnnnnnnnnnnnnnnnnnnnnnnnnnnnnnnnnnnnnnnnnnnnnnnnnnnnnnnnnnnnnnnnnnnnnnnnnnnnnnnnnnnnnnnnnnnnnnnnnnnnnnnnnnnnnnnnnnnnnnnnnnnnnnnnnnnnnnnnnnnnnnnnnnnnnnnnnnnnnnnnnnnnnnnnnnnnnnnnnnnnnnnnnnnnnnnnnnnnnnnnnnnnnnnnnnnnnnnnnnnnnnnnnnnnnnnnnnnnnnnnnnnnnnnnnnnnnnnnnnnnnnnnnnnnnnnnnnnnnnnnnnnnnnnnnnnnnnnnnnnnnnnnnnnnnnnnnnnnnnnnnnnnnnnnnnnnnnnnnnnnnnnnnnnnnnnnnnnnnnnnnnnnnnnnnnnnnnnnnnnnnnnnnnnnnnnnnnnnnnnnnnnnnnnnnnnnnnnnnnnnnnnnnnnnnnnnnnnnnnnnnnnnnnnnnnnnnnnnnnnnnnnnnnnnnnnnnnnnnnnnnnnnnnnnnnnnnnnnnnnnnnnnnnnnnnnnnnnnnnnnnnnnnnnnnnnnnnnnnnnnnnnnnnnnnnnnnnnnnnnnnnnnnnnnnnnnnnnnnnnnnnnnnnnnnnnnnnnnnnnnnnnnnnnnnnnnnnnnnnnnnnnnnnnnnnnnnnnnnnnnnnnnnnnnnnnnnnnnnnnnnnnnnnnnnnnnnnnnnnnnnnnnnnnnnnnnnnnnnnnnnnnnnnnnnnnnnnnnnnnnnnnnnnnnnnnnnnnnnnnnnnnnnnnnnnnnnnnnnnnnnnnnnnnnnnnnnnnnnnnnnnnnnnnnnnnnnnnnnnnnnnnnnnnnnnnnnnnnnnnnnnnnnnnnnnnnnnnnnnnnnnnnnnnnnnnnnnnnnnnnnnnnnnnnnnnnnnnnnnnnnnnnnnnnnnnnnnnnnnnnnnnnnnnnnnnnnnnnnnnnnnnnnnnnnnnnnnnnnnnnnnnnnnnnnnnnnnnnnnnnnnnnnnnnnnnnnnnnnnnnnnnnnnnnnnnnnnnnnnnnnnnnnnnnnnnnnnnnnnnnnnnnnnnnnnnnnnnnnnnnnnnnnnnnnnnnnnnnnnnnnnnnnnnnnnnnnnnnnnnnnnnnnnnnnnnnnnnnnnnnnnnnnnnnnnnnnnnnnnnnnnnnnnnnnnnnnnnnnnnnnnnnnnnnnnnnnnnnnnnnnnnnnnnnnnnnnnnnnnnnnnnnnnnnnnnnnnnnnnnnnnnnnnnnnnnnnnnnnnnnnnnnnnnnnnnnnnnnnnnnnnnnnnnnnnnnnnnnnnnnnnnnnnnnnnnnnnnnnnnnnnnnnnnnnnnnnnnnnnnnnnnnnnnnnnnnnnnnnnnnnnnnnnnnnnnnnnnnnnnnnnnnnnnnnnnnnnnnnnnnnnnnnnnnnnnnnnnnnnnnnnnnnnnnnnnnnnnnnnnnnnnnnnnnnnnnnnnnnnnnnnnnnnnnnnnnnnnnnnnnnnnnnnnnnnnnnnnnnnnnnnnnnnnnnnnnnnnnnnnnnnnnnnnnnnnnnnnnnnnnnnnnnnnnnnnnnnnnnnnnnnnnnnnnnnnnnnnnnnnnnnnnnnnnnnnnnnnnnnnnnnnnnnnnnnnnnnnnnnnnnnnnnnnnnnnnnnnnnnnnnnnnnnnnnnnnnnnnnnnnnnnnnnnnnnnnnnnnnnnnnnnnnnnnnnnnnnnnnnnnnnnnnnnnnnnnnnnnnnnnnnnnnnnnnnnnnnnnnnnnnnnnnnnnnnnnnnnnnnnnnnnnnnnnnnnnnnnnnnnnnnnnnnnnnnnnnnnnnnnnnnnnnnnnnnnnnnnnnnnnnnnnnnnnnnnnnnnnnnnnnnnnnnnnnnnnnnnnnnnnnnnnnnnnnnnnnnnnnnnnnnnnnnnnnnnnnnnnnnnnnnnnnnnnnnnnnnnnnnnnnnnnnnnnnnnnnnnnnnnnnnnnnnnnnnnnnnnnnnnnnnnnnnnnnnnnnnnnnnnnnnnnnnnnnnnnnnnnnnnnnnnnnnnnnnnnnnnnnnnnnnnnnnnnnnnnnnnnnnnnnnnnnnnnnnnnnnnnnnnnnnnnnnnnnnnnnnnnnnnnnnnnnnnnnnnnnnnnnnnnnnnnnnnnnnnnnnnnnnnnnnnnnnnnnnnnnnnnnnnnnnnnnnnnnnnnnnnnnnnnnnnnnnnnnnnnnnnnnnnnnnnnnnnnnnnnnnnnnnnnnnnnnnnnnnnnnnnnnnnnnnnnnnnnnnnnnnnnnnnnnnnnnnnnnnnnnnnnnnnnnnnnnnnnnnnnnnnnnnnnnnnnnnnnnnnnnnnnnnnnnnnnnnnnnnnnnnnnnnnnnnnnnnnnnnnnnnnnnnnnnnnnnnnnnnnnnnnnnnnnnnnnnnnnnnnnnnnnnnnnnnnnnnnnnnnnnnnnnnnnnnnnnnnnnnnnnnnnnnnnnnnnnnnnnnnnnnnnnnnnnnnnnnnnnnnnnnnnnnnnnnnnnnnnnnnnnnnnnnnnnnnnnnnnnnnnnnnnnnnnnnnnnnnnnnnnnnnnnnnnnnnnnnnnnnnnnnnnnnnnnnnnnnnnnnnnnnnnnnnnnnnnnnnnnnnnnnnnnnnnnnnnnnnnnnnnnnnnnnnnnnnnnnnnnnnnnnnnnnnnnnnnnnnnnnnnnnnnnnnnnnnnnnnnnnnnnnnnnnnnnnnnnnnnnnnnnnnnnnnnnnnnnnnnnnnnnnnnnnnnnnnnnnnnnnnnnnnnnnnnnnnnnnnnnnnnnnnnnnnnnnnnnnnnnnnnnnnnnnnnnnnnnnnnnnnnnnnnnnnnnnnnnnnnnnnnnnnnnnnnnnnnnnnnnnnnnnnnnnnnnnnnnnnnnnnnnnnnnnnnnnnnnnnnnnnnnnnnnnnnnnnnnnnnnnnnnnnnnnnnnnnnnnnnnnnnnnnnnnnnnnnnnnnnnnnnnnnnnnnnnnnnnnnnnnnnnnnnnnnnnnnnnnnnnnnnnnnnnnnnnnnnnnnnnnnnnnnnnnnnnnnnnnnnnnnnnnnnnnnnnnnnnnnnnnnnnnnnnnnnnnnnnnnnnnnnnnnnnnnnnnnnnnnnnnnnnnnnnnnnnnnnnnnnnnnnnnnnnnnnnnnnnnnnnnnnnnnnnnnnnnnnnnnnnnnnnnnnnnnnnnnnnnnnnnnnnnnnnnnnnnnnnnnnnnnnnnnnnnnnnnnnnnnnnnnnnnnnnnnnnnnnnnnnnnnnnnnnnnnnnnnnnnnnnnnnnnnnnnnnnnnnnnnnnnnnnnnnnnnnnnnnnnnnnnnnnnnnnnnnnnnnnnnnnnnnnnnnnnnnnnnnnnnnnnnnnnnnnnnnnnnnnnnnnnnnnnnnnnnnnnnnnnnnnnnnnnnnnnnnnnnnnnnnnnnnnnnnnnnnnnnnnnnnnnnnnnnnnnnnnnnnnnnnnnnnnnnnnnnnnnnnnnnnnnnnnnnnnnnnnnnnnnnnnnnnnnnnnnnnnnnnnnnnnnnnnnnnnnnnnnnnnnnnnnnnnnnnnnnnnnnnnnnnnnnnnnnnnnnnnnnnnnnnnnnnnnnnnnnnnnnnnnnnnnnnnnnnnnnnnnnnnnnnnnnnnnnnnnnnnnnnnnnnnnnnnnnnnnnnnnnnnnnnnnnnnnnnnnnnnnnnnnnnnnnnnnnnnnnnnnnnnnnnnnnnnnnnnnnnnnnnnnnnnnnnnnnnnnnnnnnnnnnnnnnnnnnnnnnnnnnnnnnnnnnnnnnnnnnnnnnnnnnnnnnnnnnnnnnnnnnnnnnnnnnnnnnnnnnnnnnnnnnnnnnnnnnnnnnnnnnnnnnnnnnnnnnnnnnnnnnnnnnnnnnnnnnnnnnnnnnnnnnnnnnnnnnnnnnnnnnnnnnnnnnnnnnnnnnnnnnnnnnnnnnnnnnnnnnnnnnnnnnnnnnnnnnnnnnnnnnnnnnnnnnnnnnnnnnnnnnnnnnnnnnnnnnnnnnnnnnnnnnnnnnnnnnnnnnnnnnnnnnnnnnnnnnnnnnnnnnnnnnnnnnnnnnnnnnnnnnnnnnnnnnnnnnnnnnnnnnnnnnnnnnnnnnnnnnnnnnnnnnnnnnnnnnnnnnnnnnnnnnnnnnnnnnnnnnnnnnnnnnnnnnnnnnnnnnnnnnnnnnnnnnnnnnnnnnnnnnnnnnnnnnnnnnnnnnnnnnnnnnnnnnnnnnnnnnnnnnnnnnnnnnnnnnnnnnnnnnnnnnnnnnnnnnnnnnnnnnnnnnnnnnnnnnnnnnnnnnnnnnnnnnnnnnnnnnnnnnnnnnnnnnnnnnnnnnnnnnnnnnnnnnnnnnnnnnnnnnnnnnnnnnnnnnnnnnnnnnnnnnnnnnnnnnnnnnnnnnnnnnnnnnnnnnnnnnnnnnnnnnnnnnnnnnnnnnnnnnnnnnnnnnnnnnnnnnnnnnnnnnnnnnnnnnnnnnnnnnnnnnnnnnnnnnnnnnnnnnnnnnnnnnnnnnnnnnnnnnnnnnnnnnnnnnnnnnnnnnnnnnnnnnnnnnnnnnnnnnnnnnnnnnnnnnnnnnnnnnnnnnnnnnnnnnnnnnnnnnnnnnnnnnnnnnnnnnnnnnnnnnnnnnnnnnnnnnnnnnnnnnnnnnnnnnnnnnnnnnnnnnnnnnnnnnnnnnnnnnnnnnnnnnnnnnnnnnnnnnnnnnnnnnnnnnnnnnnnnnnnnnnnnnnnnnnnnnnnnnnnnnnnnnnnnnnnnnnnnnnnnnnnnnnnnnnnnnnnnnnnnnnnnnnnnnnnnnnnnnnnnnnnnnnnnnnnnnnnnnnnnnnnnnnnnnnnnnnnnnnnnnnnnnnnnnnnnnnnnnnnnnnnnnnnnnnnnnnnnnnnnnnnnnnnnnnnnnnnnnnnnnnnnnnnnnnnnnnnnnnnnnnnnnnnnnnnnnnnnnnnnnnnnnnnnnnnnnnnnnnnnnnnnnnnnnnnnnnnnnnnnnnnnnnnnnnnnnnnnnnnnnnnnnnnnnnnnnnnnnnnnnnnnnnnnnnnnnnnnnnnnnnnnnnnnnnnnnnnnnnnnnnnnnnnnnnnnnnnnnnnnnnnnnnnnnnnnnnnnnnnnnnnnnnnnnnnnnnnnnnnnnnnnnnnnnnnnnnnnnnnnnnnnnnnnnnnnnnnnnnnnnnnnnnnnnnnnnnnnnnnnnnnnnnnnnnnnnnnnnnnnnnnnnnnnnnnnnnnnnnnnnnnnnnnnnnnnnnnnnnnnnnnnnnnnnnnnnnnnnnnnnnnnnnnnnnnnnnnnnnnnnnnnnnnnnnnnnnnnnnnnnnnnnnnnnnnnnnnnnnnnnnnnnnnnnnnnnnnnnnnnnnnnnnnnnnnnnnnnnnnnnnnnnnnnnnnnnnnnnnnnnnnnnnnnnnnnnnnnnnnnnnnnnnnnnnnnnnnnnnnnnnnnnnnnnnnnnnnnnnnnnnnnnnnnnnnnnnnnnnnnnnnnnnnnnnnnnnnnnnnnnnnnnnnnnnnnnnnnnnnnnnnnnnnnnnnnnnnnnnnnnnnnnnnnnnnnnnnnnnnnnnnnnnnnnnnnnnnnnnnnnnnnnnnnnnnnnnnnnnnnnnnnnnnnnnnnnnnnnnnnnnnnnnnnnnnnnnnnnnnnnnnnnnnnnnnnnnnnnnnnnnnnnnnnnnnnnnnnnnnnnnnnnnnnnnnnnnnnnnnnnnnnnnnnnnnnnnnnnnnnnnnnnnnnnnnnnnnnnnnnnnnnnnnnnnnnnnnnnnnnnnnnnnnnnnnnnnnnnnnnnnnnnnnnnnnnnnnnnnnnnnnnnnnnnnnnnnnnnnnnnnnnnnnnnnnnnnnnnnnnnnnnnnnnnnnnnnnnnnnnnnnnnnnnnnnnnnnnnnnnnnnnnnnnnnnnnnnnnnnnnnnnnnnnnnnnnnnnnnnnnnnnnnnnnnnnnnnnnnnnnnnnnnnnnnnnnnnnnnnnnnnnnnnnnnnnnnnnnnnnnnnnnnnnnnnnnnnnnnnnnnnnnnnnnnnnnnnnnnnnnnnnnnnnnnnnnnnnnnnnnnnnnnnnnnnnnnnnnnnnnnnnnnnnnnnnnnnnnnnnnnnnnnnnnnnnnnnnnnnnnnnnnnnnnnnnnnnnnnnnnnnnnnnnnnnnnnnnnnnnnnnnnnnnnnnnnnnnnnnnnnnnnnnnnnnnnnnnnnnnnnnnnnnnnnnnnnnnnnnnnnnnnnnnnnnnnnnnnnnnnnnnnnnnnnnnnnnnnnnnnnnnnnnnnnnnnnnnnnnnnnnnnnnnnnnnnnnnnnnnnnnnnnnnnnnnnnnnnnnnnnnnnnnnnnnnnnnnnnnnnnnnnnnnnnnnnnnnnnnnnnnnnnnnnnnnnnnnnnnnnnnnnnnnnnnnnnnnnnnnnnnnnnnnnnnnnnnnnnnnnnnnnnnnnnnnnnnnnnnnnnnnnnnnnnnnnnnnnnnnnnnnnnnnnnnnnnnnnnnnnnnnnnnnnnnnnnnnnnnnnnnnnnnnnnnnnnnnnnnnnnnnnnnnnnnnnnnnnnnnnnnnnnnnnnnnnnnnnnnnnnnnnnnnnnnnnnnnnnnnnnnnnnnnnnnnnnnnnnnnnnnnnnnnnnnnnnnnnnnnnnnnnnnnnnnnnnnnnnnnnnnnnnnnnnnnnnnnnnnnnnnnnnnnnnnnnnnnnnnnnnnnnnnnnnnnnnnnnnnnnnnnnnnnnnnnnnnnnnnnnnnnnnnnnnnnnnnnnnnnnnnnnnnnnnnnnnnnnnnnnnnnnnnnnnnnnnnnnnnnnnnnnnnnnnnnnnnnnnnnnnnnnnnnnnnnnnnnnnnnnnnnnnnnnnnnnnnnnnnnnnnnnnnnnnnnnnnnnnnnnnnnnnnnnnnnnnnnnnnnnnnnnnnnnnnnnnnnnnnnnnnnnnnnnnnnnnnnnnnnnnnnnnnnnnnnnnnnnnnnnnnnnnnnnnnnnnnnnnnnnnnnnnnnnnnnnnnnnnnnnnnnnnnnnnnnnnnnnnnnnnnnnnnnnnnnnnnnnnnnnnnnnnnnnnnnnnnnnnnnnnnnnnnnnnnnnnnnnnnnnnnnnnnnnnnnnnnnnnnnnnnnnnnnnnnnnnnnnnnnnnnnnnnnnnnnnnnnnnnnnnnnnnnnnnnnnnnnnnnnnnnnnnnnnnnnnnnnnnnnnnnnnnnnnnnnnnnnnnnnnnnnnnnnnnnnnnnnnnnnnnnnnnnnnnnnnnnnnnnnnnnnnnnnnnnnnnnnnnnnnnnnnnnnnnnnnnnnnnnnnnnnnnnnnnnnnnnnnnnnnnnnnnnnnnnnnnnnnnnnnnnnnnnnnnnnnnnnnnnnnnnnnnnnnnnnnnnnnnnnnnnnnnnnnnnnnnnnnnnnnnnnnnnnnnnnnnnnnnnnnnnnnnnnnnnnnnnnnnnnnnnnnnnnnnnnnnnnnnnnnnnnnnnnnnnnnnnnnnnnnnnnnnnnnnnnnnnnnnnnnnnnnnnnnnnnnnnnnnnnnnnnnnnnnnnnnnnnnnnnnnnnnnnnnnnnnnnnnnnnnnnnnnnnnnnnnnnnnnnnnnnnnnnnnnnnnnnnnnnnnnnnnnnnnnnnnnnnnnnnnnnnnnnnnnnnnnnnnnnnnnnnnnnnnnnnnnnnnnnnnnnnnnnnnnnnnnnnnnnnnnnnnnnnnnnnnnnnnnnnnnnnnnnnnnnnnnnnnnnnnnnnnnnnnnnnnnnnnnnnnnnnnnnnnnnnnnnnnnnnnnnnnnnnnnnnnnnnnnnnnnnnnnnnnnnnnnnnnnnnnnnnnnnnnnnnnnnnnnnnnnnnnnnnnnnnnnnnnnnnnnnnnnnnnnnnnnnnnnnnnnnnnnnnnnnnnnnnnnnnnnnnnnnnnnnnnnnnnnnnnnnnnnnnnnnnnnnnnnnnnnnnnnnnnnnnnnnnnnnnnnnnnnnnnnnnnnnnnnnnnnnnnnnnnnnnnnnnnnnnnnnnnnnnnnnnnnnnnnnnnnnnnnnnnnnnnnnnnnnnnnnnnnnnnnnnnnnnnnnnnnnnnnnnnnnnnnnnnnnnnnnnnnnnnnnnnnnnnnnnnnnnnnnnnnnnnnnnnnnnnnnnnnnnnnnnnnnnnnnnnnnnnnnnnnnnnnnnnnnnnnnnnnnnnnnnnnnnnnnnnnnnnnnnnnnnnnnnnnnnnnnnnnnnnnnnnnnnnnnnnnnnnnnnnnnnnnnnnnnnnnnnnnnnnnnnnnnnnnnnnnnnnnnnnnnnnnnnnnnnnnnnnnnnnnnnnnnnnnnnnnnnnnnnnnnnnnnnnnnnnnnnnnnnnnnnnnnnnnnnnnnnnnnnnnnnnnnnnnnnnnnnnnnnnnnnnnnnnnnnnnnnnnnnnnnnnnnnnnnnnnnnnnnnnnnnnnnnnnnnnnnnnnnnnnnnnnnnnnnnnnnnnnnnnnnnnnnnnnnnnnnnnnnnnnnnnnnnnnnnnnnnnnnnnnnnnnnnnnnnnnnnnnnnnnnnnnnnnnnnnnnnnnnnnnnnnnnnnnnnnnnnnnnnnnnnnnnnnnnnnnnnnnnnnnnnnnnnnnnnnnnnnnnnnnnnnnnnnnnnnnnnnnnnnnnnnnnnnnnnnnnnnnnnnnnnnnnnnnnnnnnnnnnnnnnnnnnnnnnnnnnnnnnnnnnnnnnnnnnnnnnnnnnnnnnnnnnnnnnnnnnnnnnnnnnnnnnnnnnnnnnnnnnnnnnnnnnnnnnnnnnnnnnnnnnnnnnnnnnnnnnnnnnnnnnnnnnnnnnnnnnnnnnnnnnnnnnnnnnnnnnnnnnnnnnnnnnnnnnnnnnnnnnnnnnnnnnnnnnnnnnnnnnnnnnnnnnnnnnnnnnnnnnnnnnnnnnnnnnnnnnnnnnnnnnnnnnnnnnnnnnnnnnnnnnnnnnnnnnnnnnnnnnnnnnnnnnnnnnnnnnnnnnnnnnnnnnnnnnnnnnnnnnnnnnnnnnnnnnnnnnnnnnnnnnnnnnnnnnnnnnnnnnnnnnnnnnnnnnnnnnnnnnnnnnnnnnnnnnnnnnnnnnnnnnnnnnnnnnnnnnnnnnnnnnnnnnnnnnnnnnnnnnnnnnnnnnnnnnnnnnnnnnnnnnnnnnnnnnnnnnnnnnnnnnnnnnnnnnnnnnnnnnnnnnnnnnnnnnnnnnnnnnnnnnnnnnnnnnnnnnnnnnnnnnnnnnnnnnnnnnnnnnnnnnnnnnnnnnnnnnnnnnnnnnnnnnnnnnnnnnnnnnnnnnnnnnnnnnnnnnnnnnnnnnnnnnnnnnnnnnnnnnnnnnnnnnnnnnnnnnnnnnnnnnnnnnnnnnnnnnnnnnnnnnnnnnnnnnnnnnnnnnnnnnnnnnnnnnnnnnnnnnnnnnnnnnnnnnnnnnnnnnnnnnnnnnnnnnnnnnnnnnnnnnnnnnnnnnnnnnnnnnnnnnnnnnnnnnnnnnnnnnnnnnnnnnnnnnnnnnnnnnnnnnnnnnnnnnnnnnnnnnnnnnnnnnnnnnnnnnnnnnnnnnnnnnnnnnnnnnnnnnnnnnnnnnnnnnnnnnnnnnnnnnnnnnnnnnnnnnnnnnnnnnnnnnnnnnnnnnnnnnnnnnnnnnnnnnnnnnnnnnnnnnnnnnnnnnnnnnnnnnnnnnnnnnnnnnnnnnnnnnnnnnnnnnnnnnnnnnnnnnnnnnnnnnnnnnnnnnnnnnnnnnnnnnnnnnnnnnnnnnnnnnnnnnnnnnnnnnnnnnnnnnnnnnnnnnnnnnnnnnnnnnnnnnnnnnnnnnnnnnnnnnnnnnnnnnnnnnnnnnnnnnnnnnnnnnnnnnnnnnnnnnnnnnnnnnnnnnnnnnnnnnnnnnnnnnnnnnnnnnnnnnnnnnnnnnnnnnnnnnnnnnnnnnnnnnnnnnnnnnnnnnnnnnnnnnnnnnnnnnnnnnnnnnnnnnnnnnnnnnnnnnnnnnnnnnnnnnnnnnnnnnnnnnnnnnnnnnnnnnnnnnnnnnnnnnnnnnnnnnnnnnnnnnnnnnnnnnnnnnnnnnnnnnnnnnnnnnnnnnnnnnnnnnnnnnnnnnnnnnnnnnnnnnnnnnnnnnnnnnnnnnnnnnnnnnnnnnnnnnnnnnnnnnnnnnnnnnnnnnnnnnnnnnnnnnnnnnnnnnnnnnnnnnnnnnnnnnnnnnnnnnnnnnnnnnnnnnnnnnnnnnnnnnnnnnnnnnnnnnnnnnnnnnnnnnnnnnnnnnnnnnnnnnnnnnnnnnnnnnnnnnnnnnnnnnnnnnnnnnnnnnnnnnnnnnnnnnnnnnnnnnnnnnnnnnnnnnnnnnnnnnnnnnnnnnnnnnnnnnnnnnnnnnnnnnnnnnnnnnnnnnnnnnnnnnnnnnnnnnnnnnnnnnnnnnnnnnnnnnnnnnnnnnnnnnnnnnnnnnnnnnnnnnnnnnnnnnnnnnnnnnnnnnnnnnnnnnnnnnnnnnnnnnnnnnnnnnnnnnnnnnnnnnnnnnnnnnnnnnnnnnnnnnnnnnnnnnnnnnnnnnnnnnnnnnnnnnnnnnnnnnnnnnnnnnnnnnnnnnnnnnnnnnnnnnnnnnnnnnnnnnnnnnnnnnnnnnnnnnnnnnnnnnnnnnnnnnnnnnnnnnnnnnnnnnnnnnnnnnnnnnnnnnnnnnnnnnnnnnnnnnnnnnnnnnnnnnnnnnnnnnnnnnnnnnnnnnnnnnnnnnnnnnnnnnnnnnnnnnnnnnnnnnnnnnnnnnnnnnnnnnnnnnnnnnnnnnnnnnnnnnnnnnnnnnnnnnnnnnnnnnnnnnnnnnnnnnnnnnnnnnnnnnnnnnnnnnnnnnnnnnnnnnnnnnnnnnnnnnnnnnnnnnnnnnnnnnnnnnnnnnnnnnnnnnnnnnnnnnnnnnnnnnnnnnnnnnnnnnnnnnnnnnnnnnnnnnnnnnnnnnnnnnnnnnnnnnnnnnnnnnnnnnnnnnnnnnnnnnnnnnnnnnnnnnnnnnnnnnnnnnnnnnnnnnnnnnnnnnnnnnnnnnnnnnnnnnnnnnnnnnnnnnnnnnnnnnnnnnnnnnnnnnnnnnnnnnnnnnnnnnnnnnnnnnnnnnnnnnnnnnnnnnnnnnnnnnnnnnnnnnnnnnnnnnnnnnnnnnnnnnnnnnnnnnnnnnnnnnnnnnnnnnnnnnnnnnnnnnnnnnnnnnnnnnnnnnnnnnnnnnnnnngcctgacccaggaggcttacaacaagttctatcccatcattcgccctggcggcacgctgatcacggattcccgctttgtgaagaccgagctgaaggtggatgcccggcagattgagcttggcatgtatcagtcggtgatggatgcaatcggaaagcccattgtctttaatatctgcatgttgggagctgtgatagccatcactggtctggtcagacccgaatccgtcattcgtgtgctggaaacccgcattcaccccagttttctggagatgaaccgaaaggctctggatattggaatcaaaatcgctcaggatatcgataccccatcatgaaattaccaccggtgagattggtcattaactcatcgtaagaggttaaaacaaaatatgacagacagacttgacattattgaggatcacctgcttaatcgtaaactcgttggagtgtgggagatggtcagtgatgattctcccacgactgccgatgggtacgccctcagtttggaaggatatttccttgagatagagacaatgttagatttttccgctgtaagtattgggtgcggacattcccggactgactttcccctggatgcagaatcaggctatttctaccatgaggtatctcatgatacgccctactcgcagttcataggtaagcggctctcaaaatggcgtttgctggtgggcgaagggggcaattgggatggattgatggtaagctttggcacatccacagggctctgttttatctcagtggattgctcaatctcagttctgacgttgaatggaatccaatgttaggtagtactaagcaatggcgtgaaacatgaattagggtagcggtagttgactcattatctgttcgactgtgtacggacaggtttcagggaatgcggactctggcagtttcctgcacgccgatccggttgataatcccatttcaacaggtgcatcaataacactgccatcctgcttaataattcccgcttctggcttttccccattgacgacaggatacgcaagataaagaagaatacctcctattctgtattttccattatcctgtctatcgttgaacggattgatgacgaattttgaagaagcatctgattatccagccatcaacccggatattttccctttgcaatacaaaggcctgagaaaaaacaatgaatatgaaatcagacaattataatctgcttgaagaaaaatggattcctgttctgcgctcaaacgggaagtttgaccatgttggcatatacaccgcattaaatgaggcagatagaatccgttgtatagcagccggcaatcccatggatcgcatggcaattttgcgattcctgctggccctgctgtattggtgcatgggaaatccgccagacaaaatggacaaacaattctgtgaaggttttcctgccgactggttgtccaaactcttcgataaaaaggactgctttaacctgctaagccaggaaaagcggttctttcagtaccagaaactcaatgacaagaagcttacctccaattatctcatccacgagattcccacaggaacaaatctgtggcattttcgacattcgaccgatgcagtaaatggattgtgtcctgcctgttgcgccatggggcttttacgcctgccattgttttcaacatctggaggaaggggaaaaccgcccggtattaatgccaaacctccaatctatgtcttacccttcggaaagtcactggcggaaacccttcggctctcatggagcgcaaatccaaatttaggtgaaccagcgtgggttcgacccgatctcaaactaccggtaagcggacaagttcctctcctgacaggattgacgtggttgcctcggcgcgtttggttgagcgatccggaaacctctgaggcgcattgtatttcctgcggccgcatggaacggctgatcttatcctgtgtgtttgaagggctcgggagcaccaaaacggatgatggcgccccaactcggatgtggaaggatccgcatgtcatttatgaaccaaacagcaaaggagatatgctgtctcttcataacagtagcgttttagatgcagcggatgcagcagccaatcagtgggccagaattaccgcaggcgtgattcgcagatcggaacccgataaacacaaatgggtatggatcattggtttttctactgttaagaatgataaatatcttgaggcaatcgagtttctggtgcctctgtcaggtttggagcagcatcaagaatccattgaaagactggaacgatggcaagatcaatgcaaaaaactttcaaatcgtttggttcatgtgttcatgtcttcgggtgaaaaatcgtcttcccggaaacataacgaattgttatcaattctaaatacgattcgaccgcaggttgaaaccgtggtatttaatatggcacccgatctggttaccggatgtgatgaagcttggcaattggcagcaaagaaatatcaacagatgatcaaaatggcagtgcattcactcgtaccgggttttacaacagcatcgattcaaaagcgcaagcagatcgagaatgtgtttccggacatgactataagtgaaaaacttctatccgatcggaaaaaaggaggcaaaaattgaccgccacagaacaattcattgatgttttgaaaacgttaaaggcgggggatcgaaagctgttacgtactcatgctggactgggtctcgatcaatcggtacaggggttcgatttgttcgccggaatttggtggccactgcgacaaaatagctccaaagcgccccgccgtgaggtggcatggttggttgcaaaaatttttgcttcttatccgattccgcatttcccgaatgaaacacttgcgagtcaattaaaaaaacgccaaccaacccaaacccaagacagtaatcgttttgctcaaagattcgacaggatgttggttcttccgcttaataaaatcgaatcggcgctgcaatgggcgctgaagtgcatagcagagttgaaatatcccaaacttgattgggtgagactgacatacgatctgtccatttgggaaagagacgccactcggctcaaatgggcaaaccaatttttgcaattaacaaaaggagacagtgatgttaatcgagattcacacgattcaaaaccatagcccatccaacttgaaccgggatgatttgggggctcccaaaacctgttatttcggaggagtattgcgctcgcgcatctccagccagtgcattaagcgaagcatccgtatgagtgacgaattcttgttgttgcgtggcgggatccgcacccggaaactggcggatgagattgccaaggcaagcaaagccggagcggataataggaaacgagctgcaaaaattcttggttgctgtggtatcaaatccaaggagaagaaggataaggatgatgataaaagcgatatgttggtttatacctcccgtgaggctatacaggaaatggcgaatctcttggataacgacgaaggtaaaaccgacgatcaacaactggcgttagcttttggcacgcttattagtgaaaaaacatccgttcctgatatggcgctcagcggaagaatgttagagacaggcattcttaaaaacaccacagtagaggcttcccttcaggtggctcacgccatatcaacacacgaggcccgctcggaagtagattattatgttgccgcagacgacatacctggcgatgatgcaggtgctggctaccttgatgaatctttgtttgtatcatcttgtttttacaaatatttttcgattcactgggaaacattggtccaaaacctggagggaaatatggaccttgccgcacacactgtaggggcctttatgcgtgctgctgctctggttacaccaacaggcaaacaaaacagtttcgccgcccacaatccccccgatgggatacttgtgcaaatccaggatagaaacatcccaatcagctacgctaacgccttcgctaaaccagttgatgtcaatgatagagatatcgtctcgcagagcattgcacagcttgggcaatacatacatgaccttgacatcggcttcggcaaacctcaaaaaagattctggttttcaccaaatcttcgttttccacttaacgccatgaaagaagataaggaatttgcactttccgaacaaaatataatgtcccttgaaggtctgattaccagcgtaatgaaagaggtcggatacgactggagcgatgttcagaaaagcattgtaaatcctgaggtaccgtcatgagtgttaacaccctctttctccgtttggaaggaccattgcaatcgtggggtacggagcagtcgaaatttgtgataagaaggacaagcgaagcccctacgaaatcaggaataattggaatgtgttgtgcagcgctcggcatttcacggcaggaggctgcaaacggttggcttcaaaaactgagtgagcttcgtatggcagtccggattgatgtgccgggggtccgatggtgggattatcatacggttggagcaggcatgatgatgcgcaccagtgaaaaccgaagcaagacaaagccaggccccctggttacccgacgcgaatatctctgtgatgcaagttttctggttatccttcagggtgagcatagtttggtcgccgaattggagattgcagtcaacaatcccaggtggccaatttacctgggcagaaaatgttgtactctatctcgtccactgctggtgcatccggcaggcgattttccgaatttggtttcagcactgaagtccataccctggcaaccaagacttgccggtgatccgatgccgcaaacagttgattgtcttatcgactgggaaccgacaatcgatcaaccagagccgccagacgatgcgctcattttctacgatgtgccgctgacattcgatcctccatcgcattgtcctcgttttgtcatcagagagtctttgatagtggggaaaaaccgggaaattggcattgcagaaaagccggcgcagaataaaacgccacgaccgtcacaaccacgggcagactacagaaatacggaataccgccatgctcgcataaaacgtcttgatgctgaccaccatctgtgcatactttgtaaatccccggccacgaccgtccagcatatcacctaccgcagggccggagggaatgaaaccccggatgacctccgttccctgtgtcggctttgtcatgatgcagtgacgatgattgaatatggcgcaggcatgggattggaccgcatcaatccggaagaaaaaaagtggcgggaacaaatcattgagaagcgaagcgaaattattcgttttcggtcaatagaaacccgacggcggcatctttccaaccaggaggtctaatgtacttatcaacgcttttgatcaacgctggcgatcatcccgaccgaccacgccctggaaggtcatggttgcggaatgtttacagggttcatcagcggctgtgcatggcatttccctccggggagcgaaaacaggctgatgaggattttctcaagccctataaaccggaggattttggatatcatcaagttcatgtaccacgaataaaggatgccggattcctgtttcgtatcgatcccattccgggaggcagggccatcattctggtgcagtctgcagtggaacccgactgggattttgcattccataatgctatgtttctgctgtctgcaccgcccgatataaagccttttgatcctcaattttcaattgggcaaaaactactgtttcggctgacagcaaatccaactaaaaaaatagacacaaaaagtgggcctgatggaaaaaagcgtaacggaagacgagttccggtaaggccagaaaactttttggaatggctggttcaaaagagcattcggtcgggattctctattatgagtgataatattatcattcagacatcctatatcttttttcacaaaccgaatacacaacaggaaaattatttgagtgaaatatcacctgggaaaggcgattatcaagcccgcctgcgattggtccgttatgatggagttctcacaattgatgacattaacctttttcatttagctattgaacgtggcatagggtcaggcaaagcctttggttttggccttctttcgttagcacaaatgcagtgtggaacgctatgaaaatcaaggacctacacattcttccgaagtttcgtgatggtttgagttatctctacgtggaacactgtcgaattgatcaagaatctttggctatcgccatccatgacgcgcgcggaaaagtacctgttccctgtgcgaccctggctctcttgatgctcggtcccggtgtttcaataactcacgccgcaatatctgttcttgctgatcatggttgccttgtggtctggtgcggggaacagggcgttcgtttctatgcagtgggcatgggagagacgcgcagttcagctaacctgttgcaccaggcgaagatgtgggcggatgataattgtcgcatacaagtgatacgtcgtctttatcagttacgatttcccgaaaaattggatacatccctgacccttcagcaaattcgcggaatggaaggattacgggttcgctcggcttattccagagcagccaaggagtccggtgtctcctggaccggtcgcagctacaaatccaacgaatggaacagtgcagaccccgttaacagagctttgtcaactgctaattcctgtctttatggcatctgccacgcggcagtggtgtcagcaggcttttcgccggcgctggggttcattcatacggggaaaatgttgtcattcgtttatgatgttgctgatctttataaaaacgagattacgatcccaattgcatttcgtgttgttgctgaatccaaagatgttctggaaaaacgtgtacgggtggcctgcagggatatgttcgtttctatccgcctgctgaaacgaatcattccggatatccagatggctttggggctttcaacgcagaaaacagcagatgataatgaaccattcgaccgggatgctaccgcaccaggttctttgtgggatccggagttaggcacggtggaaggcgggcgctcgcatcctctggaaatggatcaaatgactgaaagggaagatgatggtagttttcatccttgaaaatgtgccactgaggttaagaggagaattatctcgctggttcctcgaaccaaaggcaggtgtttttgtggggaatgtttcggcaatggtaagggagaagatttgggaaatggtttgcaaacaagtaaaggaaggcggttgcttgatgatctatcgcagtgataatgaacagggatatcaaattcttagttctggtcaaacattgagagcaattgaagacttcgaaggattattgcttattcgggtaccacagatttaatattttttcagtattgtccccacgcacgtgggggtgaaccgataatggaagcaactcaggaaagaatgatttaattgtccccacgcacgtgggggtgaaccgcctcggcagatgacgttatcgcagcagggttgattgtccccacgcacgtgggggtgaaccagcagcgacatcatcttcagcaaccccatcaaaattgtccccacgcacgtgggggtgaaccgccgtatcatgttcgtatcaatatcgagcatcgattgtccccacgcacgtgggggtgaaccggtcatcgtcatgtcgattatgaagtgccttgcattgtccccacgcacgtgggggtgaaccggagttaatgctgatttgtcagcgggaattcccattgtccccacgcacgtgggggtgaaccgaatcttcgccgcaatcacggatgatgatttccattgtccccacgcacgtgggggtgaaccggaaggataaaaatggcaaatccaacactgtacattgtccccacgcacgtgggggtgaaccgtgcgggttgatgctaccaggcacccaagcagtattgtccccacgcacgtgggggtgaaccggagctgggttatggagaccaaggtgttagtagattgtccccacgcacgtgggggtgaaccgcgcctatcgtctgcaaaaaagacggcgataatattgtccccacgcacgtgggggtgaaccggaattgaaaataatttgataccttttccgtttattgtccccacgcacgtgggggtgaaccgcaatctttaatttgttggtgaaaacatcaagcacagatcaagtgaaaaatatcccatcgaaagaagcgcgaattaaaatactatgctctgcttttaaggtaaatgatgtattggctgatggtaaatataatgtgttaattgtggatgacctgtgtgacacagggtcatcacttgaagcggctacagtcatgttaaaacagtacacaaaaatcaataagatttttgtagtcgcagtaacgaggaaaaactcatgaaaaatgtttttgtatctggctcaatcaatataaaaaaactcgattctaaagttatcgaacggttaaaaaatattatctcatcgaacttaagagtcattgttggggatgcaagtggtgttgatagctctattcaagaatacttaaaatcaaatgaagtccgttccgttgttgtttattgctcaggagataagcctagaaacaatatagggcattgggacaccaaaaaggttgatacttcctataagcctggaactcgacagtttttcacagttaaagacaaagcaatggctgcggactgtgattatggctttatgatttgggatggcagtagcacgggtactctgagtaatgcaattgaacttgtcgaaagaaataaaatagcggtagtgtatgtaagcaaaactaaacaattttttaatataaaaaacgttcaagacatcgaaaaactaatcaaatttatgagcgagacatcgcttgaaaaagcagacaataaaattggtttattcaaaaaaattgaaaccataaagtctatccaacatgacatattcgatattcagcctatcgaagccaacacgcagatcaaacagccaaatctaacgcaacactccataggaacttcgccatcgctcaagcgctgaactttgcgttatgctgattcccctcctatttccatgtcatggatgattactgacatcagccaattcgaaggcacttgctaatcgatgtgctgtccggaaaaatacgccagcaaatgctggaacctgcaatccgtcttcttcgaggaggatcacttcgtaaatgatgtctatttgtttttcacaaccactgatcgccggttccttaaattggaatcccagaacctgagccgtttgcgcgaaatgataggctatgcgcacacagcgctggaacaacacgatacaattgcaatacatggcatttaataatccgcaccaacagcgttgcaactgcattcttgacattgttgatttcacatcatgaagctgaactacagaagaccacttctttttcaccaaaacgatcgctccaattatcgatagttgttgggatttcatctttgtattgtgggtcgttggaaaaatatttgactgtattaccgtcaatcacagcggcataaatcattctgttaggacaatgcattattatagcttccataggcatccgtgaaagaacataaattcaccatcggcagatctcgcaagtgcgacattgtgttggcagacgataccgtcagccgtcatcatgctgaactcatttttttgcataatggccacctgcatatgccatgcgggaaacggatcggctgagtgtgacggcgcacacaggcaaggatcgggagaactttcagtttggattacaggcatttctggaagaagctcggaccgttgccaagttggtgcatccgaatattgttcgggtgaaaacatatctggagcagaaccatacggcctatctggtgatggagtattacgaaggattgtccgtggctgaatatgttaggcaacaaggcggtcgaatacccgaaaaatcagcagtggggatcatgcaattcgtcctggatggcctgcgccatgtgcatgagaatgggtatctgcatcgggatgtgaaaccagcgaacatttatatgacgaagcgtggtcaggttattttgcggattttggggctgcacggtgtgcgctcggggaacacagccgaagtctgtccgtggttgtgtcgtctggatattcgccatttgagcagtatcgcagcaacggaaaacaggggccgtggacggatgtctatgcatgcggggcgacattgtactatctggtgacgggacaaaccccaccaacagcggtggatcgtacagacgaggatgacccagcgctactgattccgcctttgcagttatctccagggttatcgcctcaagttggtcgggcgatacagaacgcgctgacactaaaagccagtgatcgcccccagaatacgaccaaatttctgaagatgctgacaggtgtaacgctgtccccgatgccaggcttcactcctcaaccggcgcacagcccaaaaccgaaaccatcaccagtacccagtccgaaaccgactcatgtgcaaaaacctgcagacacttggacagagccgataacagggatgatatttgtgtgggtgcctggggggtgttacatgatggggtgtgggaatggggaagggaataataatgagaaaccggtgcatgaggtatgtgtttatggattttggatgggtcagacggaagtgacgcagggtcagtggcagcaggtgatggggagcaatccgtcctattttaaaaaaggggataattatccggtagatgagtggcaacgtgtgggaatggtgtgaggacgtatatctagccgatcaaataaaaacaatcctgtatatcattatggctgtcccggccgggtgatccggggcgggagttggaactacggaccggactatgcgcgttgcgccttccggtacagcgacgaccctgccttccggaactacgacgttggctttcgccttctgaggatgcattagcttttagttttttacttttttatctttttaaggtttttatttgtggtttcagggagcgtagccccatggtcgcggtcatccaacggaacctttctgaattccaaagaaaaacttaaccccggtgaacagcgatgggtgcccgatggaacacggttttatctggcaaatcctgcctatcaatttgaactaaaacgaaccggtaaaggagattgaaatgaactacgatacatcttttgtcagtgagattggcggccgcaaggtcaacgaggatacttatggctatcaaatcgcaccatccggcggctgctgggtggtggccgacggtcttggggggcatcggggaggacagccagcctcttttttggcagtaaaaaccgttatggaatccttggctctgacgacggacaattccccgaacacgctgcatcgcagcctcgaaactgcacagaatgccatcattgccggtcagcagtcggatcatgaactctatgctatgcgcaccacgatcgtccttctggtgattcaaaacgatcaagccagatgggcgcaccttggcgacagccgattatatgcttttcacaaaaaccgtgtggtgtttcagaccaaagatcatagcgtccctcaggtgctggtcagcgccggcgacatccggtccgagaatattcgcggccatgaagaccgtaaccgtctgctacgcagtttgggaaatcaagacgattttcgtcctgtcattttgagaatcctttcctggtacgctctggtgatgcatttttgctgtgtacggacggattctgggagtatatactggaaaacgaaatggaggaactgttgttcaattcagattcaactgcacagtggcttcagcaaatggaaaagctgctattgagccgggcgccgaaaaatcaagacaattatacagcaattggcatcagggcgatttagaccgacgagccattccttggcccccccccctttttcccaaataaggttgtaaaggttacaaagctcacatgttcagtctttatttaccgttgtccatttgaatccaaaacgataatgtttgtcggcctctctatggcctttaaaatatttttcctcttttgtaatctcaatcttgtcaccaatattgcgaatattacagatggcgcagaatgtccttctcttgtcaggattgtctaatcgtagtaatatcacattgtcaagttcatcctttatcgcgattcgaccgttaacatcagcaaagtttgcattacccttgtagataaatgtgaagatcaaaatgacatcaatgatatctggacgcatgataaagaggttttcgccatccgacgattggccgctccggtcattcttatcaaggtagatgaaaggacgctcgttcttacttccaaacatatcacctaaagcctgaatgatccccatgctaccatccttgagtacaaacatgcagcctaggtccaggtctgcgttgactgtctccgacgcggagaaaaaaccttttcgggtgatagactgctcccagtttagattgatatggattggttggatgcctcccctcttccttagatcgacggtttttttgtctcctctcttctccatggtgaccttcgatatatttattttgggggaaggaggcgttgaaggggcggactgcattagcgatggcgatgcagcggaaatatccacgccaccgaaatgtttgagcagagcgcttagtccgccattaaaaccctgtcccacagcagccaatcgccacaggtccttgaagtatatctccccaacgatgatcgccttctccgttgaaaattccgaacccaagaagggaaacctcaccaattcctcatttttgacgagaactcttagatatcctctggagatttgattcatagcgcctgaaccatccatcgccaccgtgaagaccagtttcttaatggtgttaggcaactttgacagattcaccatgaacctttcagaatcacctgcaactgggccaatcttgctcagagcattttcaggtgaagtaggttgattaaagaaaataaaatatcgatcatcggagagacggttgttctgatcgacaccaaaacaagtcacatcaattgagtcggggccgccgtattcgatatggatgccgacttcgatatcaagagatttcgttaaatcggaaagttttactttctgcccgcgtatcaaattcattaacaatatatccttataaattagacttaaacaggatagggttagcatctggggtgatgaaaatcatcaaaaaaatggttttaaattcaatatccgtgaatgaatgatattcattgcaggtcaagacaaaataattgcctcattccatggaatttcttttgcttttgcttttcctttactgtctgtccaagtctggcctatagcacatcgcatccacattaaatttgtttttgaatctgcaacagtaccatcattgttatcaatataccgtccctgcggaccgattctatctcttacaggagaactgtctgatctttcgctggaggactttgtcgctggtgaagcatcattatattccagttgtcttttatactcagagatcgatagacatagtggggacgtgataagagagcaatcggattatctttttctccacgatgccagttgacacatccagcccggataattctgatttaaccgagcgccgcagcgccgggacgtaccaagaaacatcgcttccaggggataccttgtcgccatctttaacttcagttttgagtacgatcttcagcgcttcaaactctccagcaggcacttgaactttttcccatccttccaccatacctatgattgtatgttggcgttgatgtcctgtcttcttgtcggtttcggtagattgcgcagtccacttctttccaggactgaggggaaagtcaaggtatttgagtgcaggcgaaaacgaaaccccattattgtcgccggaaccagatccaagatatccccaggtacggtcgtagtaggtggtgcgctcgctgccgctcttcgcgttagtggtcaccattgtcaatcggttgtcttcaatggctgtaacttcacgcgtcgcgacgtagctgagtttgctgttcgagacgttttccgcttcgaacgtatagctgtcaccaaccctgattgttggtgcgactaccggcttatctgtcacagcggctgatgtggagactggtgcgactgttgtggtattggtgattggggtaggaactgatatcggttcttcaccaggaatgtgatctttggttatatatttcccgtccttgaatgtgtagttcaacgttgtgacatcatctgtctgccccgtgattttatgctttacgctgattttgaatgtggaatacccagttgcaggtgctggatcaaaagcgatatgtagggagtaggattcgccttcttcaaagctatctgaaatactcatctgcaaaagaggagtcaatccattattacccaattcattgatggaaataccttcccaattgaaacccatgtgcgtatctccgctttgtacaactatcgcatatttatctgcgccgatctgcgtccaagacatagagggtggagtgccataagttcccataaaggctaaatatggataatgcgcctccacacgccatttttcacctaccttgacgaagatggcggcattgatcagtggggcgcatccgtgacattggttgctatctccattaggctgcgtcgaagtgagaaggatttgttttgtcacacctgtctgcgtaaattcgttcgaagcgatgacgctaaccagcccatccgtctcggaaaaaatctcattggtgtcgatttgatgcggtacttgcatatcactccaaagcgctgccttcgcttctggctggtagggtccgtagaggatttcgagcgctttaatgtcatcgaacgcacctatgatcatgcggttttcctcagccttgtcacataccagttttattagagctgagattccaggctgtgtctgagtatctatgtttattttatcagatgggaatttcgcttcacttgtgccatcatctttgtacttcactccctcgttgccctgaaagacatttcggcaatctgtctgggcattctgaatcacatatccgccaccgtaaaccacgcgaaccatattgaaacttacagtcccacttcgatcacgtatgacagaattaaggtccacaaagaacttcgcagcatcaccttcccttccagtctgagtaaatcccggaaaccgattaggatcaattgactcgtcggacttaccgcatgcagccagcgtcagcaatacaaaagagcaaataagaaaatttttcatggtatcacctgacgggtgttgcgttcgattgcaagtagtacgaggataagactgaagagagcaataagtattatcgcagacacggcagcacctgcaaaataaaggcgtgtttgttgaagatccactttcgagacagcgtccttcgcaagtttattctttttcagttccacaaacttgttgatggcctcgtatgtattcagattctgcttttcaacctctgcaacaacagcagccatttcatcgataaactcttgctggttttcctttggaatgtcgtttagaatgtttctcagcgcccggatgttgtctggtgtattgaattgcttctgtagagcgaacggaagctttatcccaggcagcatatttggatcaggtatcgccgctttaggcggggtggacgttgcggtaatggtctcctgaacataaacaggaggttttatagcttctatgacctctgagggattgaccttggtcacggtatttcctaagagcgagctgtacgcaatcaaagctccaaccacgatcactgtaattagtccgaaaataaagagcatggcgagcccgcgggtcagatgaaaaagaaactttctctcgaacgagtcaaagaatgacatttgctttattcctctcagttgataaaaagctcatctatgtgtgctggaagctatattgtatgttttcttgttcacttcaacatcaataaatattagacgaccctatatgaatatcagcacgttaagtcaagaagaatattatggcctgaatatcgtaagaaaccattttggcagcctctgtcccaactgcgcgaaagatgaatgctgaaatactgccgagcagactgtccctgcttccggcgttgatcactgttttttcaagcgatcttctatgctcagattgagcaataaaattatcgatgatgatctttgctgaatcaggataaatggcgttgtaatgctcaaggatgttcggaggaggcaatgggccactatattgttgacccaccaacgttaatgcatttttgttatctttctttttggaagcggtatgcggagctgaaggaacctgccgcttatctggcattttcttgctcaaaggtttttatagctgcgtacatatccgcgccgaccgccatccagtccgccatcagcgcgtcgtaatcggccatgctttcagacgaggaatcattgtatggggatcgctaaaccaaaacataccttatgttaatcttgactttatttttataatagcatgactatattatacttttctaaactgattgcattccaataaagttgcaatttttgtattattcttaaatttcatcgaacaatctaaaatactgaaatcgaaaggattcccccctttgaaaaagagggaccaggggggatttatgaggctatctacctgaaaaatccccctcgatcccccttttccaaagggggaagtatcattttcatatatggggtgatcgaatttaagaaagataccgattttccggcatccaaatcctgttcaaagctcggtaaaacgcatacaatcaggcggggagacagatgaaaccttgttctttgaaatgcttgtcaagagtgaaagcagttgtaacccccaaaagccgcatggtttcaaagctcacacagtcaacaagactcagttttttcctatcggcagcaagcagggcccccattgcagcatgatgcacagctttatcaatccattcaatccggaggacaggaacaatgtcttcctgaaacagttttatcgctttcatgcctaaccggttctgcacaagggcgcaggtttccacaaggacataattacttgtcacaagagtttcttcggatgtcaaaatatctatccaggtttttgctgcctcggaatgactcgcgtcgtccgtgtccaggaccgcaatgaatcccgacgtgtcaataaaaatgctcattcgccaaatatctctatcaggtaggaatcgtgagaagttgccaggtccttaacaccggatctaaagcaaccagcggccgccattgcccgtttccgacgctgctcatctccccctgcctgcttggccttggcaaaataatcaacagcctgtctgataatttcagccattgatttatgctgggctgcagccatttttttcagcaacaccacatgttcttccggtaactgtatctgtgttcttaccatatatgcctccgcaggtgattacactttacagaaatatgataacacttatgcggcaacatgtcaattttcgtatagcggctactgtgttgacaggtaaacagtattctgcaaaaattgcactgaatcgcactacactacaagaggtgaggaacaaacatggaaaagaacttgaaaactggtggcaagaaaggtttggtcacaccttcgacagccttactcaatcagaggctcgctaccttctcaaaaccgagaatgctgacagaatacgaaataaaattgctacggcagagcaaggttgaaattgccgaagcca

SEQ ID NO: 993 - DNA, 106489 bp, Artificial Sequence
  Synthetic Oligonucleotide
  misc_feature (1)..(89135): n is a, c, g, or t
nnnnnnnnnnnnnnnnnnnnnnnnnnnnnnnnnnnnnnnnnnnnnnnnnnnnnnnnnnnnnnnnnnnnnnnnnnnnnnnnnnnnnnnnnnnnnnnnnnnnnnnnnnnnnnnnnnnnnnnnnnnnnnnnnnnnnnnnnnnnnnnnnnnnnnnnnnnnnnnnnnnnnnnnnnnnnnnnnnnnnnnnnnnnnnnnnnnnnnnnnnnnnnnnnnnnnnnnnnnnnnnnnnnnnnnnnnnnnnnnnnnnnnnnnnnnnnnnnnnnnnnnnnnnnnnnnnnnnnnnnnnnnnnnnnnnnnnnnnnnnnnnnnnnnnnnnnnnnnnnnnnnnnnnnnnnnnnnnnnnnnnnnnnnnnnnnnnnnnnnnnnnnnnnnnnnnnnnnnnnnnnnnnnnnnnnnnnnnnnnnnnnnnnnnnnnnnnnnnnnnnnnnnnnnnnnnnnnnnnnnnnnnnnnnnnnnnnnnnnnnnnnnnnnnnnnnnnnnnnnnnnnnnnnnnnnnnnnnnnnnnnnnnnnnnnnnnnnnnnnnnnnnnnnnnnnnnnnnnnnnnnnnnnnnnnnnnnnnnnnnnnnnnnnnnnnnnnnnnnnnnnnnnnnnnnnnnnnnnnnnnnnnnnnnnnnnnnnnnnnnnnnnnnnnnnnnnnnnnnnnnnnnnnnnnnnnnnnnnnnnnnnnnnnnnnnnnnnnnnnnnnnnnnnnnnnnnnnnnnnnnnnnnnnnnnnnnnnnnnnnnnnnnnnnnnnnnnnnnnnnnnnnnnnnnnnnnnnnnnnnnnnnnnnnnnnnnnnnnnnnnnnnnnnnnnnnnnnnnnnnnnnnnnnnnnnnnnnnnnnnnnnnnnnnnnnnnnnnnnnnnnnnnnnnnnnnnnnnnnnnnnnnnnnnnnnnnnnnnnnnnnnnnnnnnnnnnnnnnnnnnnnnnnnnnnnnnnnnnnnnnnnnnnnnnnnnnnnnnnnnnnnnnnnnnnnnnnnnnnnnnnnnnnnnnnnnnnnnnnnnnnnnnnnnnnnnnnnnnnnnnnnnnnnnnnnnnnnnnnnnnnnnnnnnnnnnnnnnnnnnnnnnnnnnnnnnnnnnnnnnnnnnnnnnnnnnnnnnnnnnnnnnnnnnnnnnnnnnnnnnnnnnnnnnnnnnnnnnnnnnnnnnnnnnnnnnnnnnnnnnnnnnnnnnnnnnnnnnnnnnnnnnnnnnnnnnnnnnnnnnnnnnnnnnnnnnnnnnnnnnnnnnnnnnnnnnnnnnnnnnnnnnnnnnnnnnnnnnnnnnnnnnnnnnnnnnnnnnnnnnnnnnnnnnnnnnnnnnnnnnnnnnnnnnnnnnnnnnnnnnnnnnnnnnnnnnnnnnnnnnnnnnnnnnnnnnnnnnnnnnnnnnnnnnnnnnnnnnnnnnnnnnnnnnnnnnnnnnnnnnnnnnnnnnnnnnnnnnnnnnnnnnnnnnnnnnnnnnnnnnnnnnnnnnnnnnnnnnnnnnnnnnnnnnnnnnnnnnnnnnnnnnnnnnnnnnnnnnnnnnnnnnnnnnnnnnnnnnnnnnnnnnnnnnnnnnnnnnnnnnnnnnnnnnnnnnnnnnnnnnnnnnnnnnnnnnnnnnnnnnnnnnnnnnnnnnnnnnnnnnnnnnnnnnnnnnnnnnnnnnnnnnnnnnnnnnnnnnnnnnnnnnnnnnnnnnnnnnnnnnnnnnnnnnnnnnnnnnnnnnnnnnnnnnnnnnnnnnnnnnnnnnnnnnnnnnnnnnnnnnnnnnnnnnnnnnnnnnnnnnnnnnnnnnnnnnnnnnnnnnnnnnnnnnnnnnnnnnnnnnnnnnnnnnnnnnnnnnnnnnnnnnnnnnnnnnnnnnnnnnnnnnnnnnnnnnnnnnnnnnnnnnnnnnnnnnnnnnnnnnnnnnnnnnnnnnnnnnnnnnnnnnnnnnnnnnnnnnnnnnnnnnnnnnnnnnnnnnnnnnnnnnnnnnnnnnnnnnnnnnnnnnnnnnnnnnnnnnnnnnnnnnnnnnnnnnnnnnnnnnnnnnnnnnnnnnnnnnnnnnnnnnnnnnnnnnnnnnnnnnnnnnnnnnnnnnnnnnnnnnnnnnnnnnnnnnnnnnnnnnnnnnnnnnnnnnnnnnnnnnnnnnnnnnnnnnnnnnnnnnnnnnnnnnnnnnnnnnnnnnnnnnnnnnnnnnnnnnnnnnnnnnnnnnnnnnnnnnnnnnnnnnnnnnnnnnnnnnnnnnnnnnnnnnnnnnnnnnnnnnnnnnnnnnnnnnnnnnnnnnnnnnnnnnnnnnnnnnnnnnnnnnnnnnnnnnnnnnnnnnnnnnnnnnnnnnnnnnnnnnnnnnnnnnnnnnnnnnnnnnnnnnnnnnnnnnnnnnnnnnnnnnnnnnnnnnnnnnnnnnnnnnnnnnnnnnnnnnnnnnnnnnnnnnnnnnnnnnnnnnnnnnnnnnnnnnnnnnnnnnnnnnnnnnnnnnnnnnnnnnnnnnnnnnnnnnnnnnnnnnnnnnnnnnnnnnnnnnnnnnnnnnnnnnnnnnnnnnnnnnnnnnnnnnnnnnnnnnnnnnnnnnnnnnnnnnnnnnnnnnnnnnnnnnnnnnnnnnnnnnnnnnnnnnnnnnnnnnnnnnnnnnnnnnnnnnnnnnnnnnnnnnnnnnnnnnnnnnnnnnnnnnnnnnnnnnnnnnnnnnnnnnnnnnnnnnnnnnnnnnnnnnnnnnnnnnnnnnnnnnnnnnnnnnnnnnnnnnnnnnnnnnnnnnnnnnnnnnnnnnnnnnnnnnnnnnnnnnnnnnnnnnnnnnnnnnnnnnnnnnnnnnnnnnnnnnnnnnnnnnnnnnnnnnnnnnnnnnnnnnnnnnnnnnnnnnnnnnnnnnnnnnnnnnnnnnnnnnnnnnnnnnnnnnnnnnnnnnnnnnnnnnnnnnnnnnnnnnnnnnnnnnnnnnnnnnnnnnnnnnnnnnnnnnnnnnnnnnnnnnnnnnnnnnnnnnnnnnnnnnnnnnnnnnnnnnnnnnnnnnnnnnnnnnnnnnnnnnnnnnnnnnnnnnnnnnnnnnnnnnnnnnnnnnnnnnnnnnnnnnnnnnnnnnnnnnnnnnnnnnnnnnnnnnnnnnnnnnnnnnnnnnnnnnnnnnnnnnnnnnnnnnnnnnnnnnnnnnnnnnnnnnnnnnnnnnnnnnnnnnnnnnnnnnnnnnnnnnnnnnnnnnnnnnnnnnnnnnnnnnnnnnnnnnnnnnnnnnnnnnnnnnnnnnnnnnnnnnnnnnnnnnnnnnnnnnnnnnnnnnnnnnnnnnnnnnnnnnnnnnnnnnnnnnnnnnnnnnnnnnnnnnnnnnnnnnnnnnnnnnnnnnnnnnnnnnnnnnnnnnnnnnnnnnnnnnnnnnnnnnnnnnnnnnnnnnnnnnnnnnnnnnnnnnnnnnnnnnnnnnnnnnnnnnnnnnnnnnnnnnnnnnnnnnnnnnnnnnnnnnnnnnnnnnnnnnnnnnnnnnnnnnnnnnnnnnnnnnnnnnnnnnnnnnnnnnnnnnnnnnnnnnnnnnnnnnnnnnnnnnnnnnnnnnnnnnnnnnnnnnnnnnnnnnnnnnnnnnnnnnnnnnnnnnnnnnnnnnnnnnnnnnnnnnnnnnnnnnnnnnnnnnnnnnnnnnnnnnnnnnnnnnnnnnnnnnnnnnnnnnnnnnnnnnnnnnnnnnnnnnnnnnnnnnnnnnnnnnnnnnnnnnnnnnnnnnnnnnnnnnnnnnnnnnnnnnnnnnnnnnnnnnnnnnnnnnnnnnnnnnnnnnnnnnnnnnnnnnnnnnnnnnnnnnnnnnnnnnnnnnnnnnnnnnnnnnnnnnnnnnnnnnnnnnnnnnnnnnnnnnnnnnnnnnnnnnnnnnnnnnnnnnnnnnnnnnnnnnnnnnnnnnnnnnnnnnnnnnnnnnnnnnnnnnnnnnnnnnnnnnnnnnnnnnnnnnnnnnnnnnnnnnnnnnnnnnnnnnnnnnnnnnnnnnnnnnnnnnnnnnnnnnnnnnnnnnnnnnnnnnnnnnnnnnnnnnnnnnnnnnnnnnnnnnnnnnnnnnnnnnnnnnnnnnnnnnnnnnnnnnnnnnnnnnnnnnnnnnnnnnnnnnnnnnnnnnnnnnnnnnnnnnnnnnnnnnnnnnnnnnnnnnnnnnnnnnnnnnnnnnnnnnnnnnnnnnnnnnnnnnnnnnnnnnnnnnnnnnnnnnnnnnnnnnnnnnnnnnnnnnnnnnnnnnnnnnnnnnnnnnnnnnnnnnnnnnnnnnnnnnnnnnnnnnnnnnnnnnnnnnnnnnnnnnnnnnnnnnnnnnnnnnnnnnnnnnnnnnnnnnnnnnnnnnnnnnnnnnnnnnnnnnnnnnnnnnnnnnnnnnnnnnnnnnnnnnnnnnnnnnnnnnnnnnnnnnnnnnnnnnnnnnnnnnnnnnnnnnnnnnnnnnnnnnnnnnnnnnnnnnnnnnnnnnnnnnnnnnnnnnnnnnnnnnnnnnnnnnnnnnnnnnnnnnnnnnnnnnnnnnnnnnnnnnnnnnnnnnnnnnnnnnnnnnnnnnnnnnnnnnnnnnnnnnnnnnnnnnnnnnnnnnnnnnnnnnnnnnnnnnnnnnnnnnnnnnnnnnnnnnnnnnnnnnnnnnnnnnnnnnnnnnnnnnnnnnnnnnnnnnnnnnnnnnnnnnnnnnnnnnnnnnnnnnnnnnnnnnnnnnnnnnnnnnnnnnnnnnnnnnnnnnnnnnnnnnnnnnnnnnnnnnnnnnnnnnnnnnnnnnnnnnnnnnnnnnnnnnnnnnnnnnnnnnnnnnnnnnnnnnnnnnnnnnnnnnnnnnnnnnnnnnnnnnnnnnnnnnnnnnnnnnnnnnnnnnnnnnnnnnnnnnnnnnnnnnnnnnnnnnnnnnnnnnnnnnnnnnnnnnnnnnnnnnnnnnnnnnnnnnnnnnnnnnnnnnnnnnnnnnnnnnnnnnnnnnnnnnnnnnnnnnnnnnnnnnnnnnnnnnnnnnnnnnnnnnnnnnnnnnnnnnnnnnnnnnnnnnnnnnnnnnnnnnnnnnnnnnnnnnnnnnnnnnnnnnnnnnnnnnnnnnnnnnnnnnnnnnnnnnnnnnnnnnnnnnnnnnnnnnnnnnnnnnnnnnnnnnnnnnnnnnnnnnnnnnnnnnnnnnnnnnnnnnnnnnnnnnnnnnnnnnnnnnnnnnnnnnnnnnnnnnnnnnnnnnnnnnnnnnnnnnnnnnnnnnnnnnnnnnnnnnnnnnnnnnnnnnnnnnnnnnnnnnnnnnnnnnnnnnnnnnnnnnnnnnnnnnnnnnnnnnnnnnnnnnnnnnnnnnnnnnnnnnnnnnnnnnnnnnnnnnnnnnnnnnnnnnnnnnnnnnnnnnnnnnnnnnnnnnnnnnnnnnnnnnnnnnnnnnnnnnnnnnnnnnnnnnnnnnnnnnnnnnnnnnnnnnnnnnnnnnnnnnnnnnnnnnnnnnnnnnnnnnnnnnnnnnnnnnnnnnnnnnnnnnnnnnnnnnnnnnnnnnnnnnnnnnnnnnnnnnnnnnnnnnnnnnnnnnnnnnnnnnnnnnnnnnnnnnnnnnnnnnnnnnnnnnnnnnnnnnnnnnnnnnnnnnnnnnnnnnnnnnnnnnnnnnnnnnnnnnnnnnnnnnnnnnnnnnnnnnnnnnnnnnnnnnnnnnnnnnnnnnnnnnnnnnnnnnnnnnnnnnnnnnnnnnnnnnnnnnnnnnnnnnnnnnnnnnnnnnnnnnnnnnnnnnnnnnnnnnnnnnnnnnnnnnnnnnnnnnnnnnnnnnnnnnnnnnnnnnnnnnnnnnnnnnnnnnnnnnnnnnnnnnnnnnnnnnnnnnnnnnnnnnnnnnnnnnnnnnnnnnnnnnnnnnnnnnnnnnnnnnnnnnnnnnnnnnnnnnnnnnnnnnnnnnnnnnnnnnnnnnnnnnnnnnnnnnnnnnnnnnnnnnnnnnnnnnnnnnnnnnnnnnnnnnnnnnnnnnnnnnnnnnnnnnnnnnnnnnnnnnnnnnnnnnnnnnnnnnnnnnnnnnnnnnnnnnnnnnnnnnnnnnnnnnnnnnnnnnnnnnnnnnnnnnnnnnnnnnnnnnnnnnnnnnnnnnnnnnnnnnnnnnnnnnnnnnnnnnnnnnnnnnnnnnnnnnnnnnnnnnnnnnnnnnnnnnnnnnnnnnnnnnnnnnnnnnnnnnnnnnnnnnnnnnnnnnnnnnnnnnnnnnnnnnnnnnnnnnnnnnnnnnnnnnnnnnnnnnnnnnnnnnnnnnnnnnnnnnnnnnnnnnnnnnnnnnnnnnnnnnnnnnnnnnnnnnnnnnnnnnnnnnnnnnnnnnnnnnnnnnnnnnnnnnnnnnnnnnnnnnnnnnnnnnnnnnnnnnnnnnnnnnnnnnnnnnnnnnnnnnnnnnnnnnnnnnnnnnnnnnnnnnnnnnnnnnnnnnnnnnnnnnnnnnnnnnnnnnnnnnnnnnnnnnnnnnnnnnnnnnnnnnnnnnnnnnnnnnnnnnnnnnnnnnnnnnnnnnnnnnnnnnnnnnnnnnnnnnnnnnnnnnnnnnnnnnnnnnnnnnnnnnnnnnnnnnnnnnnnnnnnnnnnnnnnnnnnnnnnnnnnnnnnnnnnnnnnnnnnnnnnnnnnnnnnnnnnnnnnnnnnnnnnnnnnnnnnnnnnnnnnnnnnnnnnnnnnnnnnnnnnnnnnnnnnnnnnnnnnnnnnnnnnnnnnnnnnnnnnnnnnnnnnnnnnnnnnnnnnnnnnnnnnnnnnnnnnnnnnnnnnnnnnnnnnnnnnnnnnnnnnnnnnnnnnnnnnnnnnnnnnnnnnnnnnnnnnnnnnnnnnnnnnnnnnnnnnnnnnnnnnnnnnnnnnnnnnnnnnnnnnnnnnnnnnnnnnnnnnnnnnnnnnnnnnnnnnnnnnnnnnnnnnnnnnnnnnnnnnnnnnnnnnnnnnnnnnnnnnnnnnnnnnnnnnnnnnnnnnnnnnnnnnnnnnnnnnnnnnnnnnnnnnnnnnnnnnnnnnnnnnnnnnnnnnnnnnnnnnnnnnnnnnnnnnnnnnnnnnnnnnnnnnnnnnnnnnnnnnnnnnnnnnnnnnnnnnnnnnnnnnnnnnnnnnnnnnnnnnnnnnnnnnnnnnnnnnnnnnnnnnnnnnnnnnnnnnnnnnnnnnnnnnnnnnnnnnnnnnnnnnnnnnnnnnnnnnnnnnnnnnnnnnnnnnnnnnnnnnnnnnnnnnnnnnnnnnnnnnnnnnnnnnnnnnnnnnnnnnnnnnnnnnnnnnnnnnnnnnnnnnnnnnnnnnnnnnnnnnnnnnnnnnnnnnnnnnnnnnnnnnnnnnnnnnnnnnnnnnnnnnnnnnnnnnnnnnnnnnnnnnnnnnnnnnnnnnnnnnnnnnnnnnnnnnnnnnnnnnnnnnnnnnnnnnnnnnnnnnnnnnnnnnnnnnnnnnnnnnnnnnnnnnnnnnnnnnnnnnnnnnnnnnnnnnnnnnnnnnnnnnnnnnnnnnnnnnnnnnnnnnnnnnnnnnnnnnnnnnnnnnnnnnnnnnnnnnnnnnnnnnnnnnnnnnnnnnnnnnnnnnnnnnnnnnnnnnnnnnnnnnnnnnnnnnnnnnnnnnnnnnnnnnnnnnnnnnnnnnnnnnnnnnnnnnnnnnnnnnnnnnnnnnnnnnnnnnnnnnnnnnnnnnnnnnnnnnnnnnnnnnnnnnnnnnnnnnnnnnnnnnnnnnnnnnnnnnnnnnnnnnnnnnnnnnnnnnnnnnnnnnnnnnnnnnnnnnnnnnnnnnnnnnnnnnnnnnnnnnnnnnnnnnnnnnnnnnnnnnnnnnnnnnnnnnnnnnnnnnnnnnnnnnnnnnnnnnnnnnnnnnnnnnnnnnnnnnnnnnnnnnnnnnnnnnnnnnnnnnnnnnnnnnnnnnnnnnnnnnnnnnnnnnnnnnnnnnnnnnnnnnnnnnnnnnnnnnnnnnnnnnnnnnnnnnnnnnnnnnnnnnnnnnnnnnnnnnnnnnnnnnnnnnnnnnnnnnnnnnnnnnnnnnnnnnnnnnnnnnnnnnnnnnnnnnnnnnnnnnnnnnnnnnnnnnnnnnnnnnnnnnnnnnnnnnnnnnnnnnnnnnnnnnnnnnnnnnnnnnnnnnnnnnnnnnnnnnnnnnnnnnnnnnnnnnnnnnnnnnnnnnnnnnnnnnnnnnnnnnnnnnnnnnnnnnnnnnnnnnnnnnnnnnnnnnnnnnnnnnnnnnnnnnnnnnnnnnnnnnnnnnnnnnnnnnnnnnnnnnnnnnnnnnnnnnnnnnnnnnnnnnnnnnnnnnnnnnnnnnnnnnnnnnnnnnnnnnnnnnnnnnnnnnnnnnnnnnnnnnnnnnnnnnnnnnnnnnnnnnnnnnnnnnnnnnnnnnnnnnnnnnnnnnnnnnnnnnnnnnnnnnnnnnnnnnnnnnnnnnnnnnnnnnnnnnnnnnnnnnnnnnnnnnnnnnnnnnnnnnnnnnnnnnnnnnnnnnnnnnnnnnnnnnnnnnnnnnnnnnnnnnnnnnnnnnnnnnnnnnnnnnnnnnnnnnnnnnnnnnnnnnnnnnnnnnnnnnnnnnnnnnnnnnnnnnnnnnnnnnnnnnnnnnnnnnnnnnnnnnnnnnnnnnnnnnnnnnnnnnnnnnnnnnnnnnnnnnnnnnnnnnnnnnnnnnnnnnnnnnnnnnnnnnnnnnnnnnnnnnnnnnnnnnnnnnnnnnnnnnnnnnnnnnnnnnnnnnnnnnnnnnnnnnnnnnnnnnnnnnnnnnnnnnnnnnnnnnnnnnnnnnnnnnnnnnnnnnnnnnnnnnnnnnnnnnnnnnnnnnnnnnnnnnnnnnnnnnnnnnnnnnnnnnnnnnnnnnnnnnnnnnnnnnnnnnnnnnnnnnnnnnnnnnnnnnnnnnnnnnnnnnnnnnnnnnnnnnnnnnnnnnnnnnnnnnnnnnnnnnnnnnnnnnnnnnnnnnnnnnnnnnnnnnnnnnnnnnnnnnnnnnnnnnnnnnnnnnnnnnnnnnnnnnnnnnnnnnnnnnnnnnnnnnnnnnnnnnnnnnnnnnnnnnnnnnnnnnnnnnnnnnnnnnnnnnnnnnnnnnnnnnnnnnnnnnnnnnnnnnnnnnnnnnnnnnnnnnnnnnnnnnnnnnnnnnnnnnnnnnnnnnnnnnnnnnnnnnnnnnnnnnnnnnnnnnnnnnnnnnnnnnnnnnnnnnnnnnnnnnnnnnnnnnnnnnnnnnnnnnnnnnnnnnnnnnnnnnnnnnnnnnnnnnnnnnnnnnnnnnnnnnnnnnnnnnnnnnnnnnnnnnnnnnnnnnnnnnnnnnnnnnnnnnnnnnnnnnnnnnnnnnnnnnnnnnnnnnnnnnnnnnnnnnnnnnnnnnnnnnnnnnnnnnnnnnnnnnnnnnnnnnnnnnnnnnnnnnnnnnnnnnnnnnnnnnnnnnnnnnnnnnnnnnnnnnnnnnnnnnnnnnnnnnnnnnnnnnnnnnnnnnnnnnnnnnnnnnnnnnnnnnnnnnnnnnnnnnnnnnnnnnnnnnnnnnnnnnnnnnnnnnnnnnnnnnnnnnnnnnnnnnnnnnnnnnnnnnnnnnnnnnnnnnnnnnnnnnnnnnnnnnnnnnnnnnnnnnnnnnnnnnnnnnnnnnnnnnnnnnnnnnnnnnnnnnnnnnnnnnnnnnnnnnnnnnnnnnnnnnnnnnnnnnnnnnnnnnnnnnnnnnnnnnnnnnnnnnnnnnnnnnnnnnnnnnnnnnnnnnnnnnnnnnnnnnnnnnnnnnnnnnnnnnnnnnnnnnnnnnnnnnnnnnnnnnnnnnnnnnnnnnnnnnnnnnnnnnnnnnnnnnnnnnnnnnnnnnnnnnnnnnnnnnnnnnnnnnnnnnnnnnnnnnnnnnnnnnnnnnnnnnnnnnnnnnnnnnnnnnnnnnnnnnnnnnnnnnnnnnnnnnnnnnnnnnnnnnnnnnnnnnnnnnnnnnnnnnnnnnnnnnnnnnnnnnnnnnnnnnnnnnnnnnnnnnnnnnnnnnnnnnnnnnnnnnnnnnnnnnnnnnnnnnnnnnnnnnnnnnnnnnnnnnnnnnnnnnnnnnnnnnnnnnnnnnnnnnnnnnnnnnnnnnnnnnnnnnnnnnnnnnnnnnnnnnnnnnnnnnnnnnnnnnnnnnnnnnnnnnnnnnnnnnnnnnnnnnnnnnnnnnnnnnnnnnnnnnnnnnnnnnnnnnnnnnnnnnnnnnnnnnnnnnnnnnnnnnnnnnnnnnnnnnnnnnnnnnnnnnnnnnnnnnnnnnnnnnnnnnnnnnnnnnnnnnnnnnnnnnnnnnnnnnnnnnnnnnnnnnnnnnnnnnnnnnnnnnnnnnnnnnnnnnnnnnnnnnnnnnnnnnnnnnnnnnnnnnnnnnnnnnnnnnnnnnnnnnnnnnnnnnnnnnnnnnnnnnnnnnnnnnnnnnnnnnnnnnnnnnnnnnnnnnnnnnnnnnnnnnnnnnnnnnnnnnnnnnnnnnnnnnnnnnnnnnnnnnnnnnnnnnnnnnnnnnnnnnnnnnnnnnnnnnnnnnnnnnnnnnnnnnnnnnnnnnnnnnnnnnnnnnnnnnnnnnnnnnnnnnnnnnnnnnnnnnnnnnnnnnnnnnnnnnnnnnnnnnnnnnnnnnnnnnnnnnnnnnnnnnnnnnnnnnnnnnnnnnnnnnnnnnnnnnnnnnnnnnnnnnnnnnnnnnnnnnnnnnnnnnnnnnnnnnnnnnnnnnnnnnnnnnnnnnnnnnnnnnnnnnnnnnnnnnnnnnnnnnnnnnnnnnnnnnnnnnnnnnnnnnnnnnnnnnnnnnnnnnnnnnnnnnnnnnnnnnnnnnnnnnnnnnnnnnnnnnnnnnnnnnnnnnnnnnnnnnnnnnnnnnnnnnnnnnnnnnnnnnnnnnnnnnnnnnnnnnnnnnnnnnnnnnnnnnnnnnnnnnnnnnnnnnnnnnnnnnnnnnnnnnnnnnnnnnnnnnnnnnnnnnnnnnnnnnnnnnnnnnnnnnnnnnnnnnnnnnnnnnnnnnnnnnnnnnnnnnnnnnnnnnnnnnnnnnnnnnnnnnnnnnnnnnnnnnnnnnnnnnnnnnnnnnnnnnnnnnnnnnnnnnnnnnnnnnnnnnnnnnnnnnnnnnnnnnnnnnnnnnnnnnnnnnnnnnnnnnnnnnnnnnnnnnnnnnnnnnnnnnnnnnnnnnnnnnnnnnnnnnnnnnnnnnnnnnnnnnnnnnnnnnnnnnnnnnnnnnnnnnnnnnnnnnnnnnnnnnnnnnnnnnnnnnnnnnnnnnnnnnnnnnnnnnnnnnnnnnnnnnnnnnnnnnnnnnnnnnnnnnnnnnnnnnnnnnnnnnnnnnnnnnnnnnnnnnnnnnnnnnnnnnnnnnnnnnnnnnnnnnnnnnnnnnnnnnnnnnnnnnnnnnnnnnnnnnnnnnnnnnnnnnnnnnnnnnnnnnnnnnnnnnnnnnnnnnnnnnnnnnnnnnnnnnnnnnnnnnnnnnnnnnnnnnnnnnnnnnnnnnnnnnnnnnnnnnnnnnnnnnnnnnnnnnnnnnnnnnnnnnnnnnnnnnnnnnnnnnnnnnnnnnnnnnnnnnnnnnnnnnnnnnnnnnnnnnnnnnnnnnnnnnnnnnnnnnnnnnnnnnnnnnnnnnnnnnnnnnnnnnnnnnnnnnnnnnnnnnnnnnnnnnnnnnnnnnnnnnnnnnnnnnnnnnnnnnnnnnnnnnnnnnnnnnnnnnnnnnnnnnnnnnnnnnnnnnnnnnnnnnnnnnnnnnnnnnnnnnnnnnnnnnnnnnnnnnnnnnnnnnnnnnnnnnnnnnnnnnnnnnnnnnnnnnnnnnnnnnnnnnnnnnnnnnnnnnnnnnnnnnnnnnnnnnnnnnnnnnnnnnnnnnnnnnnnnnnnnnnnnnnnnnnnnnnnnnnnnnnnnnnnnnnnnnnnnnnnnnnnnnnnnnnnnnnnnnnnnnnnnnnnnnnnnnnnnnnnnnnnnnnnnnnnnnnnnnnnnnnnnnnnnnnnnnnnnnnnnnnnnnnnnnnnnnnnnnnnnnnnnnnnnnnnnnnnnnnnnnnnnnnnnnnnnnnnnnnnnnnnnnnnnnnnnnnnnnnnnnnnnnnnnnnnnnnnnnnnnnnnnnnnnnnnnnnnnnnnnnnnnnnnnnnnnnnnnnnnnnnnnnnnnnnnnnnnnnnnnnnnnnnnnnnnnnnnnnnnnnnnnnnnnnnnnnnnnnnnnnnnnnnnnnnnnnnnnnnnnnnnnnnnnnnnnnnnnnnnnnnnnnnnnnnnnnnnnnnnnnnnnnnnnnnnnnnnnnnnnnnnnnnnnnnnnnnnnnnnnnnnnnnnnnnnnnnnnnnnnnnnnnnnnnnnnnnnnnnnnnnnnnnnnnnnnnnnnnnnnnnnnnnnnnnnnnnnnnnnnnnnnnnnnnnnnnnnnnnnnnnnnnnnnnnnnnnnnnnnnnnnnnnnnnnnnnnnnnnnnnnnnnnnnnnnnnnnnnnnnnnnnnnnnnnnnnnnnnnnnnnnnnnnnnnnnnnnnnnnnnnnnnnnnnnnnnnnnnnnnnnnnnnnnnnnnnnnnnnnnnnnnnnnnnnnnnnnnnnnnnnnnnnnnnnnnnnnnnnnnnnnnnnnnnnnnnnnnnnnnnnnnnnnnnnnnnnnnnnnnnnnnnnnnnnnnnnnnnnnnnnnnnnnnnnnnnnnnnnnnnnnnnnnnnnnnnnnnnnnnnnnnnnnnnnnnnnnnnnnnnnnnnnnnnnnnnnnnnnnnnnnnnnnnnnnnnnnnnnnnnnnnnnnnnnnnnnnnnnnnnnnnnnnnnnnnnnnnnnnnnnnnnnnnnnnnnnnnnnnnnnnnnnnnnnnnnnnnnnnnnnnnnnnnnnnnnnnnnnnnnnnnnnnnnnnnnnnnnnnnnnnnnnnnnnnnnnnnnnnnnnnnnnnnnnnnnnnnnnnnnnnnnnnnnnnnnnnnnnnnnnnnnnnnnnnnnnnnnnnnnnnnnnnnnnnnnnnnnnnnnnnnnnnnnnnnnnnnnnnnnnnnnnnnnnnnnnnnnnnnnnnnnnnnnnnnnnnnnnnnnnnnnnnnnnnnnnnnnnnnnnnnnnnnnnnnnnnnnnnnnnnnnnnnnnnnnnnnnnnnnnnnnnnnnnnnnnnnnnnnnnnnnnnnnnnnnnnnnnnnnnnnnnnnnnnnnnnnnnnnnnnnnnnnnnnnnnnnnnnnnnnnnnnnnnnnnnnnnnnnnnnnnnnnnnnnnnnnnnnnnnnnnnnnnnnnnnnnnnnnnnnnnnnnnnnnnnnnnnnnnnnnnnnnnnnnnnnnnnnnnnnnnnnnnnnnnnnnnnnnnnnnnnnnnnnnnnnnnnnnnnnnnnnnnnnnnnnnnnnnnnnnnnnnnnnnnnnnnnnnnnnnnnnnnnnnnnnnnnnnnnnnnnnnnnnnnnnnnnnnnnnnnnnnnnnnnnnnnnnnnnnnnnnnnnnnnnnnnnnnnnnnnnnnnnnnnnnnnnnnnnnnnnnnnnnnnnnnnnnnnnnnnnnnnnnnnnnnnnnnnnnnnnnnnnnnnnnnnnnnnnnnnnnnnnnnnnnnnnnnnnnnnnnnnnnnnnnnnnnnnnnnnnnnnnnnnnnnnnnnnnnnnnnnnnnnnnnnnnnnnnnnnnnnnnnnnnnnnnnnnnnnnnnnnnnnnnnnnnnnnnnnnnnnnnnnnnnnnnnnnnnnnnnnnnnnnnnnnnnnnnnnnnnnnnnnnnnnnnnnnnnnnnnnnnnnnnnnnnnnnnnnnnnnnnnnnnnnnnnnnnnnnnnnnnnnnnnnnnnnnnnnnnnnnnnnnnnnnnnnnnnnnnnnnnnnnnnnnnnnnnnnnnnnnnnnnnnnnnnnnnnnnnnnnnnnnnnnnnnnnnnnnnnnnnnnnnnnnnnnnnnnnnnnnnnnnnnnnnnnnnnnnnnnnnnnnnnnnnnnnnnnnnnnnnnnnnnnnnnnnnnnnnnnnnnnnnnnnnnnnnnnnnnnnnnnnnnnnnnnnnnnnnnnnnnnnnnnnnnnnnnnnnnnnnnnnnnnnnnnnnnnnnnnnnnnnnnnnnnnnnnnnnnnnnnnnnnnnnnnnnnnnnnnnnnnnnnnnnnnnnnnnnnnnnnnnnnnnnnnnnnnnnnnnnnnnnnnnnnnnnnnnnnnnnnnnnnnnnnnnnnnnnnnnnnnnnnnnnnnnnnnnnnnnnnnnnnnnnnnnnnnnnnnnnnnnnnnnnnnnnnnnnnnnnnnnnnnnnnnnnnnnnnnnnnnnnnnnnnnnnnnnnnnnnnnnnnnnnnnnnnnnnnnnnnnnnnnnnnnnnnnnnnnnnnnnnnnnnnnnnnnnnnnnnnnnnnnnnnnnnnnnnnnnnnnnnnnnnnnnnnnnnnnnnnnnnnnnnnnnnnnnnnnnnnnnnnnnnnnnnnnnnnnnnnnnnnnnnnnnnnnnnnnnnnnnnnnnnnnnnnnnnnnnnnnnnnnnnnnnnnnnnnnnnnnnnnnnnnnnnnnnnnnnnnnnnnnnnnnnnnnnnnnnnnnnnnnnnnnnnnnnnnnnnnnnnnnnnnnnnnnnnnnnnnnnnnnnnnnnnnnnnnnnnnnnnnnnnnnnnnnnnnnnnnnnnnnnnnnnnnnnnnnnnnnnnnnnnnnnnnnnnnnnnnnnnnnnnnnnnnnnnnnnnnnnnnnnnnnnnnnnnnnnnnnnnnnnnnnnnnnnnnnnnnnnnnnnnnnnnnnnnnnnnnnnnnnnnnnnnnnnnnnnnnnnnnnnnnnnnnnnnnnnnnnnnnnnnnnnnnnnnnnnnnnnnnnnnnnnnnnnnnnnnnnnnnnnnnnnnnnnnnnnnnnnnnnnnnnnnnnnnnnnnnnnnnnnnnnnnnnnnnnnnnnnnnnnnnnnnnnnnnnnnnnnnnnnnnnnnnnnnnnnnnnnnnnnnnnnnnnnnnnnnnnnnnnnnnnnnnnnnnnnnnnnnnnnnnnnnnnnnnnnnnnnnnnnnnnnnnnnnnnnnnnnnnnnnnnnnnnnnnnnnnnnnnnnnnnnnnnnnnnnnnnnnnnnnnnnnnnnnnnnnnnnnnnnnnnnnnnnnnnnnnnnnnnnnnnnnnnnnnnnnnnnnnnnnnnnnnnnnnnnnnnnnnnnnnnnnnnnnnnnnnnnnnnnnnnnnnnnnnnnnnnnnnnnnnnnnnnnnnnnnnnnnnnnnnnnnnnnnnnnnnnnnnnnnnnnnnnnnnnnnnnnnnnnnnnnnnnnnnnnnnnnnnnnnnnnnnnnnnnnnnnnnnnnnnnnnnnnnnnnnnnnnnnnnnnnnnnnnnnnnnnnnnnnnnnnnnnnnnnnnnnnnnnnnnnnnnnnnnnnnnnnnnnnnnnnnnnnnnnnnnnnnnnnnnnnnnnnnnnnnnnnnnnnnnnnnnnnnnnnnnnnnnnnnnnnnnnnnnnnnnnnnnnnnnnnnnnnnnnnnnnnnnnnnnnnnnnnnnnnnnnnnnnnnnnnnnnnnnnnnnnnnnnnnnnnnnnnnnnnnnnnnnnnnnnnnnnnnnnnnnnnnnnnnnnnnnnnnnnnnnnnnnnnnnnnnnnnnnnnnnnnnnnnnnnnnnnnnnnnnnnnnnnnnnnnnnnnnnnnnnnnnnnnnnnnnnnnnnnnnnnnnnnnnnnnnnnnnnnnnnnnnnnnnnnnnnnnnnnnnnnnnnnnnnnnnnnnnnnnnnnnnnnnnnnnnnnnnnnnnnnnnnnnnnnnnnnnnnnnnnnnnnnnnnnnnnnnnnnnnnnnnnnnnnnnnnnnnnnnnnnnnnnnnnnnnnnnnnnnnnnnnnnnnnnnnnnnnnnnnnnnnnnnnnnnnnnnnnnnnnnnnnnnnnnnnnnnnnnnnnnnnnnnnnnnnnnnnnnnnnnnnnnnnnnnnnnnnnnnnnnnnnnnnnnnnnnnnnnnnnnnnnnnnnnnnnnnnnnnnnnnnnnnnnnnnnnnnnnnnnnnnnnnnnnnnnnnnnnnnnnnnnnnnnnnnnnnnnnnnnnnnnnnnnnnnnnnnnnnnnnnnnnnnnnnnnnnnnnnnnnnnnnnnnnnnnnnnnnnnnnnnnnnnnnnnnnnnnnnnnnnnnnnnnnnnnnnnnnnnnnnnnnnnnnnnnnnnnnnnnnnnnnnnnnnnnnnnnnnnnnnnnnnnnnnnnnnnnnnnnnnnnnnnnnnnnnnnnnnnnnnnnnnnnnnnnnnnnnnnnnnnnnnnnnnnnnnnnnnnnnnnnnnnnnnnnnnnnnnnnnnnnnnnnnnnnnnnnnnnnnnnnnnnnnnnnnnnnnnnnnnnnnnnnnnnnnnnnnnnnnnnnnnnnnnnnnnnnnnnnnnnnnnnnnnnnnnnnnnnnnnnnnnnnnnnnnnnnnnnnnnnnnnnnnnnnnnnnnnnnnnnnnnnnnnnnnnnnnnnnnnnnnnnnnnnnnnnnnnnnnnnnnnnnnnnnnnnnnnnnnnnnnnnnnnnnnnnnnnnnnnnnnnnnnnnnnnnnnnnnnnnnnnnnnnnnnnnnnnnnnnnnnnnnnnnnnnnnnnnnnnnnnnnnnnnnnnnnnnnnnnnnnnnnnnnnnnnnnnnnnnnnnnnnnnnnnnnnnnnnnnnnnnnnnnnnnnnnnnnnnnnnnnnnnnnnnnnnnnnnnnnnnnnnnnnnnnnnnnnnnnnnnnnnnnnnnnnnnnnnnnnnnnnnnnnnnnnnnnnnnnnnnnnnnnnnnnnnnnnnnnnnnnnnnnnnnnnnnnnnnnnnnnnnnnnnnnnnnnnnnnnnnnnnnnnnnnnnnnnnnnnnnnnnnnnnnnnnnnnnnnnnnnnnnnnnnnnnnnnnnnnnnnnnnnnnnnnnnnnnnnnnnnnnnnnnnnnnnnnnnnnnnnnnnnnnnnnnnnnnnnnnnnnnnnnnnnnnnnnnnnnnnnnnnnnnnnnnnnnnnnnnnnnnnnnnnnnnnnnnnnnnnnnnnnnnnnnnnnnnnnnnnnnnnnnnnnnnnnnnnnnnnnnnnnnnnnnnnnnnnnnnnnnnnnnnnnnnnnnnnnnnnnnnnnnnnnnnnnnnnnnnnnnnnnnnnnnnnnnnnnnnnnnnnnnnnnnnnnnnnnnnnnnnnnnnnnnnnnnnnnnnnnnnnnnnnnnnnnnnnnnnnnnnnnnnnnnnnnnnnnnnnnnnnnnnnnnnnnnnnnnnnnnnnnnnnnnnnnnnnnnnnnnnnnnnnnnnnnnnnnnnnnnnnnnnnnnnnnnnnnnnnnnnnnnnnnnnnnnnnnnnnnnnnnnnnnnnnnnnnnnnnnnnnnnnnnnnnnnnnnnnnnnnnnnnnnnnnnnnnnnnnnnnnnnnnnnnnnnnnnnnnnnnnnnnnnnnnnnnnnnnnnnnnnnnnnnnnnnnnnnnnnnnnnnnnnnnnnnnnnnnnnnnnnnnnnnnnnnnnnnnnnnnnnnnnnnnnnnnnnnnnnnnnnnnnnnnnnnnnnnnnnnnnnnnnnnnnnnnnnnnnnnnnnnnnnnnnnnnnnnnnnnnnnnnnnnnnnnnnnnnnnnnnnnnnnnnnnnnnnnnnnnnnnnnnnnnnnnnnnnnnnnnnnnnnnnnnnnnnnnnnnnnnnnnnnnnnnnnnnnnnnnnnnnnnnnnnnnnnnnnnnnnnnnnnnnnnnnnnnnnnnnnnnnnnnnnnnnnnnnnnnnnnnnnnnnnnnnnnnnnnnnnnnnnnnnnnnnnnnnnnnnnnnnnnnnnnnnnnnnnnnnnnnnnnnnnnnnnnnnnnnnnnnnnnnnnnnnnnnnnnnnnnnnnnnnnnnnnnnnnnnnnnnnnnnnnnnnnnnnnnnnnnnnnnnnnnnnnnnnnnnnnnnnnnnnnnnnnnnnnnnnnnnnnnnnnnnnnnnnnnnnnnnnnnnnnnnnnnnnnnnnnnnnnnnnnnnnnnnnnnnnnnnnnnnnnnnnnnnnnnnnnnnnnnnnnnnnnnnnnnnnnnnnnnnnnnnnnnnnnnnnnnnnnnnnnnnnnnnnnnnnnnnnnnnnnnnnnnnnnnnnnnnnnnnnnnnnnnnnnnnnnnnnnnnnnnnnnnnnnnnnnnnnnnnnnnnnnnnnnnnnnnnnnnnnnnnnnnnnnnnnnnnnnnnnnnnnnnnnnnnnnnnnnnnnnnnnnnnnnnnnnnnnnnnnnnnnnnnnnnnnnnnnnnnnnnnnnnnnnnnnnnnnnnnnnnnnnnnnnnnnnnnnnnnnnnnnnnnnnnnnnnnnnnnnnnnnnnnnnnnnnnnnnnnnnnnnnnnnnnnnnnnnnnnnnnnnnnnnnnnnnnnnnnnnnnnnnnnnnnnnnnnnnnnnnnnnnnnnnnnnnnnnnnnnnnnnnnnnnnnnnnnnnnnnnnnnnnnnnnnnnnnnnnnnnnnnnnnnnnnnnnnnnnnnnnnnnnnnnnnnnnnnnnnnnnnnnnnnnnnnnnnnnnnnnnnnnnnnnnnnnnnnnnnnnnnnnnnnnnnnnnnnnnnnnnnnnnnnnnnnnnnnnnnnnnnnnnnnnnnnnnnnnnnnnnnnnnnnnnnnnnnnnnnnnnnnnnnnnnnnnnnnnnnnnnnnnnnnnnnnnnnnnnnnnnnnnnnnnnnnnnnnnnnnnnnnnnnnnnnnnnnnnnnnnnnnnnnnnnnnnnnnnnnnnnnnnnnnnnnnnnnnnnnnnnnnnnnnnnnnnnnnnnnnnnnnnnnnnnnnnnnnnnnnnnnnnnnnnnnnnnnnnnnnnnnnnnnnnnnnnnnnnnnnnnnnnnnnnnnnnnnnnnnnnnnnnnnnnnnnnnnnnnnnnnnnnnnnnnnnnnnnnnnnnnnnnnnnnnnnnnnnnnnnnnnnnnnnnnnnnnnnnnnnnnnnnnnnnnnnnnnnnnnnnnnnnnnnnnnnnnnnnnnnnnnnnnnnnnnnnnnnnnnnnnnnnnnnnnnnnnnnnnnnnnnnnnnnnnnnnnnnnnnnnnnnnnnnnnnnnnnnnnnnnnnnnnnnnnnnnnnnnnnnnnnnnnnnnnnnnnnnnnnnnnnnnnnnnnnnnnnnnnnnnnnnnnnnnnnnnnnnnnnnnnnnnnnnnnnnnnnnnnnnnnnnnnnnnnnnnnnnnnnnnnnnnnnnnnnnnnnnnnnnnnnnnnnnnnnnnnnnnnnnnnnnnnnnnnnnnnnnnnnnnnnnnnnnnnnnnnnnnnnnnnnnnnnnnnnnnnnnnnnnnnnnnnnnnnnnnnnnnnnnnnnnnnnnnnnnnnnnnnnnnnnnnnnnnnnnnnnnnnnnnnnnnnnnnnnnnnnnnnnnnnnnnnnnnnnnnnnnnnnnnnnnnnnnnnnnnnnnnnnnnnnnnnnnnnnnnnnnnnnnnnnnnnnnnnnnnnnnnnnnnnnnnnnnnnnnnnnnnnnnnnnnnnnnnnnnnnnnnnnnnnnnnnnnnnnnnnnnnnnnnnnnnnnnnnnnnnnnnnnnnnnnnnnnnnnnnnnnnnnnnnnnnnnnnnnnnnnnnnnnnnnnnnnnnnnnnnnnnnnnnnnnnnnnnnnnnnnnnnnnnnnnnnnnnnnnnnnnnnnnnnnnnnnnnnnnnnnnnnnnnnnnnnnnnnnnnnnnnnnnnnnnnnnnnnnnnnnnnnnnnnnnnnnnnnnnnnnnnnnnnnnnnnnnnnnnnnnnnnnnnnnnnnnnnnnnnnnnnnnnnnnnnnnnnnnnnnnnnnnnnnnnnnnnnnnnnnnnnnnnnnnnnnnnnnnnnnnnnnnnnnnnnnnnnnnnnnnnnnnnnnnnnnnnnnnnnnnnnnnnnnnnnnnnnnnnnnnnnnnnnnnnnnnnnnnnnnnnnnnnnnnnnnnnnnnnnnnnnnnnnnnnnnnnnnnnnnnnnnnnnnnnnnnnnnnnnnnnnnnnnnnnnnnnnnnnnnnnnnnnnnnnnnnnnnnnnnnnnnnnnnnnnnnnnnnnnnnnnnnnnnnnnnnnnnnnnnnnnnnnnnnnnnnnnnnnnnnnnnnnnnnnnnnnnnnnnnnnnnnnnnnnnnnnnnnnnnnnnnnnnnnnnnnnnnnnnnnnnnnnnnnnnnnnnnnnnnnnnnnnnnnnnnnnnnnnnnnnnnnnnnnnnnnnnnnnnnnnnnnnnnnnnnnnnnnnnnnnnnnnnnnnnnnnnnnnnnnnnnnnnnnnnnnnnnnnnnnnnnnnnnnnnnnnnnnnnnnnnnnnnnnnnnnnnnnnnnnnnnnnnnnnnnnnnnnnnnnnnnnnnnnnnnnnnnnnnnnnnnnnnnnnnnnnnnnnnnnnnnnnnnnnnnnnnnnnnnnnnnnnnnnnnnnnnnnnnnnnnnnnnnnnnnnnnnnnnnnnnnnnnnnnnnnnnnnnnnnnnnnnnnnnnnnnnnnnnnnnnnnnnnnnnnnnnnnnnnnnnnnnnnnnnnnnnnnnnnnnnnnnnnnnnnnnnnnnnnnnnnnnnnnnnnnnnnnnnnnnnnnnnnnnnnnnnnnnnnnnnnnnnnnnnnnnnnnnnnnnnnnnnnnnnnnnnnnnnnnnnnnnnnnnnnnnnnnnnnnnnnnnnnnnnnnnnnnnnnnnnnnnnnnnnnnnnnnnnnnnnnnnnnnnnnnnnnnnnnnnnnnnnnnnnnnnnnnnnnnnnnnnnnnnnnnnnnnnnnnnnnnnnnnnnnnnnnnnnnnnnnnnnnnnnnnnnnnnnnnnnnnnnnnnnnnnnnnnnnnnnnnnnnnnnnnnnnnnnnnnnnnnnnnnnnnnnnnnnnnnnnnnnnnnnnnnnnnnnnnnnnnnnnnnnnnnnnnnnnnnnnnnnnnnnnnnnnnnnnnnnnnnnnnnnnnnnnnnnnnnnnnnnnnnnnnnnnnnnnnnnnnnnnnnnnnnnnnnnnnnnnnnnnnnnnnnnnnnnnnnnnnnnnnnnnnnnnnnnnnnnnnnnnnnnnnnnnnnnnnnnnnnnnnnnnnnnnnnnnnnnnnnnnnnnnnnnnnnnnnnnnnnnnnnnnnnnnnnnnnnnnnnnnnnnnnnnnnnnnnnnnnnnnnnnnnnnnnnnnnnnnnnnnnnnnnnnnnnnnnnnnnnnnnnnnnnnnnnnnnnnnnnnnnnnnnnnnnnnnnnnnnnnnnnnnnnnnnnnnnnnnnnnnnnnnnnnnnnnnnnnnnnnnnnnnnnnnnnnnnnnnnnnnnnnnnnnnnnnnnnnnnnnnnnnnnnnnnnnnnnnnnnnnnnnnnnnnnnnnnnnnnnnnnnnnnnnnnnnnnnnnnnnnnnnnnnnnnnnnnnnnnnnnnnnnnnnnnnnnnnnnnnnnnnnnnnnnnnnnnnnnnnnnnnnnnnnnnnnnnnnnnnnnnnnnnnnnnnnnnnnnnnnnnnnnnnnnnnnnnnnnnnnnnnnnnnnnnnnnnnnnnnnnnnnnnnnnnnnnnnnnnnnnnnnnnnnnnnnnnnnnnnnnnnnnnnnnnnnnnnnnnnnnnnnnnnnnnnnnnnnnnnnnnnnnnnnnnnnnnnnnnnnnnnnnnnnnnnnnnnnnnnnnnnnnnnnnnnnnnnnnnnnnnnnnnnnnnnnnnnnnnnnnnnnnnnnnnnnnnnnnnnnnnnnnnnnnnnnnnnnnnnnnnnnnnnnnnnnnnnnnnnnnnnnnnnnnnnnnnnnnnnnnnnnnnnnnnnnnnnnnnnnnnnnnnnnnnnnnnnnnnnnnnnnnnnnnnnnnnnnnnnnnnnnnnnnnnnnnnnnnnnnnnnnnnnnnnnnnnnnnnnnnnnnnnnnnnnnnnnnnnnnnnnnnnnnnnnnnnnnnnnnnnnnnnnnnnnnnnnnnnnnnnnnnnnnnnnnnnnnnnnnnnnnnnnnnnnnnnnnnnnnnnnnnnnnnnnnnnnnnnnnnnnnnnnnnnnnnnnnnnnnnnnnnnnnnnnnnnnnnnnnnnnnnnnnnnnnnnnnnnnnnnnnnnnnnnnnnnnnnnnnnnnnnnnnnnnnnnnnnnnnnnnnnnnnnnnnnnnnnnnnnnnnnnnnnnnnnnnnnnnnnnnnnnnnnnnnnnnnnnnnnnnnnnnnnnnnnnnnnnnnnnnnnnnnnnnnnnnnnnnnnnnnnnnnnnnnnnnnnnnnnnnnnnnnnnnnnnnnnnnnnnnnnnnnnnnnnnnnnnnnnnnnnnnnnnnnnnnnnnnnnnnnnnnnnnnnnnnnnnnnnnnnnnnnnnnnnnnnnnnnnnnnnnnnnnnnnnnnnnnnnnnnnnnnnnnnnnnnnnnnnnnnnnnnnnnnnnnnnnnnnnnnnnnnnnnnnnnnnnnnnnnnnnnnnnnnnnnnnnnnnnnnnnnnnnnnnnnnnnnnnnnnnnnnnnnnnnnnnnnnnnnnnnnnnnnnnnnnnnnnnnnnnnnnnnnnnnnnnnnnnnnnnnnnnnnnnnnnnnnnnnnnnnnnnnnnnnnnnnnnnnnnnnnnnnnnnnnnnnnnnnnnnnnnnnnnnnnnnnnnnnnnnnnnnnnnnnnnnnnnnnnnnnnnnnnnnnnnnnnnnnnnnnnnnnnnnnnnnnnnnnnnnnnnnnnnnnnnnnnnnnnnnnnnnnnnnnnnnnnnnnnnnnnnnnnnnnnnnnnnnnnnnnnnnnnnnnnnnnnnnnnnnnnnnnnnnnnnnnnnnnnnnnnnnnnnnnnnnnnnnnnnnnnnnnnnnnnnnnnnnnnnnnnnnnnnnnnnnnnnnnnnnnnnnnnnnnnnnnnnnnnnnnnnnnnnnnnnnnnnnnnnnnnnnnnnnnnnnnnnnnnnnnnnnnnnnnnnnnnnnnnnnnnnnnnnnnnnnnnnnnnnnnnnnnnnnnnnnnnnnnnnnnnnnnnnnnnnnnnnnnnnnnnnnnnnnnnnnnnnnnnnnnnnnnnnnnnnnnnnnnnnnnnnnnnnnnnnnnnnnnnnnnnnnnnnnnnnnnnnnnnnnnnnnnnnnnnnnnnnnnnnnnnnnnnnnnnnnnnnnnnnnnnnnnnnnnnnnnnnnnnnnnnnnnnnnnnnnnnnnnnnnnnnnnnnnnnnnnnnnnnnnnnnnnnnnnnnnnnnnnnnnnnnnnnnnnnnnnnnnnnnnnnnnnnnnnnnnnnnnnnnnnnnnnnnnnnnnnnnnnnnnnnnnnnnnnnnnnnnnnnnnnnnnnnnnnnnnnnnnnnnnnnnnnnnnnnnnnnnnnnnnnnnnnnnnnnnnnnnnnnnnnnnnnnnnnnnnnnnnnnnnnnnnnnnnnnnnnnnnnnnnnnnnnnnnnnnnnnnnnnnnnnnnnnnnnnnnnnnnnnnnnnnnnnnnnnnnnnnnnnnnnnnnnnnnnnnnnnnnnnnnnnnnnnnnnnnnnnnnnnnnnnnnnnnnnnnnnnnnnnnnnnnnnnnnnnnnnnnnnnnnnnnnnnnnnnnnnnnnnnnnnnnnnnnnnnnnnnnnnnnnnnnnnnnnnnnnnnnnnnnnnnnnnnnnnnnnnnnnnnnnnnnnnnnnnnnnnnnnnnnnnnnnnnnnnnnnnnnnnnnnnnnnnnnnnnnnnnnnnnnnnnnnnnnnnnnnnnnnnnnnnnnnnnnnnnnnnnnnnnnnnnnnnnnnnnnnnnnnnnnnnnnnnnnnnnnnnnnnnnnnnnnnnnnnnnnnnnnnnnnnnnnnnnnnnnnnnnnnnnnnnnnnnnnnnnnnnnnnnnnnnnnnnnnnnnnnnnnnnnnnnnnnnnnnnnnnnnnnnnnnnnnnnnnnnnnnnnnnnnnnnnnnnnnnnnnnnnnnnnnnnnnnnnnnnnnnnnnnnnnnnnnnnnnnnnnnnnnnnnnnnnnnnnnnnnnnnnnnnnnnnnnnnnnnnnnnnnnnnnnnnnnnnnnnnnnnnnnnnnnnnnnnnnnnnnnnnnnnnnnnnnnnnnnnnnnnnnnnnnnnnnnnnnnnnnnnnnnnnnnnnnnnnnnnnnnnnnnnnnnnnnnnnnnnnnnnnnnnnnnnnnnnnnnnnnnnnnnnnnnnnnnnnnnnnnnnnnnnnnnnnnnnnnnnnnnnnnnnnnnnnnnnnnnnnnnnnnnnnnnnnnnnnnnnnnnnnnnnnnnnnnnnnnnnnnnnnnnnnnnnnnnnnnnnnnnnnnnnnnnnnnnnnnnnnnnnnnnnnnnnnnnnnnnnnnnnnnnnnnnnnnnnnnnnnnnnnnnnnnnnnnnnnnnnnnnnnnnnnnnnnnnnnnnnnnnnnnnnnnnnnnnnnnnnnnnnnnnnnnnnnnnnnnnnnnnnnnnnnnnnnnnnnnnnnnnnnnnnnnnnnnnnnnnnnnnnnnnnnnnnnnnnnnnnnnnnnnnnnnnnnnnnnnnnnnnnnnnnnnnnnnnnnnnnnnnnnnnnnnnnnnnnnnnnnnnnnnnnnnnnnnnnnnnnnnnnnnnnnnnnnnnnnnnnnnnnnnnnnnnnnnnnnnnnnnnnnnnnnnnnnnnnnnnnnnnnnnnnnnnnnnnnnnnnnnnnnnnnnnnnnnnnnnnnnnnnnnnnnnnnnnnnnnnnnnnnnnnnnnnnnnnnnnnnnnnnnnnnnnnnnnnnnnnnnnnnnnnnnnnnnnnnnnnnnnnnnnnnnnnnnnnnnnnnnnnnnnnnnnnnnnnnnnnnnnnnnnnnnnnnnnnnnnnnnnnnnnnnnnnnnnnnnnnnnnnnnnnnnnnnnnnnnnnnnnnnnnnnnnnnnnnnnnnnnnnnnnnnnnnnnnnnnnnnnnnnnnnnnnnnnnnnnnnnnnnnnnnnnnnnnnnnnnnnnnnnnnnnnnnnnnnnnnnnnnnnnnnnnnnnnnnnnnnnnnnnnnnnnnnnnnnnnnnnnnnnnnnnnnnnnnnnnnnnnnnnnnnnnnnnnnnnnnnnnnnnnnnnnnnnnnnnnnnnnnnnnnnnnnnnnnnnnnnnnnnnnnnnnnnnnnnnnnnnnnnnnnnnnnnnnnnnnnnnnnnnnnnnnnnnnnnnnnnnnnnnnnnnnnnnnnnnnnnnnnnnnnnnnnnnnnnnnnnnnnnnnnnnnnnnnnnnnnnnnnnnnnnnnnnnnnnnnnnnnnnnnnnnnnnnnnnnnnnnnnnnnnnnnnnnnnnnnnnnnnnnnnnnnnnnnnnnnnnnnnnnnnnnnnnnnnnnnnnnnnnnnnnnnnnnnnnnnnnnnnnnnnnnnnnnnnnnnnnnnnnnnnnnnnnnnnnnnnnnnnnnnnnnnnnnnnnnnnnnnnnnnnnnnnnnnnnnnnnnnnnnnnnnnnnnnnnnnnnnnnnnnnnnnnnnnnnnnnnnnnnnnnnnnnnnnnnnnnnnnnnnnnnnnnnnnnnnnnnnnnnnnnnnnnnnnnnnnnnnnnnnnnnnnnnnnnnnnnnnnnnnnnnnnnnnnnnnnnnnnnnnnnnnnnnnnnnnnnnnnnnnnnnnnnnnnnnnnnnnnnnnnnnnnnnnnnnnnnnnnnnnnnnnnnnnnnnnnnnnnnnnnnnnnnnnnnnnnnnnnnnnnnnnnnnnnnnnnnnnnnnnnnnnnnnnnnnnnnnnnnnnnnnnnnnnnnnnnnnnnnnnnnnnnnnnnnnnnnnnnnnnnnnnnnnnnnnnnnnnnnnnnnnnnnnnnnnnnnnnnnnnnnnnnnnnnnnnnnnnnnnnnnnnnnnnnnnnnnnnnnnnnnnnnnnnnnnnnnnnnnnnnnnnnnnnnnnnnnnnnnnnnnnnnnnnnnnnnnnnnnnnnnnnnnnnnnnnnnnnnnnnnnnnnnnnnnnnnnnnnnnnnnnnnnnnnnnnnnnnnnnnnnnnnnnnnnnnnnnnnnnnnnnnnnnnnnnnnnnnnnnnnnnnnnnnnnnnnnnnnnnnnnnnnnnnnnnnnnnnnnnnnnnnnnnnnnnnnnnnnnnnnnnnnnnnnnnnnnnnnnnnnnnnnnnnnnnnnnnnnnnnnnnnnnnnnnnnnnnnnnnnnnnnnnnnnnnnnnnnnnnnnnnnnnnnnnnnnnnnnnnnnnnnnnnnnnnnnnnnnnnnnnnnnnnnnnnnnnnnnnnnnnnnnnnnnnnnnnnnnnnnnnnnnnnnnnnnnnnnnnnnnnnnnnnnnnnnnnnnnnnnnnnnnnnnnnnnnnnnnnnnnnnnnnnnnnnnnnnnnnnnnnnnnnnnnnnnnnnnnnnnnnnnnnnnnnnnnnnnnnnnnnnnnnnnnnnnnnnnnnnnnnnnnnnnnnnnnnnnnnnnnnnnnnnnnnnnnnnnnnnnnnnnnnnnnnnnnnnnnnnnnnnnnnnnnnnnnnnnnnnnnnnnnnnnnnnnnnnnnnnnnnnnnnnnnnnnnnnnnnnnnnnnnnnnnnnnnnnnnnnnnnnnnnnnnnnnnnnnnnnnnnnnnnnnnnnnnnnnnnnnnnnnnnnnnnnnnnnnnnnnnnnnnnnnnnnnnnnnnnnnnnnnnnnnnnnnnnnnnnnnnnnnnnnnnnnnnnnnnnnnnnnnnnnnnnnnnnnnnnnnnnnnnnnnnnnnnnnnnnnnnnnnnnnnnnnnnnnnnnnnnnnnnnnnnnnnnnnnnnnnnnnnnnnnnnnnnnnnnnnnnnnnnnnnnnnnnnnnnnnnnnnnnnnnnnnnnnnnnnnnnnnnnnnnnnnnnnnnnnnnnnnnnnnnnnnnnnnnnnnnnnnnnnnnnnnnnnnnnnnnnnnnnnnnnnnnnnnnnnnnnnnnnnnnnnnnnnnnnnnnnnnnnnnnnnnnnnnnnnnnnnnnnnnnnnnnnnnnnnnnnnnnnnnnnnnnnnnnnnnnnnnnnnnnnnnnnnnnnnnnnnnnnnnnnnnnnnnnnnnnnnnnnnnnnnnnnnnnnnnnnnnnnnnnnnnnnnnnnnnnnnnnnnnnnnnnnnnnnnnnnnnnnnnnnnnnnnnnnnnnnnnnnnnnnnnnnnnnnnnnnnnnnnnnnnnnnnnnnnnnnnnnnnnnnnnnnnnnnnnnnnnnnnnnnnnnnnnnnnnnnnnnnnnnnnnnnnnnnnnnnnnnnnnnnnnnnnnnnnnnnnnnnnnnnnnnnnnnnnnnnnnnnnnnnnnnnnnnnnnnnnnnnnnnnnnnnnnnnnnnnnnnnnnnnnnnnnnnnnnnnnnnnnnnnnnnnnnnnnnnnnnnnnnnnnnnnnnnnnnnnnnnnnnnnnnnnnnnnnnnnnnnnnnnnnnnnnnnnnnnnnnnnnnnnnnnnnnnnnnnnnnnnnnnnnnnnnnnnnnnnnnnnnnnnnnnnnnnnnnnnnnnnnnnnnnnnnnnnnnnnnnnnnnnnnnnnnnnnnnnnnnnnnnnnnnnnnnnnnnnnnnnnnnnnnnnnnnnnnnnnnnnnnnnnnnnnnnnnnnnnnnnnnnnnnnnnnnnnnnnnnnnnnnnnnnnnnnnnnnnnnnnnnnnnnnnnnnnnnnnnnnnnnnnnnnnnnnnnnnnnnnnnnnnnnnnnnnnnnnnnnnnnnnnnnnnnnnnnnnnnnnnnnnnnnnnnnnnnnnnnnnnnnnnnnnnnnnnnnnnnnnnnnnnnnnnnnnnnnnnnnnnnnnnnnnnnnnnnnnnnnnnnnnnnnnnnnnnnnnnnnnnnnnnnnnnnnnnnnnnnnnnnnnnnnnnnnnnnnnnnnnnnnnnnnnnnnnnnnnnnnnnnnnnnnnnnnnnnnnnnnnnnnnnnnnnnnnnnnnnnnnnnnnnnnnnnnnnnnnnnnnnnnnnnnnnnnnnnnnnnnnnnnnnnnnnnnnnnnnnnnnnnnnnnnnnnnnnnnnnnnnnnnnnnnnnnnnnnnnnnnnnnnnnnnnnnnnnnnnnnnnnnnnnnnnnnnnnnnnnnnnnnnnnnnnnnnnnnnnnnnnnnnnnnnnnnnnnnnnnnnnnnnnnnnnnnnnnnnnnnnnnnnnnnnnnnnnnnnnnnnnnnnnnnnnnnnnnnnnnnnnnnnnnnnnnnnnnnnnnnnnnnnnnnnnnnnnnnnnnnnnnnnnnnnnnnnnnnnnnnnnnnnnnnnnnnnnnnnnnnnnnnnnnnnnnnnnnnnnnnnnnnnnnnnnnnnnnnnnnnnnnnnnnnnnnnnnnnnnnnnnnnnnnnnnnnnnnnnnnnnnnnnnnnnnnnnnnnnnnnnnnnnnnnnnnnnnnnnnnnnnnnnnnnnnnnnnnnnnnnnnnnnnnnnnnnnnnnnnnnnnnnnnnnnnnnnnnnnnnnnnnnnnnnnnnnnnnnnnnnnnnnnnnnnnnnnnnnnnnnnnnnnnnnnnnnnnnnnnnnnnnnnnnnnnnnnnnnnnnnnnnnnnnnnnnnnnnnnnnnnnnnnnnnnnnnnnnnnnnnnnnnnnnnnnnnnnnnnnnnnnnnnnnnnnnnnnnnnnnnnnnnnnnnnnnnnnnnnnnnnnnnnnnnnnnnnnnnnnnnnnnnnnnnnnnnnnnnnnnnnnnnnnnnnnnnnnnnnnnnnnnnnnnnnnnnnnnnnnnnnnnnnnnnnnnnnnnnnnnnnnnnnnnnnnnnnnnnnnnnnnnnnnnnnnnnnnnnnnnnnnnnnnnnnnnnnnnnnnnnnnnnnnnnnnnnnnnnnnnnnnnnnnnnnnnnnnnnnnnnnnnnnnnnnnnnnnnnnnnnnnnnnnnnnnnnnnnnnnnnnnnnnnnnnnnnnnnnnnnnnnnnnnnnnnnnnnnnnnnnnnnnnnnnnnnnnnnnnnnnnnnnnnnnnnnnnnnnnnnnnnnnnnnnnnnnnnnnnnnnnnnnnnnnnnnnnnnnnnnnnnnnnnnnnnnnnnnnnnnnnnnnnnnnnnnnnnnnnnnnnnnnnnnnnnnnnnnnnnnnnnnnnnnnnnnnnnnnnnnnnnnnnnnnnnnnnnnnnnnnnnnnnnnnnnnnnnnnnnnnnnnnnnnnnnnnnnnnnnnnnnnnnnnnnnnnnnnnnnnnnnnnnnnnnnnnnnnnnnnnnnnnnnnnnnnnnnnnnnnnnnnnnnnnnnnnnnnnnnnnnnnnnnnnnnnnnnnnnnnnnnnnnnnnnnnnnnnnnnnnnnnnnnnnnnnnnnnnnnnnnnnnnnnnnnnnnnnnnnnnnnnnnnnnnnnnnnnnnnnnnnnnnnnnnnnnnnnnnnnnnnnnnnnnnnnnnnnnnnnnnnnnnnnnnnnnnnnnnnnnnnnnnnnnnnnnnnnnnnnnnnnnnnnnnnnnnnnnnnnnnnnnnnnnnnnnnnnnnnnnnnnnnnnnnnnnnnnnnnnnnnnnnnnnnnnnnnnnnnnnnnnnnnnnnnnnnnnnnnnnnnnnnnnnnnnnnnnnnnnnnnnnnnnnnnnnnnnnnnnnnnnnnnnnnnnnnnnnnnnnnnnnnnnnnnnnnnnnnnnnnnnnnnnnnnnnnnnnnnnnnnnnnnnnnnnnnnnnnnnnnnnnnnnnnnnnnnnnnnnnnnnnnnnnnnnnnnnnnnnnnnnnnnnnnnnnnnnnnnnnnnnnnnnnnnnnnnnnnnnnnnnnnnnnnnnnnnnnnnnnnnnnnnnnnnnnnnnnnnnnnnnnnnnnnnnnnnnnnnnnnnnnnnnnnnnnnnnnnnnnnnnnnnnnnnnnnnnnnnnnnnnnnnnnnnnnnnnnnnnnnnnnnnnnnnnnnnnnnnnnnnnnnnnnnnnnnnnnnnnnnnnnnnnnnnnnnnnnnnnnnnnnnnnnnnnnnnnnnnnnnnnnnnnnnnnnnnnnnnnnnnnnnnnnnnnnnnnnnnnnnnnnnnnnnnnnnnnnnnnnnnnnnnnnnnnnnnnnnnnnnnnnnnnnnnnnnnnnnnnnnnnnnnnnnnnnnnnnnnnnnnnnnnnnnnnnnnnnnnnnnnnnnnnnnnnnnnnnnnnnnnnnnnnnnnnnnnnnnnnnnnnnnnnnnnnnnnnnnnnnnnnnnnnnnnnnnnnnnnnnnnnnnnnnnnnnnnnnnnnnnnnnnnnnnnnnnnnnnnnnnnnnnnnnnnnnnnnnnnnnnnnnnnnnnnnnnnnnnnnnnnnnnnnnnnnnnnnnnnnnnnnnnnnnnnnnnnnnnnnnnnnnnnnnnnnnnnnnnnnnnnnnnnnnnnnnnnnnnnnnnnnnnnnnnnnnnnnnnnnnnnnnnnnnnnnnnnnnnnnnnnnnnnnnnnnnnnnnnnnnnnnnnnnnnnnnnnnnnnnnnnnnnnnnnnnnnnnnnnnnnnnnnnnnnnnnnnnnnnnnnnnnnnnnnnnnnnnnnnnnnnnnnnnnnnnnnnnnnnnnnnnnnnnnnnnnnnnnnnnnnnnnnnnnnnnnnnnnnnnnnnnnnnnnnnnnnnnnnnnnnnnnnnnnnnnnnnnnnnnnnnnnnnnnnnnnnnnnnnnnnnnnnnnnnnnnnnnnnnnnnnnnnnnnnnnnnnnnnnnnnnnnnnnnnnnnnnnnnnnnnnnnnnnnnnnnnnnnnnnnnnnnnnnnnnnnnnnnnnnnnnnnnnnnnnnnnnnnnnnnnnnnnnnnnnnnnnnnnnnnnnnnnnnnnnnnnnnnnnnnnnnnnnnnnnnnnnnnnnnnnnnnnnnnnnnnnnnnnnnnnnnnnnnnnnnnnnnnnnnnnnnnnnnnnnnnnnnnnnnnnnnnnnnnnnnnnnnnnnnnnnnnnnnnnnnnnnnnnnnnnnnnnnnnnnnnnnnnnnnnnnnnnnnnnnnnnnnnnnnnnnnnnnnnnnnnnnnnnnnnnnnnnnnnnnnnnnnnnnnnnnnnnnnnnnnnnnnnnnnnnnnnnnnnnnnnnnnnnnnnnnnnnnnnnnnnnnnnnnnnnnnnnnnnnnnnnnnnnnnnnnnnnnnnnnnnnnnnnnnnnnnnnnnnnnnnnnnnnnnnnnnnnnnnnnnnnnnnnnnnnnnnnnnnnnnnnnnnnnnnnnnnnnnnnnnnnnnnnnnnnnnnnnnnnnnnnnnnnnnnnnnnnnnnnnnnnnnnnnnnnnnnnnnnnnnnnnnnnnnnnnnnnnnnnnnnnnnnnnnnnnnnnnnnnnnnnnnnnnnnnnnnnnnnnnnnnnnnnnnnnnnnnnnnnnnnnnnnnnnnnnnnnnnnnnnnnnnnnnnnnnnnnnnnnnnnnnnnnnnnnnnnnnnnnnnnnnnnnnnnnnnnnnnnnnnnnnnnnnnnnnnnnnnnnnnnnnnnnnnnnnnnnnnnnnnnnnnnnnnnnnnnnnnnnnnnnnnnnnnnnnnnnnnnnnnnnnnnnnnnnnnnnnnnnnnnnnnnnnnnnnnnnnnnnnnnnnnnnnnnnnnnnnnnnnnnnnnnnnnnnnnnnnnnnnnnnnnnnnnnnnnnnnnnnnnnnnnnnnnnnnnnnnnnnnnnnnnnnnnnnnnnnnnnnnnnnnnnnnnnnnnnnnnnnnnnnnnnnnnnnnnnnnnnnnnnnnnnnnnnnnnnnnnnnnnnnnnnnnnnnnnnnnnnnnnnnnnnnnnnnnnnnnnnnnnnnnnnnnnnnnnnnnnnnnnnnnnnnnnnnnnnnnnnnnnnnnnnnnnnnnnnnnnnnnnnnnnnnnnnnnnnnnnnnnnnnnnnnnnnnnnnnnnnnnnnnnnnnnnnnnnnnnnnnnnnnnnnnnnnnnnnnnnnnnnnnnnnnnnnnnnnnnnnnnnnnnnnnnnnnnnnnnnnnnnnnnnnnnnnnnnnnnnnnnnnnnnnnnnnnnnnnnnnnnnnnnnnnnnnnnnnnnnnnnnnnnnnnnnnnnnnnnnnnnnnnnnnnnnnnnnnnnnnnnnnnnnnnnnnnnnnnnnnnnnnnnnnnnnnnnnnnnnnnnnnnnnnnnnnnnnnnnnnnnnnnnnnnnnnnnnnnnnnnnnnnnnnnnnnnnnnnnnnnnnnnnnnnnnnnnnnnnnnnnnnnnnnnnnnnnnnnnnnnnnnnnnnnnnnnnnnnnnnnnnnnnnnnnnnnnnnnnnnnnnnnnnnnnnnnnnnnnnnnnnnnnnnnnnnnnnnnnnnnnnnnnnnnnnnnnnnnnnnnnnnnnnnnnnnnnnnnnnnnnnnnnnnnnnnnnnnnnnnnnnnnnnnnnnnnnnnnnnnnnnnnnnnnnnnnnnnnnnnnnnnnnnnnnnnnnnnnnnnnnnnnnnnnnnnnnnnnnnnnnnnnnnnnnnnnnnnnnnnnnnnnnnnnnnnnnnnnnnnnnnnnnnnnnnnnnnnnnnnnnnnnnnnnnnnnnnnnnnnnnnnnnnnnnnnnnnnnnnnnnnnnnnnnnnnnnnnnnnnnnnnnnnnnnnnnnnnnnnnnnnnnnnnnnnnnnnnnnnnnnnnnnnnnnnnnnnnnnnnnnnnnnnnnnnnnnnnnnnnnnnnnnnnnnnnnnnnnnnnnnnnnnnnnnnnnnnnnnnnnnnnnnnnnnnnnnnnnnnnnnnnnnnnnnnnnnnnnnnnnnnnnnnnnnnnnnnnnnnnnnnnnnnnnnnnnnnnnnnnnnnnnnnnnnnnnnnnnnnnnnnnnnnnnnnnnnnnnnnnnnnnnnnnnnnnnnnnnnnnnnnnnnnnnnnnnnnnnnnnnnnnnnnnnnnnnnnnnnnnnnnnnnnnnnnnnnnnnnnnnnnnnnnnnnnnnnnnnnnnnnnnnnnnnnnnnnnnnnnnnnnnnnnnnnnnnnnnnnnnnnnnnnnnnnnnnnnnnnnnnnnnnnnnnnnnnnnnnnnnnnnnnnnnnnnnnnnnnnnnnnnnnnnnnnnnnnnnnnnnnnnnnnnnnnnnnnnnnnnnnnnnnnnnnnnnnnnnnnnnnnnnnnnnnnnnnnnnnnnnnnnnnnnnnnnnnnnnnnnnnnnnnnnnnnnnnnnnnnnnnnnnnnnnnnnnnnnnnnnnnnnnnnnnnnnnnnnnnnnnnnnnnnnnnnnnnnnnnnnnnnnnnnnnnnnnnnnnnnnnnnnnnnnnnnnnnnnnnnnnnnnnnnnnnnnnnnnnnnnnnnnnnnnnnnnnnnnnnnnnnnnnnnnnnnnnnnnnnnnnnnnnnnnnnnnnnnnnnnnnnnnnnnnnnnnnnnnnnnnnnnnnnnnnnnnnnnnnnnnnnnnnnnnnnnnnnnnnnnnnnnnnnnnnnnnnnnnnnnnnnnnnnnnnnnnnnnnnnnnnnnnnnnnnnnnnnnnnnnnnnnnnnnnnnnnnnnnnnnnnnnnnnnnnnnnnnnnnnnnnnnnnnnnnnnnnnnnnnnnnnnnnnnnnnnnnnnnnnnnnnnnnnnnnnnnnnnnnnnnnnnnnnnnnnnnnnnnnnnnnnnnnnnnnnnnnnnnnnnnnnnnnnnnnnnnnnnnnnnnnnnnnnnnnnnnnnnnnnnnnnnnnnnnnnnnnnnnnnnnnnnnnnnnnnnnnnnnnnnnnnnnnnnnnnnnnnnnnnnnnnnnnnnnnnnnnnnnnnnnnnnnnnnnnnnnnnnnnnnnnnnnnnnnnnnnnnnnnnnnnnnnnnnnnnnnnnnnnnnnnnnnnnnnnnnnnnnnnnnnnnnnnnnnnnnnnnnnnnnnnnnnnnnnnnnnnnnnnnnnnnnnnnnnnnnnnnnnnnnnnnnnnnnnnnnnnnnnnnnnnnnnnnnnnnnnnnnnnnnnnnnnnnnnnnnnnnnnnnnnnnnnnnnnnnnnnnnnnnnnnnnnnnnnnnnnnnnnnnnnnnnnnnnnnnnnnnnnnnnnnnnnnnnnnnnnnnnnnnnnnnnnnnnnnnnnnnnnnnnnnnnnnnnnnnnnnnnnnnnnnnnnnnnnnnnnnnnnnnnnnnnnnnnnnnnnnnnnnnnnnnnnnnnnnnnnnnnnnnnnnnnnnnnnnnnnnnnnnnnnnnnnnnnnnnnnnnnnnnnnnnnnnnnnnnnnnnnnnnnnnnnnnnnnnnnnnnnnnnnnnnnnnnnnnnnnnnnnnnnnnnnnnnnnnnnnnnnnnnnnnnnnnnnnnnnnnnnnnnnnnnnnnnnnnnnnnnnnnnnnnnnnnnnnnnnnnnnnnnnnnnnnnnnnnnnnnnnnnnnnnnnnnnnnnnnnnnnnnnnnnnnnnnnnnnnnnnnnnnnnnnnnnnnnnnnnnnnnnnnnnnnnnnnnnnnnnnnnnnnnnnnnnnnnnnnnnnnnnnnnnnnnnnnnnnnnnnnnnnnnnnnnnnnnnnnnnnnnnnnnnnnnnnnnnnnnnnnnnnnnnnnnnnnnnnnnnnnnnnnnnnnnnnnnnnnnnnnnnnnnnnnnnnnnnnnnnnnnnnnnnnnnnnnnnnnnnnnnnnnnnnnnnnnnnnnnnnnnnnnnnnnnnnnnnnnnnnnnnnnnnnnnnnnnnnnnnnnnnnnnnnnnnnnnnnnnnnnnnnnnnnnnnnnnnnnnnnnnnnnnnnnnnnnnnnnnnnnnnnnnnnnnnnnnnnnnnnnnnnnnnnnnnnnnnnnnnnnnnnnnnnnnnnnnnnnnnnnnnnnnnnnnnnnnnnnnnnnnnnnnnnnnnnnnnnnnnnnnnnnnnnnnnnnnnnnnnnnnnnnnnnnnnnnnnnnnnnnnnnnnnnnnnnnnnnnnnnnnnnnnnnnnnnnnnnnnnnnnnnnnnnnnnnnnnnnnnnnnnnnnnnnnnnnnnnnnnnnnnnnnnnnnnnnnnnnnnnnnnnnnnnnnnnnnnnnnnnnnnnnnnnnnnnnnnnnnnnnnnnnnnnnnnnnnnnnnnnnnnnnnnnnnnnnnnnnnnnnnnnnnnnnnnnnnnnnnnnnnnnnnnnnnnnnnnnnnnnnnnnnnnnnnnnnnnnnnnnnnnnnnnnnnnnnnnnnnnnnnnnnnnnnnnnnnnnnnnnnnnnnnnnnnnnnnnnnnnnnnnnnnnnnnnnnnnnnnnnnnnnnnnnnnnnnnnnnnnnnnnnnnnnnnnnnnnnnnnnnnnnnnnnnnnnnnnnnnnnnnnnnnnnnnnnnnnnnnnnnnnnnnnnnnnnnnnnnnnnnnnnnnnnnnnnnnnnnnnnnnnnnnnnnnnnnnnnnnnnnnnnnnnnnnnnnnnnnnnnnnnnnnnnnnnnnnnnnnnnnnnnnnnnnnnnnnnnnnnnnnnnnnnnnnnnnnnnnnnnnnnnnnnnnnnnnnnnnnnnnnnnnnnnnnnnnnnnnnnnnnnnnnnnnnnnnnnnnnnnnnnnnnnnnnnnnnnnnnnnnnnnnnnnnnnnnnnnnnnnnnnnnnnnnnnnnnnnnnnnnnnnnnnnnnnnnnnnnnnnnnnnnnnnnnnnnnnnnnnnnnnnnnnnnnnnnnnnnnnnnnnnnnnnnnnnnnnnnnnnnnnnnnnnnnnnnnnnnnnnnnnnnnnnnnnnnnnnnnnnnnnnnnnnnnnnnnnnnnnnnnnnnnnnnnnnnnnnnnnnnnnnnnnnnnnnnnnnnnnnnnnnnnnnnnnnnnnnnnnnnnnnnnnnnnnnnnnnnnnnnnnnnnnnnnnnnnnnnnnnnnnnnnnnnnnnnnnnnnnnnnnnnnnnnnnnnnnnnnnnnnnnnnnnnnnnnnnnnnnnnnnnnnnnnnnnnnnnnnnnnnnnnnnnnnnnnnnnnnnnnnnnnnnnnnnnnnnnnnnnnnnnnnnnnnnnnnnnnnnnnnnnnnnnnnnnnnnnnnnnnnnnnnnnnnnnnnnnnnnnnnnnnnnnnnnnnnnnnnnnnnnnnnnnnnnnnnnnnnnnnnnnnnnnnnnnnnnnnnnnnnnnnnnnnnnnnnnnnnnnnnnnnnnnnnnnnnnnnnnnnnnnnnnnnnnnnnnnnnnnnnnnnnnnnnnnnnnnnnnnnnnnnnnnnnnnnnnnnnnnnnnnnnnnnnnnnnnnnnnnnnnnnnnnnnnnnnnnnnnnnnnnnnnnnnnnnnnnnnnnnnnnnnnnnnnnnnnnnnnnnnnnnnnnnnnnnnnnnnnnnnnnnnnnnnnnnnnnnnnnnnnnnnnnnnnnnnnnnnnnnnnnnnnnnnnnnnnnnnnnnnnnnnnnnnnnnnnnnnnnnnnnnnnnnnnnnnnnnnnnnnnnnnnnnnnnnnnnnnnnnnnnnnnnnnnnnnnnnnnnnnnnnnnnnnnnnnnnnnnnnnnnnnnnnnnnnnnnnnnnnnnnnnnnnnnnnnnnnnnnnnnnnnnnnnnnnnnnnnnnnnnnnnnnnnnnnnnnnnnnnnnnnnnnnnnnnnnnnnnnnnnnnnnnnnnnnnnnnnnnnnnnnnnnnnnnnnnnnnnnnnnnnnnnnnnnnnnnnnnnnnnnnnnnnnnnnnnnnnnnnnnnnnnnnnnnnnnnnnnnnnnnnnnnnnnnnnnnnnnnnnnnnnnnnnnnnnnnnnnnnnnnnnnnnnnnnnnnnnnnnnnnnnnnnnnnnnnnnnnnnnnnnnnnnnnnnnnnnnnnnnnnnnnnnnnnnnnnnnnnnnnnnnnnnnnnnnnnnnnnnnnnnnnnnnnnnnnnnnnnnnnnnnnnnnnnnnnnnnnnnnnnnnnnnnnnnnnnnnnnnnnnnnnnnnnnnnnnnnnnnnnnnnnnnnnnnnnnnnnnnnnnnnnnnnnnnnnnnnnnnnnnnnnnnnnnnnnnnnnnnnnnnnnnnnnnnnnnnnnnnnnnnnnnnnnnnnnnnnnnnnnnnnnnnnnnnnnnnnnnnnnnnnnnnnnnnnnnnnnnnnnnnnnnnnnnnnnnnnnnnnnnnnnnnnnnnnnnnnnnnnnnnnnnnnnnnnnnnnnnnnnnnnnnnnnnnnnnnnnnnnnnnnnnnnnnnnnnnnnnnnnnnnnnnnnnnnnnnnnnnnnnnnnnnnnnnnnnnnnnnnnnnnnnnnnnnnnnnnnnnnnnnnnnnnnnnnnnnnnnnnnnnnnnnnnnnnnnnnnnnnnnnnnnnnnnnnnnnnnnnnnnnnnnnnnnnnnnnnnnnnnnnnnnnnnnnnnnnnnnnnnnnnnnnnnnnnnnnnnnnnnnnnnnnnnnnnnnnnnnnnnnnnnnnnnnnnnnnnnnnnnnnnnnnnnnnnnnnnnnnnnnnnnnnnnnnnnnnnnnnnnnnnnnnnnnnnnnnnnnnnnnnnnnnnnnnnnnnnnnnnnnnnnnnnnnnnnnnnnnnnnnnnnnnnnnnnnnnnnnnnnnnnnnnnnnnnnnnnnnnnnnnnnnnnnnnnnnnnnnnnnnnnnnnnnnnnnnnnnnnnnnnnnnnnnnnnnnnnnnnnnnnnnnnnnnnnnnnnnnnnnnnnnnnnnnnnnnnnnnnnnnnnnnnnnnnnnnnnnnnnnnnnnnnnnnnnnnnnnnnnnnnnnnnnnnnnnnnnnnnnnnnnnnnnnnnnnnnnnnnnnnnnnnnnnnnnnnnnnnnnnnnnnnnnnnnnnnnnnnnnnnnnnnnnnnnnnnnnnnnnnnnnnnnnnnnnnnnnnnnnnnnnnnnnnnnnnnnnnnnnnnnnnnnnnnnnnnnnnnnnnnnnnnnnnnnnnnnnnnnnnnnnnnnnnnnnnnnnnnnnnnnnnnnnnnnnnnnnnnnnnnnnnnnnnnnnnnnnnnnnnnnnnnnnnnnnnnnnnnnnnnnnnnnnnnnnnnnnnnnnnnnnnnnnnnnnnnnnnnnnnnnnnnnnnnnnnnnnnnnnnnnnnnnnnnnnnnnnnnnnnnnnnnnnnnnnnnnnnnnnnnnnnnnnnnnnnnnnnnnnnnnnnnnnnnnnnnnnnnnnnnnnnnnnnnnnnnnnnnnnnnnnnnnnnnnnnnnnnnnnnnnnnnnnnnnnnnnnnnnnnnnnnnnnnnnnnnnnnnnnnnnnnnnnnnnnnnnnnnnnnnnnnnnnnnnnnnnnnnnnnnnnnnnnnnnnnnnnnnnnnnnnnnnnnnnnnnnnnnnnnnnnnnnnnnnnnnnnnnnnnnnnnnnnnnnnnnnnnnnnnnnnnnnnnnnnnnnnnnnnnnnnnnnnnnnnnnnnnnnnnnnnnnnnnnnnnnnnnnnnnnnnnnnnnnnnnnnnnnnnnnnnnnnnnnnnnnnnnnnnnnnnnnnnnnnnnnnnnnnnnnnnnnnnnnnnnnnnnnnnnnnnnnnnnnnnnnnnnnnnnnnnnnnnnnnnnnnnnnnnnnnnnnnnnnnnnnnnnnnnnnnnnnnnnnnnnnnnnnnnnnnnnnnnnnnnnnnnnnnnnnnnnnnnnnnnnnnnnnnnnnnnnnnnnnnnnnnnnnnnnnnnnnnnnnnnnnnnnnnnnnnnnnnnnnnnnnnnnnnnnnnnnnnnnnnnnnnnnnnnnnnnnnnnnnnnnnnnnnnnnnnnnnnnnnnnnnnnnnnnnnnnnnnnnnnnnnnnnnnnnnnnnnnnnnnnnnnnnnnnnnnnnnnnnnnnnnnnnnnnnnnnnnnnnnnnnnnnnnnnnnnnnnnnnnnnnnnnnnnnnnnnnnnnnnnnnnnnnnnnnnnnnnnnnnnnnnnnnnnnnnnnnnnnnnnnnnnnnnnnnnnnnnnnnnnnnnnnnnnnnnnnnnnnnnnnnnnnnnnnnnnnnnnnnnnnnnnnnnnnnnnnnnnnnnnnnnnnnnnnnnnnnnnnnnnnnnnnnnnnnnnnnnnnnnnnnnnnnnnnnnnnnnnnnnnnnnnnnnnnnnnnnnnnnnnnnnnnnnnnnnnnnnnnnnnnnnnnnnnnnnnnnnnnnnnnnnnnnnnnnnnnnnnnnnnnnnnnnnnnnnnnnnnnnnnnnnnnnnnnnnnnnnnnnnnnnnnnnnnnnnnnnnnnnnnnnnnnnnnnnnnnnnnnnnnnnnnnnnnnnnnnnnnnnnnnnnnnnnnnnnnnnnnnnnnnnnnnnnnnnnnnnnnnnnnnnnnnnnnnnnnnnnnnnnnnnnnnnnnnnnnnnnnnnnnnnnnnnnnnnnnnnnnnnnnnnnnnnnnnnnnnnnnnnnnnnnnnnnnnnnnnnnnnnnnnnnnnnnnnnnnnnnnnnnnnnnnnnnnnnnnnnnnnnnnnnnnnnnnnnnnnnnnnnnnnnnnnnnnnnnnnnnnnnnnnnnnnnnnnnnnnnnnnnnnnnnnnnnnnnnnnnnnnnnnnnnnnnnnnnnnnnnnnnnnnnnnnnnnnnnnnnnnnnnnnnnnnnnnnnnnnnnnnnnnnnnnnnnnnnnnnnnnnnnnnnnnnnnnnnnnnnnnnnnnnnnnnnnnnnnnnnnnnnnnnnnnnnnnnnnnnnnnnnnnnnnnnnnnnnnnnnnnnnnnnnnnnnnnnnnnnnnnnnnnnnnnnnnnnnnnnnnnnnnnnnnnnnnnnnnnnnnnnnnnnnnnnnnnnnnnnnnnnnnnnnnnnnnnnnnnnnnnnnnnnnnnnnnnnnnnnnnnnnnnnnnnnnnnnnnnnnnnnnnnnnnnnnnnnnnnnnnnnnnnnnnnnnnnnnnnnnnnnnnnnnnnnnnnnnnnnnnnnnnnnnnnnnnnnnnnnnnnnnnnnnnnnnnnnnnnnnnnnnnnnnnnnnnnnnnnnnnnnnnnnnnnnnnnnnnnnnnnnnnnnnnnnnnnnnnnnnnnnnnnnnnnnnnnnnnnnnnnnnnnnnnnnnnnnnnnnnnnnnnnnnnnnnnnnnnnnnnnnnnnnnnnnnnnnnnnnnnnnnnnnnnnnnnnnnnnnnnnnnnnnnnnnnnnnnnnnnnnnnnnnnnnnnnnnnnnnnnnnnnnnnnnnnnnnnnnnnnnnnnnnnnnnnnnnnnnnnnnnnnnnnnnnnnnnnnnnnnnnnnnnnnnnnnnnnnnnnnnnnnnnnnnnnnnnnnnnnnnnnnnnnnnnnnnnnnnnnnnnnnnnnnnnnnnnnnnnnnnnnnnnnnnnnnnnnnnnnnnnnnnnnnnnnnnnnnnnnnnnnnnnnnnnnnnnnnnnnnnnnnnnnnnnnnnnnnnnnnnnnnnnnnnnnnnnnnnnnnnnnnnnnnnnnnnnnnnnnnnnnnnnnnnnnnnnnnnnnnnnnnnnnnnnnnnnnnnnnnnnnnnnnnnnnnnnnnnnnnnnnnnnnnnnnnnnnnnnnnnnnnnnnnnnnnnnnnnnnnnnnnnnnnnnnnnnnnnnnnnnnnnnnnnnnnnnnnnnnnnnnnnnnnnnnnnnnnnnnnnnnnnnnnnnnnnnnnnnnnnnnnnnnnnnnnnnnnnnnnnnnnnnnnnnnnnnnnnnnnnnnnnnnnnnnnnnnnnnnnnnnnnnnnnnnnnnnnnnnnnnnnnnnnnnnnnnnnnnnnnnnnnnnnnnnnnnnnnnnnnnnnnnnnnnnnnnnnnnnnnnnnnnnnnnnnnnnnnnnnnnnnnnnnnnnnnnnnnnnnnnnnnnnnnnnnnnnnnnnnnnnnnnnnnnnnnnnnnnnnnnnnnnnnnnnnnnnnnnnnnnnnnnnnnnnnnnnnnnnnnnnnnnnnnnnnnnnnnnnnnnnnnnnnnnnnnnnnnnnnnnnnnnnnnnnnnnnnnnnnnnnnnnnnnnnnnnnnnnnnnnnnnnnnnnnnnnnnnnnnnnnnnnnnnnnnnnnnnnnnnnnnnnnnnnnnnnnnnnnnnnnnnnnnnnnnnnnnnnnnnnnnnnnnnnnnnnnnnnnnnnnnnnnnnnnnnnnnnnnnnnnnnnnnnnnnnnnnnnnnnnnnnnnnnnnnnnnnnnnnnnnnnnnnnnnnnnnnnnnnnnnnnnnnnnnnnnnnnnnnnnnnnnnnnnnnnnnnnnnnnnnnnnnnnnnnnnnnnnnnnnnnnnnnnnnnnnnnnnnnnnnnnnnnnnnnnnnnnnnnnnnnnnnnnnnnnnnnnnnnnnnnnnnnnnnnnnnnnnnnnnnnnnnnnnnnnnnnnnnnnnnnnnnnnnnnnnnnnnnnnnnnnnnnnnnnnnnnnnnnnnnnnnnnnnnnnnnnnnnnnnnnnnnnnnnnnnnnnnnnnnnnnnnnnnnnnnnnnnnnnnnnnnnnnnnnnnnnnnnnnnnnnnnnnnnnnnnnnnnnnnnnnnnnnnnnnnnnnnnnnnnnnnnnnnnnnnnnnnnnnnnnnnnnnnnnnnnnnnnnnnnnnnnnnnnnnnnnnnnnnnnnnnnnnnnnnnnnnnnnnnnnnnnnnnnnnnnnnnnnnnnnnnnnnnnnnnnnnnnnnnnnnnnnnnnnnnnnnnnnnnnnnnnnnnnnnnnnnnnnnnnnnnnnnnnnnnnnnnnnnnnnnnnnnnnnnnnnnnnnnnnnnnnnnnnnnnnnnnnnnnnnnnnnnnnnnnnnnnnnnnnnnnnnnnnnnnnnnnnnnnnnnnnnnnnnnnnnnnnnnnnnnnnnnnnnnnnnnnnnnnnnnnnnnnnnnnnnnnnnnnnnnnnnnnnnnnnnnnnnnnnnnnnnnnnnnnnnnnnnnnnnnnnnnnnnnnnnnnnnnnnnnnnnnnnnnnnnnnnnnnnnnnnnnnnnnnnnnnnnnnnnnnnnnnnnnnnnnnnnnnnnnnnnnnnnnnnnnnnnnnnnnnnnnnnnnnnnnnnnnnnnnnnnnnnnnnnnnnnnnnnnnnnnnnnnnnnnnnnnnnnnnnnnnnnnnnnnnnnnnnnnnnnnnnnnnnnnnnnnnnnnnnnnnnnnnnnnnnnnnnnnnnnnnnnnnnnnnnnnnnnnnnnnnnnnnnnnnnnnnnnnnnnnnnnnnnnnnnnnnnnnnnnnnnnnnnnnnnnnnnnnnnnnnnnnnnnnnnnnnnnnnnnnnnnnnnnnnnnnnnnnnnnnnnnnnnnnnnnnnnnnnnnnnnnnnnnnnnnnnnnnnnnnnnnnnnnnnnnnnnnnnnnnnnnnnnnnnnnnnnnnnnnnnnnnnnnnnnnnnnnnnnnnnnnnnnnnnnnnnnnnnnnnnnnnnnnnnnnnnnnnnnnnnnnnnnnnnnnnnnnnnnnnnnnnnnnnnnnnnnnnnnnnnnnnnnnnnnnnnnnnnnnnnnnnnnnnnnnnnnnnnnnnnnnnnnnnnnnnnnnnnnnnnnnnnnnnnnnnnnnnnnnnnnnnnnnnnnnnnnnnnnnnnnnnnnnnnnnnnnnnnnnnnnnnnnnnnnnnnnnnnnnnnnnnnnnnnnnnnnnnnnnnnnnnnnnnnnnnnnnnnnnnnnnnnnnnnnnnnnnnnnnnnnnnnnnnnnnnnnnnnnnnnnnnnnnnnnnnnnnnnnnnnnnnnnnnnnnnnnnnnnnnnnnnnnnnnnnnnnnnnnnnnnnnnnnnnnnnnnnnnnnnnnnnnnnnnnnnnnnnnnnnnnnnnnnnnnnnnnnnnnnnnnnnnnnnnnnnnnnnnnnnnnnnnnnnnnnnnnnnnnnnnnnnnnnnnnnnnnnnnnnnnnnnnnnnnnnnnnnnnnnnnnnnnnnnnnnnnnnnnnnnnnnnnnnnnnnnnnnnnnnnnnnnnnnnnnnnnnnnnnnnnnnnnnnnnnnnnnnnnnnnnnnnnnnnnnnnnnnnnnnnnnnnnnnnnnnnnnnnnnnnnnnnnnnnnnnnnnnnnnnnnnnnnnnnnnnnnnnnnnnnnnnnnnnnnnnnnnnnnnnnnnnnnnnnnnnnnnnnnnnnnnnnnnnnnnnnnnnnnnnnnnnnnnnnnnnnnnnnnnnnnnnnnnnnnnnnnnnnnnnnnnnnnnnnnnnnnnnnnnnnnnnnnnnnnnnnnnnnnnnnnnnnnnnnnnnnnnnnnnnnnnnnnnnnnnnnnnnnnnnnnnnnnnnnnnnnnnnnnnnnnnnnnnnnnnnnnnnnnnnnnnnnnnnnnnnnnnnnnnnnnnnnnnnnnnnnnnnnnnnnnnnnnnnnnnnnnnnnnnnnnnnnnnnnnnnnnnnnnnnnnnnnnnnnnnnnnnnnnnnnnnnnnnnnnnnnnnnnnnnnnnnnnnnnnnnnnnnnnnnnnnnnnnnnnnnnnnnnnnnnnnnnnnnnnnnnnnnnnnnnnnnnnnnnnnnnnnnnnnnnnnnnnnnnnnnnnnnnnnnnnnnnnnnnnnnnnnnnnnnnnnnnnnnnnnnnnnnnnnnnnnnnnnnnnnnnnnnnnnnnnnnnnnnnnnnnnnnnnnnnnnnnnnnnnnnnnnnnnnnnnnnnnnnnnnnnnnnnnnnnnnnnnnnnnnnnnnnnnnnnnnnnnnnnnnnnnnnnnnnnnnnnnnnnnnnnnnnnnnnnnnnnnnnnnnnnnnnnnnnnnnnnnnnnnnnnnnnnnnnnnnnnnnnnnnnnnnnnnnnnnnnnnnnnnnnnnnnnnnnnnnnnnnnnnnnnnnnnnnnnnnnnnnnnnnnnnnnnnnnnnnnnnnnnnnnnnnnnnnnnnnnnnnnnnnnnnnnnnnnnnnnnnnnnnnnnnnnnnnnnnnnnnnnnnnnnnnnnnnnnnnnnnnnnnnnnnnnnnnnnnnnnnnnnnnnnnnnnnnnnnnnnnnnnnnnnnnnnnnnnnnnnnnnnnnnnnnnnnnnnnnnnnnnnnnnnnnnnnnnnnnnnnnnnnnnnnnnnnnnnnnnnnnnnnnnnnnnnnnnnnnnnnnnnnnnnnnnnnnnnnnnnnnnnnnnnnnnnnnnnnnnnnnnnnnnnnnnnnnnnnnnnnnnnnnnnnnnnnnnnnnnnnnnnnnnnnnnnnnnnnnnnnnnnnnnnnnnnnnnnnnnnnnnnnnnnnnnnnnnnnnnnnnnnnnnnnnnnnnnnnnnnnnnnnnnnnnnnnnnnnnnnnnnnnnnnnnnnnnnnnnnnnnnnnnnnnnnnnnnnnnnnnnnnnnnnnnnnnnnnnnnnnnnnnnnnnnnnnnnnnnnnnnnnnnnnnnnnnnnnnnnnnnnnnnnnnnnnnnnnnnnnnnnnnnnnnnnnnnnnnnnnnnnnnnnnnnnnnnnnnnnnnnnnnnnnnnnnnnnnnnnnnnnnnnnnnnnnnnnnnnnnnnnnnnnnnnnnnnnnnnnnnnnnnnnnnnnnnnnnnnnnnnnnnnnnnnnnnnnnnnnnnnnnnnnnnnnnnnnnnnnnnnnnnnnnnnnnnnnnnnnnnnnnnnnnnnnnnnnnnnnnnnnnnnnnnnnnnnnnnnnnnnnnnnnnnnnnnnnnnnnnnnnnnnnnnnnnnnnnnnnnnnnnnnnnnnnnnnnnnnnnnnnnnnnnnnnnnnnnnnnnnnnnnnnnnnnnnnnnnnnnnnnnnnnnnnnnnnnnnnnnnnnnnnnnnnnnnnnnnnnnnnnnnnnnnnnnnnnnnnnnnnnnnnnnnnnnnnnnnnnnnnnnnnnnnnnnnnnnnnnnnnnnnnnnnnnnnnnnnnnnnnnnnnnnnnnnnnnnnnnnnnnnnnnnnnnnnnnnnnnnnnnnnnnnnnnnnnnnnnnnnnnnnnnnnnnnnnnnnnnnnnnnnnnnnnnnnnnnnnnnnnnnnnnnnnnnnnnnnnnnnnnnnnnnnnnnnnnnnnnnnnnnnnnnnnnnnnnnnnnnnnnnnnnnnnnnnnnnnnnnnnnnnnnnnnnnnnnnnnnnnnnnnnnnnnnnnnnnnnnnnnnnnnnnnnnnnnnnnnnnnnnnnnnnnnnnnnnnnnnnnnnnnnnnnnnnnnnnnnnnnnnnnnnnnnnnnnnnnnnnnnnnnnnnnnnnnnnnnnnnnnnnnnnnnnnnnnnnnnnnnnnnnnnnnnnnnnnnnnnnnnnnnnnnnnnnnnnnnnnnnnnnnnnnnnnnnnnnnnnnnnnnnnnnnnnnnnnnnnnnnnnnnnnnnnnnnnnnnnnnnnnnnnnnnnnnnnnnnnnnnnnnnnnnnnnnnnnnnnnnnnnnnnnnnnnnnnnnnnnnnnnnnnnnnnnnnnnnnnnnnnnnnnnnnnnnnnnnnnnnnnnnnnnnnnnnnnnnnnnnnnnnnnnnnnnnnnnnnnnnnnnnnnnnnnnnnnnnnnnnnnnnnnnnnnnnnnnnnnnnnnnnnnnnnnnnnnnnnnnnnnnnnnnnnnnnnnnnnnnnnnnnnnnnnnnnnnnnnnnnnnnnnnnnnnnnnnnnnnnnnnnnnnnnnnnnnnnnnnnnnnnnnnnnnnnnnnnnnnnnnnnnnnnnnnnnnnnnnnnnnnnnnnnnnnnnnnnnnnnnnnnnnnnnnnnnnnnnnnnnnnnnnnnnnnnnnnnnnnnnnnnnnnnnnnnnnnnnnnnnnnnnnnnnnnnnnnnnnnnnnnnnnnnnnnnnnnnnnnnnnnnnnnnnnnnnnnnnnnnnnnnnnnnnnnnnnnnnnnnnnnnnnnnnnnnnnnnnnnnnnnnnnnnnnnnnnnnnnnnnnnnnnnnnnnnnnnnnnnnnnnnnnnnnnnnnnnnnnnnnnnnnnnnnnnnnnnnnnnnnnnnnnnnnnnnnnnnnnnnnnnnnnnnnnnnnnnnnnnnnnnnnnnnnnnnnnnnnnnnnnnnnnnnnnnnnnnnnnnnnnnnnnnnnnnnnnnnnnnnnnnnnnnnnnnnnnnnnnnnnnnnnnnnnnnnnnnnnnnnnnnnnnnnnnnnnnnnnnnnnnnnnnnnnnnnnnnnnnnnnnnnnnnnnnnnnnnnnnnnnnnnnnnnnnnnnnnnnnnnnnnnnnnnnnnnnnnnnnnnnnnnnnnnnnnnnnnnnnnnnnnnnnnnnnnnnnnnnnnnnnnnnnnnnnnnnnnnnnnnnnnnnnnnnnnnnnnnnnnnnnnnnnnnnnnnnnnnnnnnnnnnnnnnnnnnnnnnnnnnnnnnnnnnnnnnnnnnnnnnnnnnnnnnnnnnnnnnnnnnnnnnnnnnnnnnnnnnnnnnnnnnnnnnnnnnnnnnnnnnnnnnnnnnnnnnnnnnnnnnnnnnnnnnnnnnnnnnnnnnnnnnnnnnnnnnnnnnnnnnnnnnnnnnnnnnnnnnnnnnnnnnnnnnnnnnnnnnnnnnnnnnnnnnnnnnnnnnnnnnnnnnnnnnnnnnnnnnnnnnnnnnnnnnnnnnnnnnnnnnnnnnnnnnnnnnnnnnnnnnnnnnnnnnnnnnnnnnnnnnnnnnnnnnnnnnnnnnnnnnnnnnnnnnnnnnnnnnnnnnnnnnnnnnnnnnnnnnnnnnnnnnnnnnnnnnnnnnnnnnnnnnnnnnnnnnnnnnnnnnnnnnnnnnnnnnnnnnnnnnnnnnnnnnnnnnnnnnnnnnnnnnnnnnnnnnnnnnnnnnnnnnnnnnnnnnnnnnnnnnnnnnnnnnnnnnnnnnnnnnnnnnnnnnnnnnnnnnnnnnnnnnnnnnnnnnnnnnnnnnnnnnnnnnnnnnnnnnnnnnnnnnnnnnnnnnnnnnnnnnnnnnnnnnnnnnnnnnnnnnnnnnnnnnnnnnnnnnnnnnnnnnnnnnnnnnnnnnnnnnnnnnnnnnnnnnnnnnnnnnnnnnnnnnnnnnnnnnnnnnnnnnnnnnnnnnnnnnnnnnnnnnnnnnnnnnnnnnnnnnnnnnnnnnnnnnnnnnnnnnnnnnnnnnnnnnnnnnnnnnnnnnnnnnnnnnnnnnnnnnnnnnnnnnnnnnnnnnnnnnnnnnnnnnnnnnnnnnnnnnnnnnnnnnnnnnnnnnnnnnnnnnnnnnnnnnnnnnnnnnnnnnnnnnnnnnnnnnnnnnnnnnnnnnnnnnnnnnnnnnnnnnnnnnnnnnnnnnnnnnnnnnnnnnnnnnnnnnnnnnnnnnnnnnnnnnnnnnnnnnnnnnnnnnnnnnnnnnnnnnnnnnnnnnnnnnnnnnnnnnnnnnnnnnnnnnnnnnnnnnnnnnnnnnnnnnnnnnnnnnnnnnnnnnnnnnnnnnnnnnnnnnnnnnnnnnnnnnnnnnnnnnnnnnnnnnnnnnnnnnnnnnnnnnnnnnnnnnnnnnnnnnnnnnnnnnnnnnnnnnnnnnnnnnnnnnnnnnnnnnnnnnnnnnnnnnnnnnnnnnnnnnnnnnnnnnnnnnnnnnnnnnnnnnnnnnnnnnnnnnnnnnnnnnnnnnnnnnnnnnnnnnnnnnnnnnnnnnnnnnnnnnnnnnnnnnnnnnnnnnnnnnnnnnnnnnnnnnnnnnnnnnnnnnnnnnnnnnnnnnnnnnnnnnnnnnnnnnnnnnnnnnnnnnnnnnnnnnnnnnnnnnnnnnnnnnnnnnnnnnnnnnnnnnnnnnnnnnnnnnnnnnnnnnnnnnnnnnnnnnnnnnnnnnnnnnnnnnnnnnnnnnnnnnnnnnnnnnnnnnnnnnnnnnnnnnnnnnnnnnnnnnnnnnnnnnnnnnnnnnnnnnnnnnnnnnnnnnnnnnnnnnnnnnnnnnnnnnnnnnnnnnnnnnnnnnnnnnnnnnnnnnnnnnnnnnnnnnnnnnnnnnnnnnnnnnnnnnnnnnnnnnnnnnnnnnnnnnnnnnnnnnnnnnnnnnnnnnnnnnnnnnnnnnnnnnnnnnnnnnnnnnnnnnnnnnnnnnnnnnnnnnnnnnnnnnnnnnnnnnnnnnnnnnnnnnnnnnnnnnnnnnnnnnnnnnnnnnnnnnnnnnnnnnnnnnnnnnnnnnnnnnnnnnnnnnnnnnnnnnnnnnnnnnnnnnnnnnnnnnnnnnnnnnnnnnnnnnnnnnnnnnnnnnnnnnnnnnnnnnnnnnnnnnnnnnnnnnnnnnnnnnnnnnnnnnnnnnnnnnnnnnnnnnnnnnnnnnnnnnnnnnnnnnnnnnnnnnnnnnnnnnnnnnnnnnnnnnnnnnnnnnnnnnnnnnnnnnnnnnnnnnnnnnnnnnnnnnnnnnnnnnnnnnnnnnnnnnnnnnnnnnnnnnnnnnnnnnnnnnnnnnnnnnnnnnnnnnnnnnnnnnnnnnnnnnnnnnnnnnnnnnnnnnnnnnnnnnnnnnnnnnnnnnnnnnnnnnnnnnnnnnnnnnnnnnnnnnnnnnnnnnnnnnnnnnnnnnnnnnnnnnnnnnnnnnnnnnnnnnnnnnnnnnnnnnnnnnnnnnnnnnnnnnnnnnnnnnnnnnnnnnnnnnnnnnnnnnnnnnnnnnnnnnnnnnnnnnnnnnnnnnnnnnnnnnnnnnnnnnnnnnnnnnnnnnnnnnnnnnnnnnnnnnnnnnnnnnnnnnnnnnnnnnnnnnnnnnnnnnnnnnnnnnnnnnnnnnnnnnnnnnnnnnnnnnnnnnnnnnnnnnnnnnnnnnnnnnnnnnnnnnnnnnnnnnnnnnnnnnnnnnnnnnnnnnnnnnnnnnnnnnnnnnnnnnnnnnnnnnnnnnnnnnnnnnnnnnnnnnnnnnnnnnnnnnnnnnnnnnnnnnnnnnnnnnnnnnnnnnnnnnnnnnnnnnnnnnnnnnnnnnnnnnnnnnnnnnnnnnnnnnnnnnnnnnnnnnnnnnnnnnnnnnnnnnnnnnnnnnnnnnnnnnnnnnnnnnnnnnnnnnnnnnnnnnnnnnnnnnnnnnnnnnnnnnnnnnnnnnnnnnnnnnnnnnnnnnnnnnnnnnnnnnnnnnnnnnnnnnnnnnnnnnnnnnnnnnnnnnnnnnnnnnnnnnnnnnnnnnnnnnnnnnnnnnnnnnnnnnnnnnnnnnnnnnnnnnnnnnnnnnnnnnnnnnnnnnnnnnnnnnnnnnnnnnnnnnnnnnnnnnnnnnnnnnnnnnnnnnnnnnnnnnnnnnnnnnnnnnnnnnnnnnnnnnnnnnnnnnnnnnnnnnnnnnnnnnnnnnnnnnnnnnnnnnnnnnnnnnnnnnnnnnnnnnnnnnnnnnnnnnnnnnnnnnnnnnnnnnnnnnnnnnnnnnnnnnnnnnnnnnnnnnnnnnnnnnnnnnnnnnnnnnnnnnnnnnnnnnnnnnnnnnnnnnnnnnnnnnnnnnnnnnnnnnnnnnnnnnnnnnnnnnnnnnnnnnnnnnnnnnnnnnnnnnnnnnnnnnnnnnnnnnnnnnnnnnnnnnnnnnnnnnnnnnnnnnnnnnnnnnnnnnnnnnnnnnnnnnnnnnnnnnnnnnnnnnnnnnnnnnnnnnnnnnnnnnnnnnnnnnnnnnnnnnnnnnnnnnnnnnnnnnnnnnnnnnnnnnnnnnnnnnnnnnnnnnnnnnnnnnnnnnnnnnnnnnnnnnnnnnnnnnnnnnnnnnnnnnnnnnnnnnnnnnnnnnnnnnnnnnnnnnnnnnnnnnnnnnnnnnnnnnnnnnnnnnnnnnnnnnnnnnnnnnnnnnnnnnnnnnnnnnnnnnnnnnnnnnnnnnnnnnnnnnnnnnnnnnnnnnnnnnnnnnnnnnnnnnnnnnnnnnnnnnnnnnnnnnnnnnnnnnnnnnnnnnnnnnnnnnnnnnnnnnnnnnnnnnnnnnnnnnnnnnnnnnnnnnnnnnnnnnnnnnnnnnnnnnnnnnnnnnnnnnnnnnnnnnnnnnnnnnnnnnnnnnnnnnnnnnnnnnnnnnnnnnnnnnnnnnnnnnnnnnnnnnnnnnnnnnnnnnnnnnnnnnnnnnnnnnnnnnnnnnnnnnnnnnnnnnnnnnnnnnnnnnnnnnnnnnnnnnnnnnnnnnnnnnnnnnnnnnnnnnnnnnnnnnnnnnnnnnnnnnnnnnnnnnnnnnnnnnnnnnnnnnnnnnnnnnnnnnnnnnnnnnnnnnnnnnnnnnnnnnnnnnnnnnnnnnnnnnnnnnnnnnnnnnnnnnnnnnnnnnnnnnnnnnnnnnnnnnnnnnnnnnnnnnnnnnnnnnnnnnnnnnnnnnnnnnnnnnnnnnnnnnnnnnnnnnnnnnnnnnnnnnnnnnnnnnnnnnnnnnnnnnnnnnnnnnnnnnnnnnnnnnnnnnnnnnnnnnnnnnnnnnnnnnnnnnnnnnnnnnnnnnnnnnnnnnnnnnnnnnnnnnnnnnnnnnnnnnnnnnnnnnnnnnnnnnnnnnnnnnnnnnnnnnnnnnnnnnnnnnnnnnnnnnnnnnnnnnnnnnnnnnnnnnnnnnnnnnnnnnnnnnnnnnnnnnnnnnnnnnnnnnnnnnnnnnnnnnnnnnnnnnnnnnnnnnnnnnnnnnnnnnnnnnnnnnnnnnnnnnnnnnnnnnnnnnnnnnnnnnnnnnnnnnnnnnnnnnnnnnnnnnnnnnnnnnnnnnnnnnnnnnnnnnnnnnnnnnnnnnnnnnnnnnnnnnnnnnnnnnnnnnnnnnnnnnnnnnnnnnnnnnnnnnnnnnnnnnnnnnnnnnnnnnnnnnnnnnnnnnnnnnnnnnnnnnnnnnnnnnnnnnnnnnnnnnnnnnnnnnnnnnnnnnnnnnnnnnnnnnnnnnnnnnnnnnnnnnnnnnnnnnnnnnnnnnnnnnnnnnnnnnnnnnnnnnnnnnnnnnnnnnnnnnnnnnnnnnnnnnnnnnnnnnnnnnnnnnnnnnnnnnnnnnnnnnnnnnnnnnnnnnnnnnnnnnnnnnnnnnnnnnnnnnnnnnnnnnnnnnnnnnnnnnnnnnnnnnnnnnnnnnnnnnnnnnnnnnnnnnnnnnnnnnnnnnnnnnnnnnnnnnnnnnnnnnnnnnnnnnnnnnnnnnnnnnnnnnnnnnnnnnnnnnnnnnnnnnnnnnnnnnnnnnnnnnnnnnnnnnnnnnnnnnnnnnnnnnnnnnnnnnnnnnnnnnnnnnnnnnnnnnnnnnnnnnnnnnnnnnnnnnnnnnnnnnnnnnnnnnnnnnnnnnnnnnnnnnnnnnnnnnnnnnnnnnnnnnnnnnnnnnnnnnnnnnnnnnnnnnnnnnnnnnnnnnnnnnnnnnnnnnnnnnnnnnnnnnnnnnnnnnnnnnnnnnnnnnnnnnnnnnnnnnnnnnnnnnnnnnnnnnnnnnnnnnnnnnnnnnnnnnnnnnnnnnnnnnnnnnnnnnnnnnnnnnnnnnnnnnnnnnnnnnnnnnnnnnnnnnnnnnnnnnnnnnnnnnnnnnnnnnnnnnnnnnnnnnnnnnnnnnnnnnnnnnnnnnnnnnnnnnnnnnnnnnnnnnnnnnnnnnnnnnnnnnnnnnnnnnnnnnnnnnnnnnnnnnnnnnnnnnnnnnnnnnnnnnnnnnnnnnnnnnnnnnnnnnnnnnnnnnnnnnnnnnnnnnnnnnnnnnnnnnnnnnnnnnnnnnnnnnnnnnnnnnnnnnnnnnnnnnnnnnnnnnnnnnnnnnnnnnnnnnnnnnnnnnnnnnnnnnnnnnnnnnnnnnnnnnnnnnnnnnnnnnnnnnnnnnnnnnnnnnnnnnnnnnnnnnnnnnnnnnnnnnnnnnnnnnnnnnnnnnnnnnnnnnnnnnnnnnnnnnnnnnnnnnnnnnnnnnnnnnnnnnnnnnnnnnnnnnnnnnnnnnnnnnnnnnnnnnnnnnnnnnnnnnnnnnnnnnnnnnnnnnnnnnnnnnnnnnnnnnnnnnnnnnnnnnnnnnnnnnnnnnnnnnnnnnnnnnnnnnnnnnnnnnnnnnnnnnnnnnnnnnnnnnnnnnnnnnnnnnnnnnnnnnnnnnnnnnnnnnnnnnnnnnnnnnnnnnnnnnnnnnnnnnnnnnnnnnnnnnnnnnnnnnnnnnnnnnnnnnnnnnnnnnnnnnnnnnnnnnnnnnnnnnnnnnnnnnnnnnnnnnnnnnnnnnnnnnnnnnnnnnnnnnnnnnnnnnnnnnnnnnnnnnnnnnnnnnnnnnnnnnnnnnnnnnnnnnnnnnnnnnnnnnnnnnnnnnnnnnnnnnnnnnnnnnnnnnnnnnnnnnnnnnnnnnnnnnnnnnnnnnnnnnnnnnnnnnnnnnnnnnnnnnnnnnnnnnnnnnnnnnnnnnnnnnnnnnnnnnnnnnnnnnnnnnnnnnnnnnnnnnnnnnnnnnnnnnnnnnnnnnnnnnnnnnnnnnnnnnnnnnnnnnnnnnnnnnnnnnnnnnnnnnnnnnnnnnnnnnnnnnnnnnnnnnnnnnnnnnnnnnnnnnnnnnnnnnnnnnnnnnnnnnnnnnnnnnnnnnnnnnnnnnnnnnnnnnnnnnnnnnnnnnnnnnnnnnnnnnnnnnnnnnnnnnnnnnnnnnnnnnnnnnnnnnnnnnnnnnnnnnnnnnnnnnnnnnnnnnnnnnnnnnnnnnnnnnnnnnnnnnnnnnnnnnnnnnnnnnnnnnnnnnnnnnnnnnnnnnnnnnnnnnnnnnnnnnnnnnnnnnnnnnnnnnnnnnnnnnnnnnnnnnnnnnnnnnnnnnnnnnnnnnnnnnnnnnnnnnnnnnnnnnnnnnnnnnnnnnnnnnnnnnnnnnnnnnnnnnnnnnnnnnnnnnnnnnnnnnnnnnnnnnnnnnnnnnnnnnnnnnnnnnnnnnnnnnnnnnnnnnnnnnnnnnnnnnnnnnnnnnnnnnnnnnnnnnnnnnnnnnnnnnnnnnnnnnnnnnnnnnnnnnnnnnnnnnnnnnnnnnnnnnnnnnnnnnnnnnnnnnnnnnnnnnnnnnnnnnnnnnnnnnnnnnnnnnnnnnnnnnnnnnnnnnnnnnnnnnnnnnnnnnnnnnnnnnnnnnnnnnnnnnnnnnnnnnnnnnnnnnnnnnnnnnnnnnnnnnnnnnnnnnnnnnnnnnnnnnnnnnnnnnnnnnnnnnnnnnnnnnnnnnnnnnnnnnnnnnnnnnnnnnnnnnnnnnnnnnnnnnnnnnnnnnnnnnnnnnnnnnnnnnnnnnnnnnnnnnnnnnnnnnnnnnnnnnnnnnnnnnnnnnnnnnnnnnnnnnnnnnnnnnnnnnnnnnnnnnnnnnnnnnnnnnnnnnnnnnnnnnnnnnnnnnnnnnnnnnnnnnnnnnnnnnnnnnnnnnnnnnnnnnnnnnnnnnnnnnnnnnnnnnnnnnnnnnnnnnnnnnnnnnnnnnnnnnnnnnnnnnnnnnnnnnnnnnnnnnnnnnnnnnnnnnnnnnnnnnnnnnnnnnnnnnnnnnnnnnnnnnnnnnnnnnnnnnnnnnnnnnnnnnnnnnnnnnnnnnnnnnnnnnnnnnnnnnnnnnnnnnnnnnnnnnnnnnnnnnnnnnnnnnnnnnnnnnnnnnnnnnnnnnnnnnnnnnnnnnnnnnnnnnnnnnnnnnnnnnnnnnnnnnnnnnnnnnnnnnnnnnnnnnnnnnnnnnnnnnnnnnnnnnnnnnnnnnnnnnnnnnnnnnnnnnnnnnnnnnnnnnnnnnnnnnnnnnnnnnnnnnnnnnnnnnnnnnnnnnnnnnnnnnnnnnnnnnnnnnnnnnnnnnnnnnnnnnnnnnnnnnnnnnnnnnnnnnnnnnnnnnnnnnnnnnnnnnnnnnnnnnnnnnnnnnnnnnnnnnnnnnnnnnnnnnnnnnnnnnnnnnnnnnnnnnnnnnnnnnnnnnnnnnnnnnnnnnnnnnnnnnnnnnnnnnnnnnnnnnnnnnnnnnnnnnnnnnnnnnnnnnnnnnnnnnnnnnnnnnnnnnnnnnnnnnnnnnnnnnnnnnnnnnnnnnnnnnnnnnnnnnnnnnnnnnnnnnnnnnnnnnnnnnnnnnnnnnnnnnnnnnnnnnnnnnnnnnnnnnnnnnnnnnnnnnnnnnnnnnnnnnnnnnnnnnnnnnnnnnnnnnnnnnnnnnnnnnnnnnnnnnnnnnnnnnnnnnnnnnnnnnnnnnnnnnnnnnnnnnnnnnnnnnnnnnnnnnnnnnnnnnnnnnnnnnnnnnnnnnnnnnnnnnnnnnnnnnnnnnnnnnnnnnnnnnnnnnnnnnnnnnnnnnnnnnnnnnnnnnnnnnnnnnnnnnnnnnnnnnnnnnnnnnnnnnnnnnnnnnnnnnnnnnnnnnnnnnnnnnnnnnnnnnnnnnnnnnnnnnnnnnnnnnnnnnnnnnnnnnnnnnnnnnnnnnnnnnnnnnnnnnnnnnnnnnnnnnnnnnnnnnnnnnnnnnnnnnnnnnnnnnnnnnnnnnnnnnnnnnnnnnnnnnnnnnnnnnnnnnnnnnnnnnnnnnnnnnnnnnnnnnnnnnnnnnnnnnnnnnnnnnnnnnnnnnnnnnnnnnnnnnnnnnnnnnnnnnnnnnnnnnnnnnnnnnnnnnnnnnnnnnnnnnnnnnnnnnnnnnnnnnnnnnnnnnnnnnnnnnnnnnnnnnnnnnnnnnnnnnnnnnnnnnnnnnnnnnnnnnnnnnnnnnnnnnnnnnnnnnnnnnnnnnnnnnnnnnnnnnnnnnnnnnnnnnnnnnnnnnnnnnnnnnnnnnnnnnnnnnnnnnnnnnnnnnnnnnnnnnnnnnnnnnnnnnnnnnnnnnnnnnnnnnnnnnnnnnnnnnnnnnnnnnnnnnnnnnnnnnnnnnnnnnnnnnnnnnnnnnnnnnnnnnnnnnnnnnnnnnnnnnnnnnnnnnnnnnnnnnnnnnnnnnnnnnnnnnnnnnnnnnnnnnnnnnnnnnnnnnnnnnnnnnnnnnnnnnnnnnnnnnnnnnnnnnnnnnnnnnnnnnnnnnnnnnnnnnnnnnnnnnnnnnnnnnnnnnnnnnnnnnnnnnnnnnnnnnnnnnnnnnnnnnnnnnnnnnnnnnnnnnnnnnnnnnnnnnnnnnnnnnnnnnnnnnnnnnnnnnnnnnnnnnnnnnnnnnnnnnnnnnnnnnnnnnnnnnnnnnnnnnnnnnnnnnnnnnnnnnnnnnnnnnnnnnnnnnnnnnnnnnnnnnnnnnnnnnnnnnnnnnnnnnnnnnnnnnnnnnnnnnnnnnnnnnnnnnnnnnnnnnnnnnnnnnnnnnnnnnnnnnnnnnnnnnnnnnnnnnnnnnnnnnnnnnnnnnnnnnnnnnnnnnnnnnnnnnnnnnnnnnnnnnnnnnnnnnnnnnnnnnnnnnnnnnnnnnnnnnnnnnnnnnnnnnnnnnnnnnnnnnnnnnnnnnnnnnnnnnnnnnnnnnnnnnnnnnnnnnnnnnnnnnnnnnnnnnnnnnnnnnnnnnnnnnnnnnnnnnnnnnnnnnnnnnnnnnnnnnnnnnnnnnnnnnnnnnnnnnnnnnnnnnnnnnnnnnnnnnnnnnnnnnnnnnnnnnnnnnnnnnnnnnnnnnnnnnnnnnnnnnnnnnnnnnnnnnnnnnnnnnnnnnnnnnnnnnnnnnnnnnnnnnnnnnnnnnnnnnnnnnnnnnnnnnnnnnnnnnnnnnnnnnnnnnnnnnnnnnnnnnnnnnnnnnnnnnnnnnnnnnnnnnnnnnnnnnnnnnnnnnnnnnnnnnnnnnnnnnnnnnnnnnnnnnnnnnnnnnnnnnnnnnnnnnnnnnnnnnnnnnnnnnnnnnnnnnnnnnnnnnnnnnnnnnnnnnnnnnnnnnnnnnnnnnnnnnnnnnnnnnnnnnnnnnnnnnnnnnnnnnnnnnnnnnnnnnnnnnnnnnnnnnnnnnnnnnnnnnnnnnnnnnnnnnnnnnnnnnnnnnnnnnnnnnnnnnnnnnnnnnnnnnnnnnnnnnnnnnnnnnnnnnnnnnnnnnnnnnnnnnnnnnnnnnnnnnnnnnnnnnnnnnnnnnnnnnnnnnnnnnnnnnnnnnnnnnnnnnnnnnnnnnnnnnnnnnnnnnnnnnnnnnnnnnnnnnnnnnnnnnnnnnnnnnnnnnnnnnnnnnnnnnnnnnnnnnnnnnnnnnnnnnnnnnnnnnnnnnnnnnnnnnnnnnnnnnnnnnnnnnnnnnnnnnnnnnnnnnnnnnnnnnnnnnnnnnnnnnnnnnnnnnnnnnnnnnnnnnnnnnnnnnnnnnnnnnnnnnnnnnnnnnnnnnnnnnnnnnnnnnnnnnnnnnnnnnnnnnnnnnnnnnnnnnnnnnnnnnnnnnnnnnnnnnnnnnnnnnnnnnnnnnnnnnnnnnnnnnnnnnnnnnnnnnnnnnnnnnnnnnnnnnnnnnnnnnnnnnnnnnnnnnnnnnnnnnnnnnnnnnnnnnnnnnnnnnnnnnnnnnnnnnnnnnnnnnnnnnnnnnnnnnnnnnnnnnnnnnnnnnnnnnnnnnnnnnnnnnnnnnnnnnnnnnnnnnnnnnnnnnnnnnnnnnnnnnnnnnnnnnnnnnnnnnnnnnnnnnnnnnnnnnnnnnnnnnnnnnnnnnnnnnnnnnnnnnnnnnnnnnnnnnnnnnnnnnnnnnnnnnnnnnnnnnnnnnnnnnnnnnnnnnnnnnnnnnnnnnnnnnnnnnnnnnnnnnnnnnnnnnnnnnnnnnnnnnnnnnnnnnnnnnnnnnnnnnnnnnnnnnnnnnnnnnnnnnnnnnnnnnnnnnnnnnnnnnnnnnnnnnnnnnnnnnnnnnnnnnnnnnnnnnnnnnnnnnnnnnnnnnnnnnnnnnnnnnnnnnnnnnnnnnnnnnnnnnnnnnnnnnnnnnnnnnnnnnnnnnnnnnnnnnnnnnnnnnnnnnnnnnnnnnnnnnnnnnnnnnnnnnnnnnnnnnnnnnnnnnnnnnnnnnnnnnnnnnnnnnnnnnnnnnnnnnnnnnnnnnnnnnnnnnnnnnnnnnnnnnnnnnnnnnnnnnnnnnnnnnnnnnnnnnnnnnnnnnnnnnnnnnnnnnnnnnnnnnnnnnnnnnnnnnnnnnnnnnnnnnnnnnnnnnnnnnnnnnnnnnnnnnnnnnnnnnnnnnnnnnnnnnnnnnnnnnnnnnnnnnnnnnnnnnnnnnnnnnnnnnnnnnnnnnnnnnnnnnnnnnnnnnnnnnnnnnnnnnnnnnnnnnnnnnnnnnnnnnnnnnnnnnnnnnnnnnnnnnnnnnnnnnnnnnnnnnnnnnnnnnnnnnnnnnnnnnnnnnnnnnnnnnnnnnnnnnnnnnnnnnnnnnnnnnnnnnnnnnnnnnnnnnnnnnnnnnnnnnnnnnnnnnnnnnnnnnnnnnnnnnnnnnnnnnnnnnnnnnnnnnnnnnnnnnnnnnnnnnnnnnnnnnnnnnnnnnnnnnnnnnnnnnnnnnnnnnnnnnnnnnnnnnnnnnnnnnnnnnnnnnnnnnnnnnnnnnnnnnnnnnnnnnnnnnnnnnnnnnnnnnnnnnnnnnnnnnnnnnnnnnnnnnnnnnnnnnnnnnnnnnnnnnnnnnnnnnnnnnnnnnnnnnnnnnnnnnnnnnnnnnnnnnnnnnnnnnnnnnnnnnnnnnnnnnnnnnnnnnnnnnnnnnnnnnnnnnnnnnnnnnnnnnnnnnnnnnnnnnnnnnnnnnnnnnnnnnnnnnnnnnnnnnnnnnnnnnnnnnnnnnnnnnnnnnnnnnnnnnnnnnnnnnnnnnnnnnnnnnnnnnnnnnnnnnnnnnnnnnnnnnnnnnnnnnnnnnnnnnnnnnnnnnnnnnnnnnnnnnnnnnnnnnnnnnnnnnnnnnnnnnnnnnnnnnnnnnnnnnnnnnnnnnnnnnnnnnnnnnnnnnnnnnnnnnnnnnnnnnnnnnnnnnnnnnnnnnnnnnnnnnnnnnnnnnnnnnnnnnnnnnnnnnnnnnnnnnnnnnnnnnnnnnnnnnnnnnnnnnnnnnnnnnnnnnnnnnnnnnnnnnnnnnnnnnnnnnnnnnnnnnnnnnnnnnnnnnnnnnnnnnnnnnnnnnnnnnnnnnnnnnnnnnnnnnnnnnnnnnnnnnnnnnnnnnnnnnnnnnnnnnnnnnnnnnnnnnnnnnnnnnnnnnnnnnnnnnnnnnnnnnnnnnnnnnnnnnnnnnnnnnnnnnnnnnnnnnnnnnnnnnnnnnnnnnnnnnnnnnnnnnnnnnnnnnnnnnnnnnnnnnnnnnnnnnnnnnnnnnnnnnnnnnnnnnnnnnnnnnnnnnnnnnnnnnnnnnnnnnnnnnnnnnnnnnnnnnnnnnnnnnnnnnnnnnnnnnnnnnnnnnnnnnnnnnnnnnnnnnnnnnnnnnnnnnnnnnnnnnnnnnnnnnnnnnnnnnnnnnnnnnnnnnnnnnnnnnnnnnnnnnnnnnnnnnnnnnnnnnnnnnnnnnnnnnnnnnnnnnnnnnnnnnnnnnnnnnnnnnnnnnnnnnnnnnnnnnnnnnnnnnnnnnnnnnnnnnnnnnnnnnnnnnnnnnnnnnnnnnnnnnnnnnnnnnnnnnnnnnnnnnnnnnnnnnnnnnnnnnnnnnnnnnnnnnnnnnnnnnnnnnnnnnnnnnnnnnnnnnnnnnnnnnnnnnnnnnnnnnnnnnnnnnnnnnnnnnnnnnnnnnnnnnnnnnnnnnnnnnnnnnnnnnnnnnnnnnnnnnnnnnnnnnnnnnnnnnnnnnnnnnnnnnnnnnnnnnnnnnnnnnnnnnnnnnnnnnnnnnnnnnnnnnnnnnnnnnnnnnnnnnnnnnnnnnnnnnnnnnnnnnnnnnnnnnnnnnnnnnnnnnnnnnnnnnnnnnnnnnnnnnnnnnnnnnnnnnnnnnnnnnnnnnnnnnnnnnnnnnnnnnnnnnnnnnnnnnnnnnnnnnnnnnnnnnnnnnnnnnnnnnnnnnnnnnnnnnnnnnnnnnnnnnnnnnnnnnnnnnnnnnnnnnnnnnnnnnnnnnnnnnnnnnnnnnnnnnnnnnnnnnnnnnnnnnnnnnnnnnnnnnnnnnnnnnnnnnnnnnnnnnnnnnnnnnnnnnnnnnnnnnnnnnnnnnnnnnnnnnnnnnnnnnnnnnnnnnnnnnnnnnnnnnnnnnnnnnnnnnnnnnnnnnnnnnnnnnnnnnnnnnnnnnnnnnnnnnnnnnnnnnnnnnnnnnnnnnnnnnnnnnnnnnnnnnnnnnnnnnnnnnnnnnnnnnnnnnnnnnnnnnnnnnnnnnnnnnnnnnnnnnnnnnnnnnnnnnnnnnnnnnnnnnnnnnnnnnnnnnnnnnnnnnnnnnnnnnnnnnnnnnnnnnnnnnnnnnnnnnnnnnnnnnnnnnnnnnnnnnnnnnnnnnnnnnnnnnnnnnnnnnnnnnnnnnnnnnnnnnnnnnnnnnnnnnnnnnnnnnnnnnnnnnnnnnnnnnnnnnnnnnnnnnnnnnnnnnnnnnnnnnnnnnnnnnnnnnnnnnnnnnnnnnnnnnnnnnnnnnnnnnnnnnnnnnnnnnnnnnnnnnnnnnnnnnnnnnnnnnnnnnnnnnnnnnnnnnnnnnnnnnnnnnnnnnnnnnnnnnnnnnnnnnnnnnnnnnnnnnnnnnnnnnnnnnnnnnnnnnnnnnnnnnnnnnnnnnnnnnnnnnnnnnnnnnnnnnnnnnnnnnnnnnnnnnnnnnnnnnnnnnnnnnnnnnnnnnnnnnnnnnnnnnnnnnnnnnnnnnnnnnnnnnnnnnnnnnnnnnnnnnnnnnnnnnnnnnnnnnnnnnnnnnnnnnnnnnnnnnnnnnnnnnnnnnnnnnnnnnnnnnnnnnnnnnnnnnnnnnnnnnnnnnnnnnnnnnnnnnnnnnnnnnnnnnnnnnnnnnnnnnnnnnnnnnnnnnnnnnnnnnnnnnnnnnnnnnnnnnnnnnnnnnnnnnnnnnnnnnnnnnnnnnnnnnnnnnnnnnnnnnnnnnnnnnnnnnnnnnnnnnnnnnnnnnnnnnnnnnnnnnnnnnnnnnnnnnnnnnnnnnnnnnnnnnnnnnnnnnnnnnnnnnnnnnnnnnnnnnnnnnnnnnnnnnnnnnnnnnnnnnnnnnnnnnnnnnnnnnnnnnnnnnnnnnnnnnnnnnnnnnnnnnnnnnnnnnnnnnnnnnnnnnnnnnnnnnnnnnnnnnnnnnnnnnnnnnnnnnnnnnnnnnnnnnnnnnnnnnnnnnnnnnnnnnnnnnnnnnnnnnnnnnnnnnnnnnnnnnnnnnnnnnnnnnnnnnnnnnnnnnnnnnnnnnnnnnnnnnnnnnnnnnnnnnnnnnnnnnnnnnnnnnnnnnnnnnnnnnnnnnnnnnnnnnnnnnnnnnnnnnnnnnnnnnnnnnnnnnnnnnnnnnnnnnnnnnnnnnnnnnnnnnnnnnnnnnnnnnnnnnnnnnnnnnnnnnnnnnnnnnnnnnnnnnnnnnnnnnnnnnnnnnnnnnnnnnnnnnnnnnnnnnnnnnnnnnnnnnnnnnnnnnnnnnnnnnnnnnnnnnnnnnnnnnnnnnnnnnnnnnnnnnnnnnnnnnnnnnnnnnnnnnnnnnnnnnnnnnnnnnnnnnnnnnnnnnnnnnnnnnnnnnnnnnnnnnnnnnnnnnnnnnnnnnnnnnnnnnnnnnnnnnnnnnnnnnnnnnnnnnnnnnnnnnnnnnnnnnnnnnnnnnnnnnnnnnnnnnnnnnnnnnnnnnnnnnnnnnnnnnnnnnnnnnnnnnnnnnnnnnnnnnnnnnnnnnnnnnnnnnnnnnnnnnnnnnnnnnnnnnnnnnnnnnnnnnnnnnnnnnnnnnnnnnnnnnnnnnnnnnnnnnnnnnnnnnnnnnnnnnnnnnnnnnnnnnnnnnnnnnnnnnnnnnnnnnnnnnnnnnnnnnnnnnnnnnnnnnnnnnnnnnnnnnnnnnnnnnnnnnnnnnnnnnnnnnnnnnnnnnnnnnnnnnnnnnnnnnnnnnnnnnnnnnnnnnnnnnnnnnnnnnnnnnnnnnnnnnnnnnnnnnnnnnnnnnnnnnnnnnnnnnnnnnnnnnnnnnnnnnnnnnnnnnnnnnnnnnnnnnnnnnnnnnnnnnnnnnnnnnnnnnnnnnnnnnnnnnnnnnnnnnnnnnnnnnnnnnnnnnnnnnnnnnnnnnnnnnnnnnnnnnnnnnnnnnnnnnnnnnnnnnnnnnnnnnnnnnnnnnnnnnnnnnnnnnnnnnnnnnnnnnnnnnnnnnnnnnnnnnnnnnnnnnnnnnnnnnnnnnnnnnnnnnnnnnnnnnnnnnnnnnnnnnnnnnnnnnnnnnnnnnnnnnnnnnnnnnnnnnnnnnnnnnnnnnnnnnnnnnnnnnnnnnnnnnnnnnnnnnnnnnnnnnnnnnnnnnnnnnnnnnnnnnnnnnnnnnnnnnnnnnnnnnnnnnnnnnnnnnnnnnnnnnnnnnnnnnnnnnnnnnnnnnnnnnnnnnnnnnnnnnnnnnnnnnnnnnnnnnnnnnnnnnnnnnnnnnnnnnnnnnnnnnnnnnnnnnnnnnnnnnnnnnnnnnnnnnnnnnnnnnnnnnnnnnnnnnnnnnnnnnnnnnnnnnnnnnnnnnnnnnnnnnnnnnnnnnnnnnnnnnnnnnnnnnnnnnnnnnnnnnnnnnnnnnnnnnnnnnnnnnnnnnnnnnnnnnnnnnnnnnnnnnnnnnnnnnnnnnnnnnnnnnnnnnnnnnnnnnnnnnnnnnnnnnnnnnnnnnnnnnnnnnnnnnnnnnnnnnnnnnnnnnnnnnnnnnnnnnnnnnnnnnnnnnnnnnnnnnnnnnnnnnnnnnnnnnnnnnnnnnnnnnnnnnnnnnnnnnnnnnnnnnnnnnnnnnnnnnnnnnnnnnnnnnnnnnnnnnnnnnnnnnnnnnnnnnnnnnnnnnnnnnnnnnnnnnnnnnnnnnnnnnnnnnnnnnnnnnnnnnnnnnnnnnnnnnnnnnnnnnnnnnnnnnnnnnnnnnnnnnnnnnnnnnnnnnnnnnnnnnnnnnnnnnnnnnnnnnnnnnnnnnnnnnnnnnnnnnnnnnnnnnnnnnnnnnnnnnnnnnnnnnnnnnnnnnnnnnnnnnnnnnnnnnnnnnnnnnnnnnnnnnnnnnnnnnnnnnnnnnnnnnnnnnnnnnnnnnnnnnnnnnnnnnnnnnnnnnnnnnnnnnnnnnnnnnnnnnnnnnnnnnnnnnnnnnnnnnnnnnnnnnnnnnnnnnnnnnnnnnnnnnnnnnnnnnnnnnnnnnnnnnnnnnnnnnnnnnnnnnnnnnnnnnnnnnnnnnnnnnnnnnnnnnnnnnnnnnnnnnnnnnnnnnnnnnnnnnnnnnnnnnnnnnnnnnnnnnnnnnnnnnnnnnnnnnnnnnnnnnnnnnnnnnnnnnnnnnnnnnnnnnnnnnnnnnnnnnnnnnnnnnnnnnnnnnnnnnnnnnnnnnnnnnnnnnnnnnnnnnnnnnnnnnnnnnnnnnnnnnnnnnnnnnnnnnnnnnnnnnnnnnnnnnnnnnnnnnnnnnnnnnnnnnnnnnnnnnnnnnnnnnnnnnnnnnnnnnnnnnnnnnnnnnnnnnnnnnnnnnnnnnnnnnnnnnnnnnnnnnnnnnnnnnnnnnnnnnnnnnnnnnnnnnnnnnnnnnnnnnnnnnnnnnnnnnnnnnnnnnnnnnnnnnnnnnnnnnnnnnnnnnnnnnnnnnnnnnnnnnnnnnnnnnnnnnnnnnnnnnnnnnnnnnnnnnnnnnnnnnnnnnnnnnnnnnnnnnnnnnnnnnnnnnnnnnnnnnnnnnnnnnnnnnnnnnnnnnnnnnnnnnnnnnnnnnnnnnnnnnnnnnnnnnnnnnnnnnnnnnnnnnnnnnnnnnnnnnnnnnnnnnnnnnnnnnnnnnnnnnnnnnnnnnnnnnnnnnnnnnnnnnnnnnnnnnnnnnnnnnnnnnnnnnnnnnnnnnnnnnnnnnnnnnnnnnnnnnnnnnnnnnnnnnnnnnnnnnnnnnnnnnnnnnnnnnnnnnnnnnnnnnnnnnnnnnnnnnnnnnnnnnnnnnnnnnnnnnnnnnnnnnnnnnnnnnnnnnnnnnnnnnnnnnnnnnnnnnnnnnnnnnnnnnnnnnnnnnnnnnnnnnnnnnnnnnnnnnnnnnnnnnnnnnnnnnnnnnnnnnnnnnnnnnnnnnnnnnnnnnnnnnnnnnnnnnnnnnnnnnnnnnnnnnnnnnnnnnnnnnnnnnnnnnnnnnnnnnnnnnnnnnnnnnnnnnnnnnnnnnnnnnnnnnnnnnnnnnnnnnnnnnnnnnnnnnnnnnnnnnnnnnnnnnnnnnnnnnnnnnnnnnnnnnnnnnnnnnnnnnnnnnnnnnnnnnnnnnnnnnnnnnnnnnnnnnnnnnnnnnnnnnnnnnnnnnnnnnnnnnnnnnnnnnnnnnnnnnnnnnnnnnnnnnnnnnnnnnnnnnnnnnnnnnnnnnnnnnnnnnnnnnnnnnnnnnnnnnnnnnnnnnnnnnnnnnnnnnnnnnnnnnnnnnnnnnnnnnnnnnnnnnnnnnnnnnnnnnnnnnnnnnnnnnnnnnnnnnnnnnnnnnnnnnnnnnnnnnnnnnnnnnnnnnnnnnnnnnnnnnnnnnnnnnnnnnnnnnnnnnnnnnnnnnnnnnnnnnnnnnnnnnnnnnnnnnnnnnnnnnnnnnnnnnnnnnnnnnnnnnnnnnnnnnnnnnnnnnnnnnnnnnnnnnnnnnnnnnnnnnnnnnnnnnnnnnnnnnnnnnnnnnnnnnnnnnnnnnnnnnnnnnnnnnnnnnnnnnnnnnnnnnnnnnnnnnnnnnnnnnnnnnnnnnnnnnnnnnnnnnnnnnnnnnnnnnnnnnnnnnnnnnnnnnnnnnnnnnnnnnnnnnnnnnnnnnnnnnnnnnnnnnnnnnnnnnnnnnnnnnnnnnnnnnnnnnnnnnnnnnnnnnnnnnnnnnnnnnnnnnnnnnnnnnnnnnnnnnnnnnnnnnnnnnnnnnnnnnnnnnnnnnnnnnnnnnnnnnnnnnnnnnnnnnnnnnnnnnnnnnnnnnnnnnnnnnnnnnnnnnnnnnnnnnnnnnnnnnnnnnnnnnnnnnnnnnnnnnnnnnnnnnnnnnnnnnnnnnnnnnnnnnnnnnnnnnnnnnnnnnnnnnnnnnnnnnnnnnnnnnnnnnnnnnnnnnnnnnnnnnnnnnnnnnnnnnnnnnnnnnnnnnnnnnnnnnnnnnnnnnnnnnnnnnnnnnnnnnnnnnnnnnnnnnnnnnnnnnnnnnnnnnnnnnnnnnnnnnnnnnnnnnnnnnnnnnnnnnnnnnnnnnnnnnnnnnnnnnnnnnnnnnnnnnnnnnnnnnnnnnnnnnnnnnnnnnnnnnnnnnnnnnnnnnnnnnnnnnnnnnnnnnnnnnnnnnnnnnnnnnnnnnnnnnnnnnnnnnnnnnnnnnnnnnnnnnnnnnnnnnnnnnnnnnnnnnnnnnnnnnnnnnnnnnnnnnnnnnnnnnnnnnnnnnnnnnnnnnnnnnnnnnnnnnnnnnnnnnnnnnnnnnnnnnnnnnnnnnnnnnnnnnnnnnnnnnnnnnnnnnnnnnnnnnnnnnnnnnnnnnnnnnnnnnnnnnnnnnnnnnnnnnnnnnnnnnnnnnnnnnnnnnnnnnnnnnnnnnnnnnnnnnnnnnnnnnnnnnnnnnnnnnnnnnnnnnnnnnnnnnnnnnnnnnnnnnnnnnnnnnnnnnnnnnnnnnnnnnnnnnnnnnnnnnnnnnnnnnnnnnnnnnnnnnnnnnnnnnnnnnnnnnnnnnnnnnnnnnnnnnnnnnnnnnnnnnnnnnnnnnnnnnnnnnnnnnnnnnnnnnnnnnnnnnnnnnnnnnnnnnnnnnnnnnnnnnnnnnnnnnnnnnnnnnnnnnnnnnnnnnnnnnnnnnnnnnnnnnnnnnnnnnnnnnnnnnnnnnnnnnnnnnnnnnnnnnnnnnnnnnnnnnnnnnnnnnnnnnnnnnnnnnnnnnnnnnnnnnnnnnnnnnnnnnnnnnnnnnnnnnnnnnnnnnnnnnnnnnnnnnnnnnnnnnnnnnnnnnnnnnnnnnnnnnnnnnnnnnnnnnnnnnnnnnnnnnnnnnnnnnnnnnnnnnnnnnnnnnnnnnnnnnnnnnnnnnnnnnnnnnnnnnnnnnnnnnnnnnnnnnnnnnnnnnnnnnnnnnnnnnnnnnnnnnnnnnnnnnnnnnnnnnnnnnnnnnnnnnnnnnnnnnnnnnnnnnnnnnnnnnnnnnnnnnnnnnnnnnnnnnnnnnnnnnnnnnnnnnnnnnnnnnnnnnnnnnnnnnnnnnnnnnnnnnnnnnnnnnnnnnnnnnnnnnnnnnnnnnnnnnnnnnnnnnnnnnnnnnnnnnnnnnnnnnnnnnnnnnnnnnnnnnnnnnnnnnnnnnnnnnnnnnnnnnnnnnnnnnnnnnnnnnnnnnnnnnnnnnnnnnnnnnnnnnnnnnnnnnnnnnnnnnnnnnnnnnnnnnnnnnnnnnnnnnnnnnnnnnnnnnnnnnnnnnnnnnnnnnnnnnnnnnnnnnnnnnnnnnnnnnnnnnnnnnnnnnnnnnnnnnnnnnnnnnnnnnnnnnnnnnnnnnnnnnnnnnnnnnnnnnnnnnnnnnnnnnnnnnnnnnnnnnnnnnnnnnnnnnnnnnnnnnnnnnnnnnnnnnnnnnnnnnnnnnnnnnnnnnnnnnnnnnnnnnnnnnnnnnnnnnnnnnnnnnnnnnnnnnnnnnnnnnnnnnnnnnnnnnnnnnnnnnnnnnnnnnnnnnnnnnnnnnnnnnnnnnnnnnnnnnnnnnnnnnnnnnnnnnnnnnnnnnnnnnnnnnnnnnnnnnnnnnnnnnnnnnnnnnnnnnnnnnnnnnnnnnnnnnnnnnnnnnnnnnnnnnnnnnnnnnnnnnnnnnnnnnnnnnnnnnnnnnnnnnnnnnnnnnnnnnnnnnnnnnnnnnnnnnnnnnnnnnnnnnnnnnnnnnnnnnnnnnnnnnnnnnnnnnnnnnnnnnnnnnnnnnnnnnnnnnnnnnnnnnnnnnnnnnnnnnnnnnnnnnnnnnnnnnnnnnnnnnnnnnnnnnnnnnnnnnnnnnnnnnnnnnnnnnnnnnnnnnnnnnnnnnnnnnnnnnnnnnnnnnnnnnnnnnnnnnnnnnnnnnnnnnnnnnnnnnnnnnnnnnnnnnnnnnnnnnnnnnnnnnnnnnnnnnnnnnnnnnnnnnnnnnnnnnnnnnnnnnnnnnnnnnnnnnnnnnnnnnnnnnnnnnnnnnnnnnnnnnnnnnnnnnnnnnnnnnnnnnnnnnnnnnnnnnnnnnnnnnnnnnnnnnnnnnnnnnnnnnnnnnnnnnnnnnnnnnnnnnnnnnnnnnnnnnnnnnnnnnnnnnnnnnnnnnnnnnnnnnnnnnnnnnnnnnnnnnnnnnnnnnnnnnnnnnnnnnnnnnnnnnnnnnnnnnnnnnnnnnnnnnnnnnnnnnnnnnnnnnnnnnnnnnnnnnnnnnnnnnnnnnnnnnnnnnnnnnnnnnnnnnnnnnnnnnnnnnnnnnnnnnnnnnnnnnnnnnnnnnnnnnnnnnnnnnnnnnnnnnnnnnnnnnnnnnnnnnnnnnnnnnnnnnnnnnnnnnnnnnnnnnnnnnnnnnnnnnnnnnnnnnnnnnnnnnnnnnnnnnnnnnnnnnnnnnnnnnnnnnnnnnnnnnnnnnnnnnnnnnnnnnnnnnnnnnnnnnnnnnnnnnnnnnnnnnnnnnnnnnnnnnnnnnnnnnnnnnnnnnnnnnnnnnnnnnnnnnnnnnnnnnnnnnnnnnnnnnnnnnnnnnnnnnnnnnnnnnnnnnnnnnnnnnnnnnnnnnnnnnnnnnnnnnnnnnnnnnnnnnnnnnnnnnnnnnnnnnnnnnnnnnnnnnnnnnnnnnnnnnnnnnnnnnnnnnnnnnnnnnnnnnnnnnnnnnnnnnnnnnnnnnnnnnnnnnnnnnnnnnnnnnnnnnnnnnnnnnnnnnnnnnnnnnnnnnnnnnnnnnnnnnnnnnnnnnnnnnnnnnnnnnnnnnnnnnnnnnnnnnnnnnnnnnnnnnnnnnnnnnnnnnnnnnnnnnnnnnnnnnnnnnnnnnnnnnnnnnnnnnnnnnnnnnnnnnnnnnnnnnnnnnnnnnnnnnnnnnnnnnnnnnnnnnnnnnnnnnnnnnnnnnnnnnnnnnnnnnnnnnnnnnnnnnnnnnnnnnnnnnnnnnnnnnnnnnnnnnnnnnnnnnnnnnnnnnnnnnnnnnnnnnnnnnnnnnnnnnnnnnnnnnnnnnnnnnnnnnnnnnnnnnnnnnnnnnnnnnnnnnnnnnnnnnnnnnnnnnnnnnnnnnnnnnnnnnnnnnnnnnnnnnnnnnnnnnnnnnnnnnnnnnnnnnnnnnnnnnnnnnnnnnnnnnnnnnnnnnnnnnnnnnnnnnnnnnnnnnnnnnnnnnnnnnnnnnnnnnnnnnnnnnnnnnnnnnnnnnnnnnnnnnnnnnnnnnnnnnnnnnnnnnnnnnnnnnnnnnnnnnnnnnnnnnnnnnnnnnnnnnnnnnnnnnnnnnnnnnnnnnnnnnnnnnnnnnnnnnnnnnnnnnnnnnnnnnnnnnnnnnnnnnnnnnnnnnnnnnnnnnnnnnnnnnnnnnnnnnnnnnnnnnnnnnnnnnnnnnnnnnnnnnnnnnnnnnnnnnnnnnnnnnnnnnnnnnnnnnnnnnnnnnnnnnnnnnnnnnnnnnnnnnnnnnnnnnnnnnnnnnnnnnnnnnnnnnnnnnnnnnnnnnnnnnnnnnnnnnnnnnnnnnnnnnnnnnnnnnnnnnnnnnnnnnnnnnnnnnnnnnnnnnnnnnnnnnnnnnnnnnnnnnnnnnnnnnnnnnnnnnnnnnnnnnnnnnnnnnnnnnnnnnnnnnnnnnnnnnnnnnnnnnnnnnnnnnnnnnnnnnnnnnnnnnnnnnnnnnnnnnnnnnnnnnnnnnnnnnnnnnnnnnnnnnnnnnnnnnnnnnnnnnnnnnnnnnnnnnnnnnnnnnnnnnnnnnnnnnnnnnnnnnnnnnnnnnnnnnnnnnnnnnnnnnnnnnnnnnnnnnnnnnnnnnnnnnnnnnnnnnnnnnnnnnnnnnnnnnnnnnnnnnnnnnnnnnnnnnnnnnnnnnnnnnnnnnnnnnnnnnnnnnnnnnnnnnnnnnnnnnnnnnnnnnnnnnnnnnnnnnnnnnnnnnnnnnnnnnnnnnnnnnnnnnnnnnnnnnnnnnnnnnnnnnnnnnnnnnnnnnnnnnnnnnnnnnnnnnnnnnnnnnnnnnnnnnnnnnnnnnnnnnnnnnnnnnnnnnnnnnnnnnnnnnnnnnnnnnnnnnnnnnnnnnnnnnnnnnnnnnnnnnnnnnnnnnnnnnnnnnnnnnnnnnnnnnnnnnnnnnnnnnnnnnnnnnnnnnnnnnnnnnnnnnnnnnnnnnnnnnnnnnnnnnnnnnnnnnnnnnnnnnnnnnnnnnnnnnnnnnnnnnnnnnnnnnnnnnnnnnnnnnnnnnnnnnnnnnnnnnnnnnnnnnnnnnnnnnnnnnnnnnnnnnnnnnnnnnnnnnnnnnnnnnnnnnnnnnnnnnnnnnnnnnnnnnnnnnnnnnnnnnnnnnnnnnnnnnnnnnnnnnnnnnnnnnnnnnnnnnnnnnnnnnnnnnnnnnnnnnnnnnnnnnnnnnnnnnnnnnnnnnnnnnnnnnnnnnnnnnnnnnnnnnnnnnnnnnnnnnnnnnnnnnnnnnnnnnnnnnnnnnnnnnnnnnnnnnnnnnnnnnnnnnnnnnnnnnnnnnnnnnnnnnnnnnnnnnnnnnnnnnnnnnnnnnnnnnnnnnnnnnnnnnnnnnnnnnnnnnnnnnnnnnnnnnnnnnnnnnnnnnnnnnnnnnnnnnnnnnnnnnnnnnnnnnnnnnnnnnnnnnnnnnnnnnnnnnnnnnnnnnnnnnnnnnnnnnnnnnnnnnnnnnnnnnnnnnnnnnnnnnnnnnnnnnnnnnnnnnnnnnnnnnnnnnnnnnnnnnnnnnnnnnnnnnnnnnnnnnnnnnnnnnnnnnnnnnnnnnnnnnnnnnnnnnnnnnnnnnnnnnnnnnnnnnnnnnnnnnnnnnnnnnnnnnnnnnnnnnnnnnnnnnnnnnnnnnnnnnnnnnnnnnnnnnnnnnnnnnnnnnnnnnnnnnnnnnnnnnnnnnnnnnnnnnnnnnnnnnnnnnnnnnnnnnnnnnnnnnnnnnnnnnnnnnnnnnnnnnnnnnnnnnnnnnnnnnnnnnnnnnnnnnnnnnnnnnnnnnnnnnnnnnnnnnnnnnnnnnnnnnnnnnnnnnnnnnnnnnnnnnnnnnnnnnnnnnnnnnnnnnnnnnnnnnnnnnnnnnnnnnnnnnnnnnnnnnnnnnnnnnnnnnnnnnnnnnnnnnnnnnnnnnnnnnnnnnnnnnnnnnnnnnnnnnnnnnnnnnnnnnnnnnnnnnnnnnnnnnnnnnnnnnnnnnnnnnnnnnnnnnnnnnnnnnnnnnnnnnnnnnnnnnnnnnnnnnnnnnnnnnnnnnnnnnnnnnnnnnnnnnnnnnnnnnnnnnnnnnnnnnnnnnnnnnnnnnnnnnnnnnnnnnnnnnnnnnnnnnnnnnnnnnnnnnnnnnnnnnnnnnnnnnnnnnnnnnnnnnnnnnnnnnnnnnnnnnnnnnnnnnnnnnnnnnnnnnnnnnnnnnnnnnnnnnnnnnnnnnnnnnnnnnnnnnnnnnnnnnnnnnnnnnnnnnnnnnnnnnnnnnnnnnnnnnnnnnnnnnnnnnnnnnnnnnnnnnnnnnnnnnnnnnnnnnnnnnnnnnnnnnnnnnnnnnnnnnnnnnnnnnnnnnnnnnnnnnnnnnnnnnnnnnnnnnnnnnnnnnnnnnnnnnnnnnnnnnnnnnnnnnnnnnnnnnnnnnnnnnnnnnnnnnnnnnnnnnnnnnnnnnnnnnnnnnnnnnnnnnnnnnnnnnnnnnnnnnnnnnnnnnnnnnnnnnnnnnnnnnnnnnnnnnnnnnnnnnnnnnnnnnnnnnnnnnnnnnnnnnnnnnnnnnnnnnnnnnnnnnnnnnnnnnnnnnnnnnnnnnnnnnnnnnnnnnnnnnnnnnnnnnnnnnnnnnnnnnnnnnnnnnnnnnnnnnnnnnnnnnnnnnnnnnnnnnnnnnnnnnnnnnnnnnnnnnnnnnnnnnnnnnnnnnnnnnnnnnnnnnnnnnnnnnnnnnnnnnnnnnnnnnnnnnnnnnnnnnnnnnnnnnnnnnnnnnnnnnnnnnnnnnnnnnnnnnnnnnnnnnnnnnnnnnnnnnnnnnnnnnnnnnnnnnnnnnnnnnnnnnnnnnnnnnnnnnnnnnnnnnnnnnnnnnnnnnnnnnnnnnnnnnnnnnnnnnnnnnnnnnnnnnnnnnnnnnnnnnnnnnnnnnnnnnnnnnnnnnnnnnnnnnnnnnnnnnnnnnnnnnnnnnnnnnnnnnnnnnnnnnnnnnnnnnnnnnnnnnnnnnnnnnnnnnnnnnnnnnnnnnnnnnnnnnnnnnnnnnnnnnnnnnnnnnnnnnnnnnnnnnnnnnnnnnnnnnnnnnnnnnnnnnnnnnnnnnnnnnnnnnnnnnnnnnnnnnnnnnnnnnnnnnnnnnnnnnnnnnnnnnnnnnnnnnnnnnnnnnnnnnnnnnnnnnnnnnnnnnnnnnnnnnnnnnnnnnnnnnnnnnnnnnnnnnnnnnnnnnnnnnnnnnnnnnnnnnnnnnnnnnnnnnnnnnnnnnnnnnnnnnnnnnnnnnnnnnnnnnnnnnnnnnnnnnnnnnnnnnnnnnnnnnnnnnnnnnnnnnnnnnnnnnnnnnnnnnnnnnnnnnnnnnnnnnnnnnnnnnnnnnnnnnnnnnnnnnnnnnnnnnnnnnnnnnnnnnnnnnnnnnnnnnnnnnnnnnnnnnnnnnnnnnnnnnnnnnnnnnnnnnnnnnnnnnnnnnnnnnnnnnnnnnnnnnnnnnnnnnnnnnnnnnnnnnnnnnnnnnnnnnnnnnnnnnnnnnnnnnnnnnnnnnnnnnnnnnnnnnnnnnnnnnnnnnnnnnnnnnnnnnnnnnnnnnnnnnnnnnnnnnnnnnnnnnnnnnnnnnnnnnnnnnnnnnnnnnnnnnnnnnnnnnnnnnnnnnnnnnnnnnnnnnnnnnnnnnnnnnnnnnnnnnnnnnnnnnnnnnnnnnnnnnnnnnnnnnnnnnnnnnnnnnnnnnnnnnnnnnnnnnnnnnnnnnnnnnnnnnnnnnnnnnnnnnnnnnnnnnnnnnnnnnnnnnnnnnnnnnnnnnnnnnnnnnnnnnnnnnnnnnnnnnnnnnnnnnnnnnnnnnnnnnnnnnnnnnnnnnnnnnnnnnnnnnnnnnnnnnnnnnnnnnnnnnnnnnnnnnnnnnnnnnnnnnnnnnnnnnnnnnnnnnnnnnnnnnnnnnnnnnnnnnnnnnnnnnnnnnnnnnnnnnnnnnnnnnnnnnnnnnnnnnnnnnnnnnnnnnnnnnnnnnnnnnnnnnnnnnnnnnnnnnnnnnnnnnnnnnnnnnnnnnnnnnnnnnnnnnnnnnnnnnnnnnnnnnnnnnnnnnnnnnnnnnnnnnnnnnnnnnnnnnnnnnnnnnnnnnnnnnnnnnnnnnnnnnnnnnnnnnnnnnnnnnnnnnnnnnnnnnnnnnnnnnnnnnnnnnnnnnnnnnnnnnnnnnnnnnnnnnnnnnnnnnnnnnnnnnnnnnnnnnnnnnnnnnnnnnnnnnnnnnnnnnnnnnnnnnnnnnnnnnnnnnnnnnnnnnnnnnnnnnnnnnnnnnnnnnnnnnnnnnnnnnnnnnnnnnnnnnnnnnnnnnnnnnnnnnnnnnnnnnnnnnnnnnnnnnnnnnnnnnnnnnnnnnnnnnnnnnnnnnnnnnnnnnnnnnnnnnnnnnnnnnnnnnnnnnnnnnnnnnnnnnnnnnnnnnnnnnnnnnnnnnnnnnnnnnnnnnnnnnnnnnnnnnnnnnnnnnnnnnnnnnnnnnnnnnnnnnnnnnnnnnnnnnnnnnnnnnnnnnnnnnnnnnnnnnnnnnnnnnnnnnnnnnnnnnnnnnnnnnnnnnnnnnnnnnnnnnnnnnnnnnnnnnnnnnnnnnnnnnnnnnnnnnnnnnnnnnnnnnnnnnnnnnnnnnnnnnnnnnnnnnnnnnnnnnnnnnnnnnnnnnnnnnnnnnnnnnnnnnnnnnnnnnnnnnnnnnnnnnnnnnnnnnnnnnnnnnnnnnnnnnnnnnnnnnnnnnnnnnnnnnnnnnnnnnnnnnnnnnnnnnnnnnnnnnnnnnnnnnnnnnnnnnnnnnnnnnnnnnnnnnnnnnnnnnnnnnnnnnnnnnnnnnnnnnnnnnnnnnnnnnnnnnnnnnnnnnnnnnnnnnnnnnnnnnnnnnnnnnnnnnnnnnnnnnnnnnnnnnnnnnnnnnnnnnnnnnnnnnnnnnnnnnnnnnnnnnnnnnnnnnnnnnnnnnnnnnnnnnnnnnnnnnnnnnnnnnnnnnnnnnnnnnnnnnnnnnnnnnnnnnnnnnnnnnnnnnnnnnnnnnnnnnnnnnnnnnnnnnnnnnnnnnnnnnnnnnnnnnnnnnnnnnnnnnnnnnnnnnnnnnnnnnnnnnnnnnnnnnnnnnnnnnnnnnnnnnnnnnnnnnnnnnnnnnnnnnnnnnnnnnnnnnnnnnnnnnnnnnnnnnnnnnnnnnnnnnnnnnnnnnnnnnnnnnnnnnnnnnnnnnnnnnnnnnnnnnnnnnnnnnnnnnnnnnnnnnnnnnnnnnnnnnnnnnnnnnnnnnnnnnnnnnnnnnnnnnnnnnnnnnnnnnnnnnnnnnnnnnnnnnnnnnnnnnnnnnnnnnnnnnnnnnnnnnnnnnnnnnnnnnnnnnnnnnnnnnnnnnnnnnnnnnnnnnnnnnnnnnnnnnnnnnnnnnnnnnnnnnnnnnnnnnnnnnnnnnnnnnnnnnnnnnnnnnnnnnnnnnnnnnnnnnnnnnnnnnnnnnnnnnnnnnnnnnnnnnnnnnnnnnnnnnnnnnnnnnnnnnnnnnnnnnnnnnnnnnnnnnnnnnnnnnnnnnnnnnnnnnnnnnnnnnnnnnnnnnnnnnnnnnnnnnnnnnnnnnnnnnnnnnnnnnnnnnnnnnnnnnnnnnnnnnnnnnnnnnnnnnnnnnnnnnnnnnnnnnnnnnnnnnnnnnnnnnnnnnnnnnnnnnnnnnnnnnnnnnnnnnnnnnnnnnnnnnnnnnnnnnnnnnnnnnnnnnnnnnnnnnnnnnnnnnnnnnnnnnnnnnnnnnnnnnnnnnnnnnnnnnnnnnnnnnnnnnnnnnnnnnnnnnnnnnnnnnnnnnnnnnnnnnnnnnnnnnnnnnnnnnnnnnnnnnnnnnnnnnnnnnnnnnnnnnnnnnnnnnnnnnnnnnnnnnnnnnnnnnnnnnnnnnnnnnnnnnnnnnnnnnnnnnnnnnnnnnnnnnnnnnnnnnnnnnnnnnnnnnnnnnnnnnnnnnnnnnnnnnnnnnnnnnnnnnnnnnnnnnnnnnnnnnnnnnnnnnnnnnnnnnnnnnnnnnnnnnnnnnnnnnnnnnnnnnnnnnnnnnnnnnnnnnnnnnnnnnnnnnnnnnnnnnnnnnnnnnnnnnnnnnnnnnnnnnnnnnnnnnnnnnnnnnnnnnnnnnnnnnnnnnnnnnnnnnnnnnnnnnnnnnnnnnnnnnnnnnnnnnnnnnnnnnnnnnnnnnnnnnnnnnnnnnnnnnnnnnnnnnnnnnnnnnnnnnnnnnnnnnnnnnnnnnnnnnnnnnnnnnnnnnnnnnnnnnnnnnnnnnnnnnnnnnnnnnnnnnnnnnnnnnnnnnnnnnnnnnnnnnnnnnnnnnnnnnnnnnnnnnnnnnnnnnnnnnnnnnnnnnnnnnnnnnnnnnnnnnnnnnnnnnnnnnnnnnnnnnnnnnnnnnnnnnnnnnnnnnnnnnnnnnnnnnnnnnnnnnnnnnnnnnnnnnnnnnnnnnnnnnnnnnnnnnnnnnnnnnnnnnnnnnnnnnnnnnnnnnnnnnnnnnnnnnnnnnnnnnnnnnnnnnnnnnnnnnnnnnnnnnnnnnnnnnnnnnnnnnnnnnnnnnnnnnnnnnnnnnnnnnnnnnnnnnnnnnnnnnnnnnnnnnnnnnnnnnnnnnnnnnnnnnnnnnnnnnnnnnnnnnnnnnnnnnnnnnnnnnnnnnnnnnnnnnnnnnnnnnnnnnnnnnnnnnnnnnnnnnnnnnnnnnnnnnnnnnnnnnnnnnnnnnnnnnnnnnnnnnnnnnnnnnnnnnnnnnnnnnnnnnnnnnnnnnnnnnnnnnnnnnnnnnnnnnnnnnnnnnnnnnnnnnnnnnnnnnnnnnnnnnnnnnnnnnnnnnnnnnnnnnnnnnnnnnnnnnnnnnnnnnnnnnnnnnnnnnnnnnnnnnnnnnnnnnnnnnnnnnnnnnnnnnnnnnnnnnnnnnnnnnnnnnnnnnnnnnnnnnnnnnnnnnnnnnnnnnnnnnnnnnnnnnnnnnnnnnnnnnnnnnnnnnnnnnnnnnnnnnnnnnnnnnnnnnnnnnnnnnnnnnnnnnnnnnnnnnnnnnnnnnnnnnnnnnnnnnnnnnnnnnnnnnnnnnnnnnnnnnnnnnnnnnnnnnnnnnnnnnnnnnnnnnnnnnnnnnnnnnnnnnnnnnnnnnnnnnnnnnnnnnnnnnnnnnnnnnnnnnnnnnnnnnnnnnnnnnnnnnnnnnnnnnnnnnnnnnnnnnnnnnnnnnnnnnnnnnnnnnnnnnnnnnnnnnnnnnnnnnnnnnnnnnnnnnnnnnnnnnnnnnnnnnnnnnnnnnnnnnnnnnnnnnnnnnnnnnnnnnnnnnnnnnnnnnnnnnnnnnnnnnnnnnnnnnnnnnnnnnnnnnnnnnnnnnnnnnnnnnnnnnnnnnnnnnnnnnnnnnnnnnnnnnnnnnnnnnnnnnnnnnnnnnnnnnnnnnnnnnnnnnnnnnnnnnnnnnnnnnnnnnnnnnnnnnnnnnnnnnnnnnnnnnnnnnnnnnnnnnnnnnnnnnnnnnnnnnnnnnnnnnnnnnnnnnnnnnnnnnnnnnnnnnnnnnnnnnnnnnnnnnnnnnnnnnnnnnnnnnnnnnnnnnnnnnnnnnnnnnnnnnnnnnnnnnnnnnnnnnnnnnnnnnnnnnnnnnnnnnnnnnnnnnnnnnnnnnnnnnnnnnnnnnnnnnnnnnnnnnnnnnnnnnnnnnnnnnnnnnnnnnnnnnnnnnnnnnnnnnnnnnnnnnnnnnnnnnnnnnnnnnnnnnnnnnnnnnnnnnnnnnnnnnnnnnnnnnnnnnnnnnnnnnnnnnnnnnnnnnnnnnnnnnnnnnnnnnnnnnnnnnnnnnnnnnnnnnnnnnnnnnnnnnnnnnnnnnnnnnnnnnnnnnnnnnnnnnnnnnnnnnnnnnnnnnnnnnnnnnnnnnnnnnnnnnnnnnnnnnnnnnnnnnnnnnnnnnnnnnnnnnnnnnnnnnnnnnnnnnnnnnnnnnnnnnnnnnnnnnnnnnnnnnnnnnnnnnnnnnnnnnnnnnnnnnnnnnnnnnnnnnnnnnnnnnnnnnnnnnnnnnnnnnnnnnnnnnnnnnnnnnnnnnnnnnnnnnnnnnnnnnnnnnnnnnnnnnnnnnnnnnnnnnnnnnnnnnnnnnnnnnnnnnnnnnnnnnnnnnnnnnnnnnnnnnnnnnnnnnnnnnnnnnnnnnnnnnnnnnnnnnnnnnnnnnnnnnnnnnnnnnnnnnnnnnnnnnnnnnnnnnnnnnnnnnnnnnnnnnnnnnnnnnnnnnnnnnnnnnnnnnnnnnnnnnnnnnnnnnnnnnnnnnnnnnnnnnnnnnnnnnnnnnnnnnnnnnnnnnnnnnnnnnnnnnnnnnnnnnnnnnnnnnnnnnnnnnnnnnnnnnnnnnnnnnnnnnnnnnnnnnnnnnnnnnnnnnnnnnnnnnnnnnnnnnnnnnnnnnnnnnnnnnnnnnnnnnnnnnnnnnnnnnnnnnnnnnnnnnnnnnnnnnnnnnnnnnnnnnnnnnnnnnnnnnnnnnnnnnnnnnnnnnnnnnnnnnnnnnnnnnnnnnnnnnnnnnnnnnnnnnnnnnnnnnnnnnnnnnnnnnnnnnnnnnnnnnnnnnnnnnnnnnnnnnnnnnnnnnnnnnnnnnnnnnnnnnnnnnnnnnnnnnnnnnnnnnnnnnnnnnnnnnnnnnnnnnnnnnnnnnnnnnnnnnnnnnnnnnnnnnnnnnnnnnnnnnnnnnnnnnnnnnnnnnnnnnnnnnnnnnnnnnnnnnnnnnnnnnnnnnnnnnnnnnnnnnnnnnnnnnnnnnnnnnnnnnnnnnnnnnnnnnnnnnnnnnnnnnnnnnnnnnnnnnnnnnnnnnnnnnnnnnnnnnnnnnnnnnnnnnnnnnnnnnnnnnnnnnnnnnnnnnnnnnnnnnnnnnnnnnnnnnnnnnnnnnnnnnnnnnnnnnnnnnnnnnnnnnnnnnnnnnnnnnnnnnnnnnnnnnnnnnnnnnnnnnnnnnnnnnnnnnnnnnnnnnnnnnnnnnnnnnnnnnnnnnnnnnnnnnnnnnnnnnnnnnnnnnnnnnnnnnnnnnnnnnnnnnnnnnnnnnnnnnnnnnnnnnnnnnnnnnnnnnnnnnnnnnnnnnnnnnnnnnnnnnnnnnnnnnnnnnnnnnnnnnnnnnnnnnnnnnnnnnnnnnnnnnnnnnnnnnnnnnnnnnnnnnnnnnnnnnnnnnnnnnnnnnnnnnnnnnnnnnnnnnnnnnnnnnnnnnnnnnnnnnnnnnnnnnnnnnnnnnnnnnnnnnnnnnnnnnnnnnnnnnnnnnnnnnnnnnnnnnnnnnnnnnnnnnnnnnnnnnnnnnnnnnnnnnnnnnnnnnnnnnnnnnnnnnnnnnnnnnnnnnnnnnnnnnnnnnnnnnnnnnnnnnnnnnnnnnnnnnnnnnnnnnnnnnnnnnnnnnnnnnnnnnnnnnnnnnnnnnnnnnnnnnnnnnnnnnnnnnnnnnnnnnnnnnnnnnnnnnnnnnnnnnnnnnnnnnnnnnnnnnnnnnnnnnnnnnnnnnnnnnnnnnnnnnnnnnnnnnnnnnnnnnnnnnnnnnnnnnnnnnnnnnnnnnnnnnnnnnnnnnnnnnnnnnnnnnnnnnnnnnnnnnnnnnnnnnnnnnnnnnnnnnnnnnnnnnnnnnnnnnnnnnnnnnnnnnnnnnnnnnnnnnnnnnnnnnnnnnnnnnnnnnnnnnnnnnnnnnnnnnnnnnnnnnnnnnnnnnnnnnnnnnnnnnnnnnnnnnnnnnnnnnnnnnnnnnnnnnnnnnnnnnnnnnnnnnnnnnnnnnnnnnnnnnnnnnnnnnnnnnnnnnnnnnnnnnnnnnnnnnnnnnnnnnnnnnnnnnnnnnnnnnnnnnnnnnnnnnnnnnnnnnnnnnnnnnnnnnnnnnnnnnnnnnnnnnnnnnnnnnnnnnnnnnnnnnnnnnnnnnnnnnnnnnnnnnnnnnnnnnnnnnnnnnnnnnnnnnnnnnnnnnnnnnnnnnnnnnnnnnnnnnnnnnnnnnnnnnnnnnnnnnnnnnnnnnnnnnnnnnnnnnnnnnnnnnnnnnnnnnnnnnnnnnnnnnnnnnnnnnnnnnnnnnnnnnnnnnnnnnnnnnnnnnnnnnnnnnnnnnnnnnnnnnnnnnnnnnnnnnnnnnnnnnnnnnnnnnnnnnnnnnnnnnnnnnnnnnnnnnnnnnnnnnnnnnnnnnnnnnnnnnnnnnnnnnnnnnnnnnnnnnnnnnnnnnnnnnnnnnnnnnnnnnnnnnnnnnnnnnnnnnnnnnnnnnnnnnnnnnnnnnnnnnnnnnnnnnnnnnnnnnnnnnnnnnnnnnnnnnnnnnnnnnnnnnnnnnnnnnnnnnnnnnnnnnnnnnnnnnnnnnnnnnnnnnnnnnnnnnnnnnnnnnnnnnnnnnnnnnnnnnnnnnnnnnnnnnnnnnnnnnnnnnnnnnnnnnnnnnnnnnnnnnnnnnnnnnnnnnnnnnnnnnnnnnnnnnnnnnnnnnnnnnnnnnnnnnnnnnnnnnnnnnnnnnnnnnnnnnnnnnnnnnnnnnnnnnnnnnnnnnnnnnnnnnnnnnnnnnnnnnnnnnnnnnnnnnnnnnnnnnnnnnnnnnnnnnnnnnnnnnnnnnnnnnnnnnnnnnnnnnnnnnnnnnnnnnnnnnnnnnnnnnnnnnnnnnnnnnnnnnnnnnnnnnnnnnnnnnnnnnnnnnnnnnnnnnnnnnnnnnnnnnnnnnnnnnnnnnnnnnnnnnnnnnnnnnnnnnnnnnnnnnnnnnnnnnnnnnnnnnnnnnnnnnnnnnnnnnnnnnnnnnnnnnnnnnnnnnnnnnnnnnnnnnnnnnnnnnnnnnnnnnnnnnnnnnnnnnnnnnnnnnnnnnnnnnnnnnnnnnnnnnnnnnnnnnnnnnnnnnnnnnnnnnnnnnnnnnnnnnnnnnnnnnnnnnnnnnnnnnnnnnnnnnnnnnnnnnnnnnnnnnnnnnnnnnnnnnnnnnnnnnnnnnnnnnnnnnnnnnnnnnnnnnnnnnnnnnnnnnnnnnnnnnnnnnnnnnnnnnnnnnnnnnnnnnnnnnnnnnnnnnnnnnnnnnnnnnnnnnnnnnnnnnnnnnnnnnnnnnnnnnnnnnnnnnnnnnnnnnnnnnnnnnnnnnnnnnnnnnnnnnnnnnnnnnnnnnnnnnnnnnnnnnnnnnnnnnnnnnnnnnnnnnnnnnnnnnnnnnnnnnnnnnnnnnnnnnnnnnnnnnnnnnnnnnnnnnnnnnnnnnnnnnnnnnnnnnnnnnnnnnnnnnnnnnnnnnnnnnnnnnnnnnnnnnnnnnnnnnnnnnnnnnnnnnnnnnnnnnnnnnnnnnnnnnnnnnnnnnnnnnnnnnnnnnnnnnnnnnnnnnnnnnnnnnnnnnnnnnnnnnnnnnnnnnnnnnnnnnnnnnnnnnnnnnnnnnnnnnnnnnnnnnnnnnnnnnnnnnnnnnnnnnnnnnnnnnnnnnnnnnnnnnnnnnnnnnnnnnnnnnnnnnnnnnnnnnnnnnnnnnnnnnnnnnnnnnnnnnnnnnnnnnnnnnnnnnnnnnnnnnnnnnnnnnnnnnnnnnnnnnnnnnnnnnnnnnnnnnnnnnnnnnnnnnnnnnnnnnnnnnnnnnnnnnnnnnnnnnnnnnnnnnnnnnnnnnnnnnnnnnnnnnnnnnnnnnnnnnnnnnnnnnnnnnnnnnnnnnnnnnnnnnnnnnnnnnnnnnnnnnnnnnnnnnnnnnnnnnnnnnnnnnnnnnnnnnnnnnnnnnnnnnnnnnnnnnnnnnnnnnnnnnnnnnnnnnnnnnnnnnnnnnnnnnnnnnnnnnnnnnnnnnnnnnnnnnnnnnnnnnnnnnnnnnnnnnnnnnnnnnnnnnnnnnnnnnnnnnnnnnnnnnnnnnnnnnnnnnnnnnnnnnnnnnnnnnnnnnnnnnnnnnnnnnnnnnnnnnnnnnnnnnnnnnnnnnnnnnnnnnnnnnnnnnnnnnnnnnnnnnnnnnnnnnnnnnnnnnnnnnnnnnnnnnnnnnnnnnnnnnnnnnnnnnnnnnnnnnnnnnnnnnnnnnnnnnnnnnnnnnnnnnnnnnnnnnnnnnnnnnnnnnnnnnnnnnnnnnnnnnnnnnnnnnnnnnnnnnnnnnnnnnnnnnnnnnnnnnnnnnnnnnnnnnnnnnnnnnnnnnnnnnnnnnnnnnnnnnnnnnnnnnnnnnnnnnnnnnnnnnnnnnnnnnnnnnnnnnnnnnnnnnnnnnnnnnnnnnnnnnnnnnnnnnnnnnnnnnnnnnnnnnnnnnnnnnnnnnnnnnnnnnnnnnnnnnnnnnnnnnnnnnnnnnnnnnnnnnnnnnnnnnnnnnnnnnnnnnnnnnnnnnnnnnnnnnnnnnnnnnnnnnnnnnnnnnnnnnnnnnnnnnnnnnnnnnnnnnnnnnnnnnnnnnnnnnnnnnnnnnnnnnnnnnnnnnnnnnnnnnnnnnnnnnnnnnnnnnnnnnnnnnnnnnnnnnnnnnnnnnnnnnnnnnnnnnnnnnnnnnnnnnnnnnnnnnnnnnnnnnnnnnnnnnnnnnnnnnnnnnnnnnnnnnnnnnnnnnnnnnnnnnnnnnnnnnnnnnnnnnnnnnnnnnnnnnnnnnnnnnnnnnnnnnnnnnnnnnnnnnnnnnnnnnnnnnnnnnnnnnnnnnnnnnnnnnnnnnnnnnnnnnnnnnnnnnnnnnnnnnnnnnnnnnnnnnnnnnnnnnnnnnnnnnnnnnnnnnnnnnnnnnnnnnnnnnnnnnnnnnnnnnnnnnnnnnnnnnnnnnnnnnnnnnnnnnnnnnnnnnnnnnnnnnnnnnnnnnnnnnnnnnnnnnnnnnnnnnnnnnnnnnnnnnnnnnnnnnnnnnnnnnnnnnnnnnnnnnnnnnnnnnnnnnnnnnnnnnnnnnnnnnnnnnnnnnnnnnnnnnnnnnnnnnnnnnnnnnnnnnnnnnnnnnnnnnnnnnnnnnnnnnnnnnnnnnnnnnnnnnnnnnnnnnnnnnnnnnnnnnnnnnnnnnnnnnnnnnnnnnnnnnnnnnnnnnnnnnnnnnnnnnnnnnnnnnnnnnnnnnnnnnnnnnnnnnnnnnnnnnnnnnnnnnnnnnnnnnnnnnnnnnnnnnnnnnnnnnnnnnnnnnnnnnnnnnnnnnnnnnnnnnnnnnnnnnnnnnnnnnnnnnnnnnnnnnnnnnnnnnnnnnnnnnnnnnnnnnnnnnnnnnnnnnnnnnnnnnnnnnnnnnnnnnnnnnnnnnnnnnnnnnnnnnnnnnnnnnnnnnnnnnnnnnnnnnnnnnnnnnnnnnnnnnnnnnnnnnnnnnnnnnnnnnnnnnnnnnnnnnnnnnnnnnnnnnnnnnnnnnnnnnnnnnnnnnnnnnnnnnnnnnnnnnnnnnnnnnnnnnnnnnnnnnnnnnnnnnnnnnnnnnnnnnnnnnnnnnnnnnnnnnnnnnnnnnnnnnnnnnnnnnnnnnnnnnnnnnnnnnnnnnnnnnnnnnnnnnnnnnnnnnnnnnnnnnnnnnnnnnnnnnnnnnnnnnnnnnnnnnnnnnnnnnnnnnnnnnnnnnnnnnnnnnnnnnnnnnnnnnnnnnnnnnnnnnnnnnnnnnnnnnnnnnnnnnnnnnnnnnnnnnnnnnnnnnnnnnnnnnnnnnnnnnnnnnnnnnnnnnnnnnnnnnnnnnnnnnnnnnnnnnnnnnnnnnnnnnnnnnnnnnnnnnnnnnnnnnnnnnnnnnnnnnnnnnnnnnnnnnnnnnnnnnnnnnnnnnnnnnnnnnnnnnnnnnnnnnnnnnnnnnnnnnnnnnnnnnnnnnnnnnnnnnnnnnnnnnnnnnnnnnnnnnnnnnnnnnnnnnnnnnnnnnnnnnnnnnnnnnnnnnnnnnnnnnnnnnnnnnnnnnnnnnnnnnnnnnnnnnnnnnnnnnnnnnnnnnnnnnnnnnnnnnnnnnnnnnnnnnnnnnnnnnnnnnnnnnnnnnnnnnnnnnnnnnnnnnnnnnnnnnnnnnnnnnnnnnnnnnnnnnnnnnnnnnnnnnnnnnnnnnnnnnnnnnnnnnnnnnnnnnnnnnnnnnnnnnnnnnnnnnnnnnnnnnnnnnnnnnnnnnnnnnnnnnnnnnnnnnnnnnnnnnnnnnnnnnnnnnnnnnnnnnnnnnnnnnnnnnnnnnnnnnnnnnnnnnnnnnnnnnnnnnnnnnnnnnnnnnnnnnnnnnnnnnnnnnnnnnnnnnnnnnnnnnnnnnnnnnnnnnnnnnnnnnnnnnnnnnnnnnnnnnnnnnnnnnnnnnnnnnnnnnnnnnnnnnnnnnnnnnnnnnnnnnnnnnnnnnnnnnnnnnnnnnnnnnnnnnnnnnnnnnnnnnnnnnnnnnnnnnnnnnnnnnnnnnnnnnnnnnnnnnnnnnnnnnnnnnnnnnnnnnnnnnnnnnnnnnnnnnnnnnnnnnnnnnnnnnnnnnnnnnnnnnnnnnnnnnnnnnnnnnnnnnnnnnnnnnnnnnnnnnnnnnnnnnnnnnnnnnnnnnnnnnnnnnnnnnnnnnnnnnnnnnnnnnnnnnnnnnnnnnnnnnnnnnnnnnnnnnnnnnnnnnnnnnnnnnnnnnnnnnnnnnnnnnnnnnnnnnnnnnnnnnnnnnnnnnnnnnnnnnnnnnnnnnnnnnnnnnnnnnnnnnnnnnnnnnnnnnnnnnnnnnnnnnnnnnnnnnnnnnnnnnnnnnnnnnnnnnnnnnnnnnnnnnnnnnnnnnnnnnnnnnnnnnnnnnnnnnnnnnnnnnnnnnnnnnnnnnnnnnnnnnnnnnnnnnnnnnnnnnnnnnnnnnnnnnnnnnnnnnnnnnnnnnnnnnnnnnnnnnnnnnnnnnnnnnnnnnnnnnnnnnnnnnnnnnnnnnnnnnnnnnnnnnnnnnnnnnnnnnnnnnnnnnnnnnnnnnnnnnnnnnnnnnnnnnnnnnnnnnnnnnnnnnnnnnnnnnnnnnnnnnnnnnnnnnnnnnnnnnnnnnnnnnnnnnnnnnnnnnnnnnnnnnnnnnnnnnnnnnnnnnnnnnnnnnnnnnnnnnnnnnnnnnnnnnnnnnnnnnnnnnnnnnnnnnnnnnnnnnnnnnnnnnnnnnnnnnnnnnnnnnnnnnnnnnnnnnnnnnnnnnnnnnnnnnnnnnnnnnnnnnnnnnnnnnnnnnnnnnnnnnnnnnnnnnnnnnnnnnnnnnnnnnnnnnnnnnnnnnnnnnnnnnnnnnnnnnnnnnnnnnnnnnnnnnnnnnnnnnnnnnnnnnnnnnnnnnnnnnnnnnnnnnnnnnnnnnnnnnnnnnnnnnnnnnnnnnnnnnnnnnnnnnnnnnnnnnnnnnnnnnnnnnnnnnnnnnnnnnnnnnnnnnnnnnnnnnnnnnnnnnnnnnnnnnnnnnnnnnnnnnnnnnnnnnnnnnnnnnnnnnnnnnnnnnnnnnnnnnnnnnnnnnnnnnnnnnnnnnnnnnnnnnnnnnnnnnnnnnnnnnnnnnnnnnnnnnnnnnnnnnnnnnnnnnnnnnnnnnnnnnnnnnnnnnnnnnnnnnnnnnnnnnnnnnnnnnnnnnnnnnnnnnnnnnnnnnnnnnnnnnnnnnnnnnnnnnnnnnnnnnnnnnnnnnnnnnnnnnnnnnnnnnnnnnnnnnnnnnnnnnnnnnnnnnnnnnnnnnnnnnnnnnnnnnnnnnnnnnnnnnnnnnnnnnnnnnnnnnnnnnnnnnnnnnnnnnnnnnnnnnnnnnnnnnnnnnnnnnnnnnnnnnnnnnnnnnnnnnnnnnnnnnnnnnnnnnnnnnnnnnnnnnnnnnnnnnnnnnnnnnnnnnnnnnnnnnnnnnnnnnnnnnnnnnnnnnnnnnnnnnnnnnnnnnnnnnnnnnnnnnnnnnnnnnnnnnnnnnnnnnnnnnnnnnnnnnnnnnnnnnnnnnnnnnnnnnnnnnnnnnnnnnnnnnnnnnnnnnnnnnnnnnnnnnnnnnnnnnnnnnnnnnnnnnnnnnnnnnnnnnnnnnnnnnnnnnnnnnnnnnnnnnnnnnnnnnnnnnnnnnnnnnnnnnnnnnnnnnnnnnnnnnnnnnnnnnnnnnnnnnnnnnnnnnnnnnnnnnnnnnnnnnnnnnnnnnnnnnnnnnnnnnnnnnnnnnnnnnnnnnnnnnnnnnnnnnnnnnnnnnnnnnnnnnnnnnnnnnnnnnnnnnnnnnnnnnnnnnnnnnnnnnnnnnnnnnnnnnnnnnnnnnnnnnnnnnnnnnnnnnnnnnnnnnnnnnnnnnnnnnnnnnnnnnnnnnnnnnnnnnnnnnnnnnnnnnnnnnnnnnnnnnnnnnnnnnnnnnnnnnnnnnnnnnnnnnnnnnnnnnnnnnnnnnnnnnnnnnnnnnnnnnnnnnnnnnnnnnnnnnnnnnnnnnnnnnnnnnnnnnnnnnnnnnnnnnnnnnnnnnnnnnnnnnnnnnnnnnnnnnnnnnnnnnnnnnnnnnnnnnnnnnnnnnnnnnnnnnnnnnnnnnnnnnnnnnnnnnnnnnnnnnnnnnnnnnnnnnnnnnnnnnnnnnnnnnnnnnnnnnnnnnnnnnnnnnnnnnnnnnnnnnnnnnnnnnnnnnnnnnnnnnnnnnnnnnnnnnnnnnnnnnnnnnnnnnnnnnnnnnnnnnnnnnnnnnnnnnnnnnnnnnnnnnnnnnnnnnnnnnnnnnnnnnnnnnnnnnnnnnnnnnnnnnnnnnnnnnnnnnnnnnnnnnnnnnnnnnnnnnnnnnnnnnnnnnnnnnnnnnnnnnnnnnnnnnnnnnnnnnnnnnnnnnnnnnnnnnnnnnnnnnnnnnnnnnnnnnnnnnnnnnnnnnnnnnnnnnnnnnnnnnnnnnnnnnnnnnnnnnnnnnnnnnnnnnnnnnnnnnnnnnnnnnnnnnnnnnnnnnnnnnnnnnnnnnnnnnnnnnnnnnnnnnnnnnnnnnnnnnnnnnnnnnnnnnnnnnnnnnnnnnnnnnnnnnnnnnnnnnnnnnnnnnnnnnnnnnnnnnnnnnnnnnnnnnnnnnnnnnnnnnnnnnnnnnnnnnnnnnnnnnnnnnnnnnnnnnnnnnnnnnnnnnnnnnnnnnnnnnnnnnnnnnnnnnnnnnnnnnnnnnnnnnnnnnnnnnnnnnnnnnnnnnnnnnnnnnnnnnnnnnnnnnnnnnnnnnnnnnnnnnnnnnnnnnnnnnnnnnnnnnnnnnnnnnnnnnnnnnnnnnnnnnnnnnnnnnnnnnnnnnnnnnnnnnnnnnnnnnnnnnnnnnnnnnnnnnnnnnnnnnnnnnnnnnnnnnnnnnnnnnnnnnnnnnnnnnnnnnnnnnnnnnnnnnnnnnnnnnnnnnnnnnnnnnnnnnnnnnnnnnnnnnnnnnnnnnnnnnnnnnnnnnnnnnnnnnnnnnnnnnnnnnnnnnnnnnnnnnnnnnnnnnnnnnnnnnnnnnnnnnnnnnnnnnnnnnnnnnnnnnnnnnnnnnnnnnnnnnnnnnnnnnnnnnnnnnnnnnnnnnnnnnnnnnnnnnnnnnnnnnnnnnnnnnnnnnnnnnnnnnnnnnnnnnnnnnnnnnnnnnnnnnnnnnnnnnnnnnnnnnnnnnnnnnnnnnnnnnnnnnnnnnnnnnnnnnnnnnnnnnnnnnnnnnnnnnnnnnnnnnnnnnnnnnnnnnnnnnnnnnnnnnnnnnnnnnnnnnnnnnnnnnnnnnnnnnnnnnnnnnnnnnnnnnnnnnnnnnnnnnnnnnnnnnnnnnnnnnnnnnnnnnnnnnnnnnnnnnnnnnnnnnnnnnnnnnnnnnnnnnnnnnnnnnnnnnnnnnnnnnnnnnnnnnnnnnnnnnnnnnnnnnnnnnnnnnnnnnnnnnnnnnnnnnnnnnnnnnnnnnnnnnnnnnnnnnnnnnnnnnnnnnnnnnnnnnnnnnnnnnnnnnnnnnnnnnnnnnnnnnnnnnnnnnnnnnnnnnnnnnnnnnnnnnnnnnnnnnnnnnnnnnnnnnnnnnnnnnnnnnnnnnnnnnnnnnnnnnnnnnnnnnnnnnnnnnnnnnnnnnnnnnnnnnnnnnnnnnnnnnnnnnnnnnnnnnnnnnnnnnnnnnnnnnnnnnnnnnnnnnnnnnnnnnnnnnnnnnnnnnnnnnnnnnnnnnnnnnnnnnnnnnnnnnnnnnnnnnnnnnnnnnnnnnnnnnnnnnnnnnnnnnnnnnnnnnnnnnnnnnnnnnnnnnnnnnnnnnnnnnnnnnnnnnnnnnnnnnnnnnnnnnnnnnnnnnnnnnnnnnnnnnnnnnnnnnnnnnnnnnnnnnnnnnnnnnnnnnnnnnnnnnnnnnnnnnnnnnnnnnnnnnnnnnnnnnnnnnnnnnnnnnnnnnnnnnnnnnnnnnnnnnnnnnnnnnnnnnnnnnnnnnnnnnnnnnnnnnnnnnnnnnnnnnnnnnnnnnnnnnnnnnnnnnnnnnnnnnnnnnnnnnnnnnnnnnnnnnnnnnnnnnnnnnnnnnnnnnnnnnnnnnnnnnnnnnnnnnnnnnnnnnnnnnnnnnnnnnnnnnnnnnnnnnnnnnnnnnnnnnnnnnnnnnnnnnnnnnnnnnnnnnnnnnnnnnnnnnnnnnnnnnnnnnnnnnnnnnnnnnnnnnnnnnnnnnnnnnnnnnnnnnnnnnnnnnnnnnnnnnnnnnnnnnnnnnnnnnnnnnnnnnnnnnnnnnnnnnnnnnnnnnnnnnnnnnnnnnnnnnnnnnnnnnnnnnnnnnnnnnnnnnnnnnnnnnnnnnnnnnnnnnnnnnnnnnnnnnnnnnnnnnnnnnnnnnnnnnnnnnnnnnnnnnnnnnnnnnnnnnnnnnnnnnnnnnnnnnnnnnnnnnnnnnnnnnnnnnnnnnnnnnnnnnnnnnnnnnnnnnnnnnnnnnnnnnnnnnnnnnnnnnnnnnnnnnnnnnnnnnnnnnnnnnnnnnnnnnnnnnnnnnnnnnnnnnnnnnnnnnnnnnnnnnnnnnnnnnnnnnnnnnnnnnnnnnnnnnnnnnnnnnnnnnnnnnnnnnnnnnnnnnnnnnnnnnnnnnnnnnnnnnnnnnnnnnnnnnnnnnnnnnnnnnnnnnnnnnnnnnnnnnnnnnnnnnnnnnnnnnnnnnnnnnnnnnnnnnnnnnnnnnnnnnnnnnnnnnnnnnnnnnnnnnnnnnnnnnnnnnnnnnnnnnnnnnnnnnnnnnnnnnnnnnnnnnnnnnnnnnnnnnnnnnnnnnnnnnnnnnnnnnnnnnnnnnnnnnnnnnnnnnnnnnnnnnnnnnnnnnnnnnnnnnnnnnnnnnnnnnnnnnnnnnnnnnnnnnnnnnnnnnnnnnnnnnnnnnnnnnnnnnnnnnnnnnnnnnnnnnnnnnnnnnnnnnnnnnnnnnnnnnnnnnnnnnnnnnnnnnnnnnnnnnnnnnnnnnnnnnnnnnnnnnnnnnnnnnnnnnnnnnnnnnnnnnnnnnnnnnnnnnnnnnnnnnnnnnnnnnnnnnnnnnnnnnnnnnnnnnnnnnnnnnnnnnnnnnnnnnnnnnnnnnnnnnnnnnnnnnnnnnnnnnnnnnnnnnnnnnnnnnnnnnnnnnnnnnnnnnnnnnnnnnnnnnnnnnnnnnnnnnnnnnnnnnnnnnnnnnnnnnnnnnnnnnnnnnnnnnnnnnnnnnnnnnnnnnnnnnnnnnnnnnnnnnnnnnnnnnnnnnnnnnnnnnnnnnnnnnnnnnnnnnnnnnnnnnnnnnnnnnnnnnnnnnnnnnnnnnnnnnnnnnnnnnnnnnnnnnnnnnnnnnnnnnnnnnnnnnnnnnnnnnnnnnnnnnnnnnnnnnnnnnnnnnnnnnnnnnnnnnnnnnnnnnnnnnnnnnnnnnnnnnnnnnnnnnnnnnnnnnnnnnnnnnnnnnnnnnnnnnnnnnnnnnnnnnnnnnnnnnnnnnnnnnnnnnnnnnnnnnnnnnnnnnnnnnnnnnnnnnnnnnnnnnnnnnnnnnnnnnnnnnnnnnnnnnnnnnnnnnnnnnnnnnnnnnnnnnnnnnnnnnnnnnnnnnnnnnnnnnnnnnnnnnnnnnnnnnnnnnnnnnnnnnnnnnnnnnnnnnnnnnnnnnnnnnnnnnnnnnnnnnnnnnnnnnnnnnnnnnnnnnnnnnnnnnnnnnnnnnnnnnnnnnnnnnnnnnnnnnnnnnnnnnnnnnnnnnnnnnnnnnnnnnnnnnnnnnnnnnnnnnnnnnnnnnnnnnnnnnnnnnnnnnnnnnnnnnnnnnnnnnnnnnnnnnnnnnnnnnnnnnnnnnnnnnnnnnnnnnnnnnnnnnnnnnnnnnnnnnnnnnnnnnnnnnnnnnnnnnnnnnnnnnnnnnnnnnnnnnnnnnnnnnnnnnnnnnnnnnnnnnnnnnnnnnnnnnnnnnnnnnnnnnnnnnnnnnnnnnnnnnnnnnnnnnnnnnnnnnnnnnnnnnnnnnnnnnnnnnnnnnnnnnnnnnnnnnnnnnnnnnnnnnnnnnnnnnnnnnnnnnnnnnnnnnnnnnnnnnnnnnnnnnnnnnnnnnnnnnnnnnnnnnnnnnnnnnnnnnnnnnnnnnnnnnnnnnnnnnnnnnnnnnnnnnnnnnnnnnnnnnnnnnnnnnnnnnnnnnnnnnnnnnnnnnnnnnnnnnnnnnnnnnnnnnnnnnnnnnnnnnnnnnnnnnnnnnnnnnnnnnnnnnnnnnnnnnnnnnnnnnnnnnnnnnnnnnnnnnnnnnnnnnnnnnnnnnnnnnnnnnnnnnnnnnnnnnnnnnnnnnnnnnnnnnnnnnnnnnnnnnnnnnnnnnnnnnnnnnnnnnnnnnnnnnnnnnnnnnnnnnnnnnnnnnnnnnnnnnnnnnnnnnnnnnnnnnnnnnnnnnnnnnnnnnnnnnnnnnnnnnnnnnnnnnnnnnnnnnnnnnnnnnnnnnnnnnnnnnnnnnnnnnnnnnnnnnnnnnnnnnnnnnnnnnnnnnnnnnnnnnnnnnnnnnnnnnnnnnnnnnnnnnnnnnnnnnnnnnnnnnnnnnnnnnnnnnnnnnnnnnnnnnnnnnnnnnnnnnnnnnnnnnnnnnnnnnnnnnnnnnnnnnnnnnnnnnnnnnnnnnnnnnnnnnnnnnnnnnnnnnnnnnnnnnnnnnnnnnnnnnnnnnnnnnnnnnnnnnnnnnnnnnnnnnnnnnnnnnnnnnnnnnnnnnnnnnnnnnnnnnnnnnnnnnnnnnnnnnnnnnnnnnnnnnnnnnnnnnnnnnnnnnnnnnnnnnnnnnnnnnnnnnnnnnnnnnnnnnnnnnnnnnnnnnnnnnnnnnnnnnnnnnnnnnnnnnnnnnnnnnnnnnnnnnnnnnnnnnnnnnnnnnnnnnnnnnnnnnnnnnnnnnnnnnnnnnnnnnnnnnnnnnnnnnnnnnnnnnnnnnnnnnnnnnnnnnnnnnnnnnnnnnnnnnnnnnnnnnnnnnnnnnnnnnnnnnnnnnnnnnnnnnnnnnnnnnnnnnnnnnnnnnnnnnnnnnnnnnnnnnnnnnnnnnnnnnnnnnnnnnnnnnnnnnnnnnnnnnnnnnnnnnnnnnnnnnnnnnnnnnnnnnnnnnnnnnnnnnnnnnnnnnnnnnnnnnnnnnnnnnnnnnnnnnnnnnnnnnnnnnnnnnnnnnnnnnnnnnnnnnnnnnnnnnnnnnnnnnnnnnnnnnnnnnnnnnnnnnnnnnnnnnnnnnnnnnnnnnnnnnnnnnnnnnnnnnnnnnnnnnnnnnnnnnnnnnnnnnnnnnnnnnnnnnnnnnnnnnnnnnnnnnnnnnnnnnnnnnnnnnnnnnnnnnnnnnnnnnnnnnnnnnnnnnnnnnnnnnnnnnnnnnnnnnnnnnnnnnnnnnnnnnnnnnnnnnnnnnnnnnnnnnnnnnnnnnnnnnnnnnnnnnnnnnnnnnnnnnnnnnnnnnnnnnnnnnnnnnnnnnnnnnnnnnnnnnnnnnnnnnnnnnnnnnnnnnnnnnnnnnnnnnnnnnnnnnnnnnnnnnnnnnnnnnnnnnnnnnnnnnnnnnnnnnnnnnnnnnnnnnnnnnnnnnnnnnnnnnnnnnnnnnnnnnnnnnnnnnnnnnnnnnnnnnnnnnnnnnnnnnnnnnnnnnnnnnnnnnnnnnnnnnnnnnnnnnnnnnnnnnnnnnnnnnnnnnnnnnnnnnnnnnnnnnnnnnnnnnnnnnnnnnnnnnnnnnnnnnnnnnnnnnnnnnnnnnnnnnnnnnnnnnnnnnnnnnnnnnnnnnnnnnnnnnnnnnnnnnnnnnnnnnnnnnnnnnnnnnnnnnnnnnnnnnnnnnnnnnnnnnnnnnnnnnnnnnnnnnnnnnnnnnnnnnnnnnnnnnnnnnnnnnnnnnnnnnnnnnnnnnnnnnnnnnnnnnnnnnnnnnnnnnnnnnnnnnnnnnnnnnnnnnnnnnnnnnnnnnnnnnnnnnnnnnnnnnnnnnnnnnnnnnnnnnnnnnnnnnnnnnnnnnnnnnnnnnnnnnnnnnnnnnnnnnnnnnnnnnnnnnnnnnnnnnnnnnnnnnnnnnnnnnnnnnnnnnnnnnnnnnnnnnnnnnnnnnnnnnnnnnnnnnnnnnnnnnnnnnnnnnnnnnnnnnnnnnnnnnnnnnnnnnnnnnnnnnnnnnnnnnnnnnnnnnnnnnnnnnnnnnnnnnnnnnnnnnnnnnnnnnnnnnnnnnnnnnnnnnnnnnnnnnnnnnnnnnnnnnnnnnnnnnnnnnnnnnnnnnnnnnnnnnnnnnnnnnnnnnnnnnnnnnnnnnnnnnnnnnnnnnnnnnnnnnnnnnnnnnnnnnnnnnnnnnnnnnnnnnnnnnnnnnnnnnnnnnnnnnnnnnnnnnnnnnnnnnnnnnnnnnnnnnnnnnnnnnnnnnnnnnnnnnnnnnnnnnnnnnnnnnnnnnnnnnnnnnnnnnnnnnnnnnnnnnnnnnnnnnnnnnnnnnnnnnnnnnnnnnnnnnnnnnnnnnnnnnnnnnnnnnnnnnnnnnnnnnnnnnnnnnnnnnnnnnnnnnnnnnnnnnnnnnnnnnnnnnnnnnnnnnnnnnnnnnnnnnnnnnnnnnnnnnnnnnnnnnnnnnnnnnnnnnnnnnnnnnnnnnnnnnnnnnnnnnnnnnnnnnnnnnnnnnnnnnnnnnnnnnnnnnnnnnnnnnnnnnnnnnnnnnnnnnnnnnnnnnnnnnnnnnnnnnnnnnnnnnnnnnnnnnnnnnnnnnnnnnnnnnnnnnnnnnnnnnnnnnnnnnnnnnnnnnnnnnnnnnnnnnnnnnnnnnnnnnnnnnnnnnnnnnnnnnnnnnnnnnnnnnnnnnnnnnnnnnnnnnnnnnnnnnnnnnnnnnnnnnnnnnnnnnnnnnnnnnnnnnnnnnnnnnnnnnnnnnnnnnnnnnnnnnnnnnnnnnnnnnnnnnnnnnnnnnnnnnnnnnnnnnnnnnnnnnnnnnnnnnnnnnnnnnnnnnnnnnnnnnnnnnnnnnnnnnnnnnnnnnnnnnnnnnnnnnnnnnnnnnnnnnnnnnnnnnnnnnnnnnnnnnnnnnnnnnnnnnnnnnnnnnnnnnnnnnnnnnnnnnnnnnnnnnnnnnnnnnnnnnnnnnnnnnnnnnnnnnnnnnnnnnnnnnnnnnnnnnnnnnnnnnnnnnnnnnnnnnnnnnnnnnnnnnnnnnnnnnnnnnnnnnnnnnnnnnnnnnnnnnnnnnnnnnnnnnnnnnnnnnnnnnnnnnnnnnnnnnnnnnnnnnnnnnnnnnnnnnnnnnnnnnnnnnnnnnnnnnnnnnnnnnnnnnnnnnnnnnnnnnnnnnnnnnnnnnnnnnnnnnnnnnnnnnnnnnnnnnnnnnnnnnnnnnnnnnnnnnnnnnnnnnnnnnnnnnnnnnnnnnnnnnnnnnnnnnnnnnnnnnnnnnnnnnnnnnnnnnnnnnnnnnnnnnnnnnnnnnnnnnnnnnnnnnnnnnnnnnnnnnnnnnnnnnnnnnnnnnnnnnnnnnnnnnnnnnnnnnnnnnnnnnnnnnnnnnnnnnnnnnnnnnnnnnnnnnnnnnnnnnnnnnnnnnnnnnnnnnnnnnnnnnnnnnnnnnnnnnnnnnnnnnnnnnnnnnnnnnnnnnnnnnnnnnnnnnnnnnnnnnnnnnnnnnnnnnnnnnnnnnnnnnnnnnnnnnnnnnnnnnnnnnnnnnnnnnnnnnnnnnnnnnnnnnnnnnnnnnnnnnnnnnnnnnnnnnnnnnnnnnnnnnnnnnnnnnnnnnnnnnnnnnnnnnnnnnnnnnnnnnnnnnnnnnnnnnnnnnnnnnnnnnnnnnnnnnnnnnnnnnnnnnnnnnnnnnnnnnnnnnnnnnnnnnnnnnnnnnnnnnnnnnnnnnnnnnnnnnnnnnnnnnnnnnnnnnnnnnnnnnnnnnnnnnnnnnnnnnnnnnnnnnnnnnnnnnnnnnnnnnnnnnnnnnnnnnnnnnnnnnnnnnnnnnnnnnnnnnnnnnnnnnnnnnnnnnnnnnnnnnnnnnnnnnnnnnnnnnnnnnnnnnnnnnnnnnnnnnnnnnnnnnnnnnnnnnnnnnnnnnnnnnnnnnnnnnnnnnnnnnnnnnnnnnnnnnnnnnnnnnnnnnnnnnnnnnnnnnnnnnnnnnnnnnnnnnnnnnnnnnnnnnnnnnnnnnnnnnnnnnnnnnnnnnnnnnnnnnnnnnnnnnnnnnnnnnnnnnnnnnnnnnnnnnnnnnnnnnnnnnnnnnnnnnnnnnnnnnnnnnnnnnnnnnnnnnnnnnnnnnnnnnnnnnnnnnnnnnnnnnnnnnnnnnnnnnnnnnnnnnnnnnnnnnnnnnnnnnnnnnnnnnnnnnnnnnnnnnnnnnnnnnnnnnaggcgatcatctgggacaagcagcatcccgtcctgacgcgcaaggactacatgggcgcgcatgagtggtgcttctactgctggaaggaaggggccgcccacgtctttctcgggccgaacaacgccaccgacctgtggcgcgtcaagaaggtcaacccgcagaacatggtgcacttgacggagaagccggtggaactggccgtgcgggccatccagtactccagccgccccggcgagaacgtgctcgacccgttcgggggctcaggctcgaccctgatcgcggccgagcagaccggccggcgggcttttttgacggagctggaccccctgtattgtgatgtgatcgttcagcggtgggagaacttcgcggggcggaaggcggatcgcattgcgtcgaatgtgccggtatcatcttccgatctgtcagacaggagttgagaagcatggatacggtgaacggtgccacccagctgcgtcgggtaatccggttgattcgattgctgtcgggtccaccgcggactttgtatcagctggcagagcggcttggagtctccgatcgcaccattcaacgtgacatcaagctcctgcagtcggtcggctatcgaatcgagagcatcgaacgaccgcgcaaggcgcccgtccgccgtattacgcggcggccgcggtggagtatctgacggggcctagtccatcgattttgcagacggattcgactctcaggccggagcaacgccccggacacgtccgaggcgttggtcgagggcgtgggatgatgtcacccagtcgcggcttgttccgcgtcgcaggtgtcgcacgtggtgaacggctcgccgggctcgtccggcgggcagcgtgtgggcccgccgcagaatgtacatggcgggtgtgtcgctccgcaggtcgggcaggtgaagtcgggccgttccccttcggccagtacccagtactccgtcatggcgtccaggtggacgccggctgtcgcggcatggtttcggcggtaacgggtctcgacgatcccccgttctttcatgaaggccagggcgaccgcgacctgcgtccacggcaggttctcgtgctcggcgattgtctccagggtgaagccgtcctcgccgagctcttcggccgcgtgggcgatctgctcgaacgagaccagcgggcaccggtgctcgtacggccggccgcgtcgcggcacgaccttgcgagccaggttcccatcgaatacctcgaaggtctccctgcgttttcgtttggcgatcatggttcaagcctccgtcccggcgtactcgaacttgccacgctcgaccttacggaaccgtgccgcgtcgcccttcgtgccgatctcgcggatgatcgcggcgtagagcgtggcctcaggcgtcttgccgttcgggctctgccacaggtcttgctcgaccatcgcggcgatcatctcgcctgaccgcatggcctgccctgatgccttcagcacttgtgccgcggcgttcaggacgccgagccgtttcggcttgggttcgctggccttccgggcccgggtcttcttcgccggcgtcgggatggcgatcccttcggccaggttgcccgcctggacggcctcgacggtcgcggcgatctccgcggtttcgtcctggcgacactgctgatcccagcaggcctggcagagcgggtcgcccagatgggtcaacgcggacggttggccgcaccgcgagcagtggtcacggtccggcggcggtgcgtcggccggcgcctctgcgatctcgcggcggagtcgctgggcgcccttgatgcggaccttcttgcccgtggccaggttcgtcgcgttccagccgccgtgcgggttcaccccgtcgatccggacttcggtgatccggtcgctgaccttcgcggcgtagatgccgccgattctcacttcgttcttcttcatcggtcttctccttatgtgctagccctgttccgcagctgcccgtttcttccgcaaaacgcgctcaacgcgcggcagcacggtcttcaagaggttgccctgccacagatcgtcccgtaccaggcctacgcccggaatctcgaccggcgtgtccatgcgaacccggtagtagatcggctcgtttcgcccgagcttctcggtcccgatgatcgtgcccgttcgcccgacgaactcaggcatcccgccgaggatcttgactcgttttccgactctgctgttcatcgtttcctcctgccctttgggctcgtggcgtgtggcgttctggtcggttcagtcgttcaccgggattgtcacgatccggtgcgtcccatcgggcatctcttggtcgcccaggtatgcgaatcccgcacccgcggcggccagccgaacggcctcggcatcctcgacgacgtagttccggccgttcagccggaccgccttgccccggccggcggcgtccgagtactggatcgcctcgccggcggaatcgaactcgatggcttgtatggtgatggtcttcacggttcggtctcctgatcgatgtggcgcgggcccccgcgtgggagcccgcgcccgggtggtcacagggcgtcgatgtacgtctggaggtctttgccttcggtttcggcggcctgcatgcccagcacgaaggcccgctgaatcacccgtttcagggcggcgacgtgcacgtcgtggaaatccaggcagtcgcggttgcgggtttcgagggtctcgatccccagttccgcggccaggcggccggccaggtcgtccaatcgggttttcgcgttgttcgtcttcgtcgtcatctgcgttctccttcgcgtttggaattcgctgtccacacccatgtcattgccatgagaacgcaccggaatccaggcgattcgcaggattattcgatgtttcttttttcagtgtcaccggatggcaccttctggctcacgggagccgaatggccgcccggcgggcccccatcggcccgccggggttcgcgttcgggctactcgcccagggtctcttcgatccgctcccgttcgatcccggagatgaactcgagggtgtcgatcaggttgctgcggacctggcccatcgagcccgcgtggccccagttcagcgggtcggccttggcctgctcgtcgctcttgtcgagctccatctgcagccaatcgatcaggcgggcgatgtccgcccggtgggcctggtaggtctccagggccttcggcgttgccttcttttcgttcttcgcgttcatcttcgttctccttcgtgtttgggattcgcaatcgtcatcactgtcattgccatgcaaatggcgatcagggaaggcgaatcgcagaataatctgcagaatctgcgatcgttgcggattcggtgtcactgcatgacatcctatggctcacacgagccgatcggcgttgatttcacaggagcggaggtgtttgccggtccgattcgccgcgctagaatgcaatgacgccggatggctcacgggagccaggcggccgcgggcgatccgggtggtccacgtggtcgcctggaccgccgtgcgtcgcacaggcgcaaacgacgggccgcccgtggcggccctggcgttggtcctggagggatcaggcggcggtatggtcgtacttgcgggccatttcgaggagcttggccttgatggccttccagtcgggcgtctggccgtccatcgccatctgcccgaagaccttgtcccgcagggcgcccttgtaccacccccgggtccaacccaatcggtagaacaggcggttcagttcggtctcgcccgtcccggcccccgggcggtcccagcaactgcgggcgccttcgcgcttcgtgtaatcccaatccgggcagcgcttggtgttcagggcgagctcgaccaggcccaggcacatcatcaggtacccggccaccttggtcttgttcagcgttcccgcgaaggcccggaactcgatccggttccgcccgcgggccaggtgcgtcaggttcagcaggtggtagcggtcggcctcgcagcgagtcttggcgcggtccttatcgccgtacggcttgatctgcttggtgtaggtggtctgctcccggtggcgggtgcccgtgctggcgaagatcgccttctcgtggttgcccaccaggctgatcaggcgggccagggccgatgcgtcgccgttccattcgacggtgacgtgcagcccgcaggtcggattgacccgggccccgcgggcggcgatccggtcgatggccgtctcgagctccagcagcccggtccacccgcgaagctttgggctgacgaactcgcagcctttgcggttggcggtggtgggccggatgctgccgtcgcgctccgcccgccagccctcgggcagccaggggacctggtagcccgcgtggtacggcccgatgggtgtgtcgtcgcggttgggcagggtcgtttcgaattcgatcccgaaggcgatctcgttggcgttcatcgtgttttcctcctcgtgtttcccgccgcccatcgcgtcgggtcaggtgtgtcagtacgctgcgttttggcatgaatccaatgaaagcagcggattcttcgatgtttttttcgatccggctgcactgaatgtcacagcctgacactgagtggctcccgggagccgaaaggatgcgagaatgcccgaaggagaagcagcagcggcgcgaagcccgacggccatgcccgttgcggacctggtccgactgttgacggccgccggcggccgtgcgattacgaccgtgatgattgaagcggacgtggaatccggcgcaccgacgaacgcggacggcacgatgaacctggtgcactacgcggcgtggttggcgaaggagagcccgaattgaacgaagtcggggaccggctcagcgtcacctgaaaccgatcccctgaccaccccactgaatgaccagtgtgatggctacccgtactgatcggcgtgcgacccgcacgtctgaagttagcgcatgcctggccggggcggcggatccctgggatcccgaccgcctggccgtacgacttgccgaggagctggggttggccatcgacccgcgcaagctgaaacccatcgaactggtccgactactcaattcgacccccctgggcgaagtgacgtcggcacggtccctctatcagcaccgggcccgggccggcatgcggatcggcgacgacaagaccgtcgacctgttgcggtacaccgcttggctcgcgtgggagcggcaccatcgcgatgcctacgacgctcaccgtgagcgggcccggcaacgccaggcggagcagtcgcggtccggccgggacgtcggcgagctgccggcggtggtgaatcccgagcgccgggcgcggtgcgaacgcaaccttcgcgcgttctacgaggagtacttcccgcagacgttctacctgccctggtcaccggaccacctgaaggtcatcgcgaagctggaggcggcgattctcgagggcggcctgttcgccctggccatgccccgcggcggcgggaagacctcgatgatcgaggcggcgtgcctgtgggcgttgggctacggccatcggcggttcgtgcccatcatcgggccggacgaggggcatgcggtcgatcgcattcgcaacctgcggacggagctcgagacgaacgaccgcctggcggaggattttccggagatctgctacccgatccggtgccttgaagggatcaaccagcgtcggttgctgtaccagggccgaccgatcgtcatggacttcacggccaagcgcatcgtgctgccggacatcccggacagccgggccgcgggggcggtggtcaccacggccgggatcaccggccaggtccgcgggctgaactacaaacgccgcgatggcgtgacggtgcggccggacttcgtgatcctggacgatccacagaccgatgagtcggcccacagccccagtcagtgcgactaccgcgagcgtgtcatcaacggcgccatcctcggcctggccgggcccggcgtgcggatctcggccatcatgccgtgcaccgtcatccggccggacgacctggcggaccggatcctcgaccgcgagcgcaacccgcactggcagggtgaacggacgaaactggtctactcgttcccgaccaacgaggcgctgtggaagaagtacgaggaactccgccgcgaggatctggcgcgggacgaccgaaagctgaccaccgcgacggccctgtatgccgccaatcgcgaggcgatggacgcgggggcggtggtcgcctggcccgagcggcacaacgcggacgagctctcggccgtccagcacgtgatgaacctgcggtacgagcgcggcgaggtcgccttctgggcggagtatcagaacgagcccctgccggagaatccactctccgaggacctgctgacggccgacgagatcgcggcgaaggtgaacgggcaccgaaagggcgaggtgcccctgactgtgacgcacctgaccatgttcatcgacgtgcaggccaaggtgctgttctggctggtcgtggcgtgggaggacgatttcaccgggtacgtcatcgactacggcaccgagccggaccagaaggcggcgtacttcaccctgcgtgacgtccggcacaccctggccgtcgcggcgccccgggcggggctcgaggggtcgatccgggcgggcctggtccggctgtgcgggcggatgctgggccgggagtggaagcgggaggacgggtcggcggcccggatcgagcggtgcctgatcgacgcaaactggggccagtcgacggacgtggtgtacgagttctgccggcagagcgaccacgcgagcgtcctgacccccagccacgggaaatacgtaggcgcgtcaagcattccattcgccgagtacaagcgcaaacggggtgaccgggtcgggctgaactggcggatcccgcacacgagcggccggcgggcgatccgccacgtcgtgtacgacacgaactactggaagtcctttatccaggcgaggttccggacggcccagggcgatccgggttgcctgacgctgtttggccgccagccggagcaccaccggctgctgggcgagcatttgacctcggagtacccggtccggaccgaggggcgcggccggacggtcgacgagtggaagctccgtgccagcgggctggagaaccactggctggactgcctggtcgggtctgcggtcgcggcctcgatgcagggggcggtgctcttcggaacccaagatatgggccgcccgcggccggcgggccggcgaaagctctcggagttgcagcgaggacggcgatgaggaaggaccaggtcaaaccgcccaagccggaggagccgtcgggcctcgtctgctcgaagtgcgggtgtaagcacttctacgtagtctacacccgggcccgctggggtggccggatcgttcgccgccgggaatgccggtactgcgggcggcgggtgaccacgacggagcgggtgacgggatgataggaaggcattctgccgtttcgcgcaactttctgtagattcagctgttagcagagccagcaacctcgcagctttggctgagttgctgcgttttgccggcggtgcgacacaccttgtcggtcccccgggttacaggtaggttgggaagaacaatctctctgtcgcttcgcagtccccggggctgtgcggtattgtagatgccgtaaacacctattctcagaagggacacgcttatgcaattcaaccttctggacgaggcgtggattccggttctgcgaaccaacggcacttgtgaccgtgtcggcatccgcgaggcgctgacagaggccgggagtatccggcagatcgcggcgtccaacccgatggatcgagtggcgatcgtgcggctgctccttgcggccctgtattggtgcaagggatacccgtctccgcaggaggaggaagatcgcctcagtggggacgggcgcttcccgcctgattggttcaaaaaactcgatgactgccggaagtacttcaatctgcttggagatggcccccgtttctttcagaatgagggcctcaagaaccggccaccgaagcacaccacacattacctgatgcacgaagtgccgagcggtacgaatgcgtggcacttccatcacactaccgaccaatcgggtggcttgtgcgcagcttgttgtgccacgggtttggcccggctgccggtcttcgcgacctcgggtggcaagggaaagtcgccagggatcaactcaaagccacccctctacgtcataccggtcggcacgacgcttgcgacgactctgcgattgtcctggagatatggggatgcgtcactgggcatgccagaatgggaaacaccaggatacgaactcccccgacggggtaatgtgcccctgctgccaggaatgacctggcttcctcgcaatgtatggttgggaaaccgggaaaagaacgaaacggcctgtgtctcctgtgggcgggccgagcgcgtccttcggcgatgtgtgttcgacggcaaaggcggctccaggggtgaagaccggaggtggcgtgatccacacgtggtccccgtgccgctgggaagaaacgcgaccggaccacttcagacaagcgacgctctgaaatcgaaggatgccgcggcggggcagtgggtgagggctctggcagccattctcggacaaaggacggttgaccaaggagcgggcatctgggcagtcggcttctccacagtcaagaacgacaagtacctcgaggcaactgaactcctggtcgcgccggaacggtggccgtcgccagcggaagactggatcgcgttggcggagcagtggcaacaagaaggaagagcggtcatgcgacgggcgcgttcgccaagtgcttcctccactcgacacgaagtcgaactggacatcgttctcggtgctgttcgggcacatgtcgagtcacggcttgccagccgcatcgacgggctgctgtcagacgctgaaggtgagtgggtgaaggcaacgagagagtaccagaagatgatggcggcagtggcgatgtcgcttgcgccagggtttacgacgcgcgcgatccgccgacgcaatcagattgcccgatccggtccggacatggcgcccacatcgcggtgcaggaagggagaagcaccaccacggaaaggcggcgaacgatgacgccaacagagaagtttgtccgaacgctggaatcgcttgagcctggcagccttgggcgattgcgcagcctgggtgggcgcagcctggatgagtcagtggagggtttcgaccttttcacggggatttggtggccactgagggaacagaaccagagagcccctcgccgtgaggtggcgtggctggttgccaaagtgtatgcgtaccgcccgatgcgacaatgcaaaggagcaaggcttgccatgcagctggggaatgtgaaaggcgagagcgagccagtgatgcagcgacgacaagccaagttcgacgaactcctcctgctccctctgaccctgatcgagccagcgctgtgttgggcgctggatctgattgcgaaagacagcggtgagttggactgggtgcgcctcaccgatgagttgtccgcatgggagcgtgaagaaacgcggctcaactgggcgacgcaatacctgcacttcgggcagtgacatgctcaaaaggagaatactatgctgatcgaaatccatgggattcagaaccacagcccggccaatctcaaccgtgatgatctgggtgctccaaagacatgcttcttcggcggggtgatgcgctcacgtatctccagccagtgcatcaagaggagcatccggaccagcgagcagttcaagctgctgtgtggtgggatccgcacgcgaagactgccgcaatacctggcgtcccagatcgcagaaaaagacatgctttcgctggccactgcggtggttcaggcgtgcgggcttgcgaaggacgacgcggcaaagaacgggaagaaggatgtcatcgttttcctgtcaaagagcgcgactgcgcacatggtggatatgcttcgtgcggaagaggcggaagtgacagagaagcgagtcgccaaactctcgcgagaattcgcccgcctcgttgcacaggatcgctatgcgccggacatggcattgtcaggacgcatgctggaaccagccaagccccccaagagcaaaaagggtcgcaacgcggacacggacgaacaggaggacgagaaggccgacagcagcgccaaggacaagggggtctggaagggccttgatctagacatcgaggctgcgttgcaggtggcccatgggatatcaacccacgaagctcgtccggaagtggactacttcgtagctgcagatgacataccaggtgaggatgcgggtggtgcgcacattggcgaagccatgttcgcgtcggcctgcttctataaatacttctcgatacactgggaaacattggtggacaacttgaacgggaacagggagctggccgcccacaccgtcggggccttcattcgtggagccgcgctggcgaacccgaccgggaagcagaacagcttcgctgcccacaaccctccggacggcatcctcgtagaggtaaagcaaactcgctccacgccaatcagctacgcgaacgcattcgctgcaccggtgccgagcaagggaacgcgcgatattgtgtcgcaaagcatcgcacagctcggtcagtacgtgcatgacctggacaccgggtacggcaaggagcgcgaggacaagcggttctggttctcccccaatctccggtatccgctcacctatcagcacgagaagcaggagaccccctgtgctgacgaaaacgtaggatccctcgatggcctagtggctcttgtcgtgaaggaaatcgggtttgactggtcgcgcgttcagtccgtgacggtcgagtgaggagatgcgccgatgaatgcgaatacgctcctgctccgcctcgaaggtcctcttcaatcgtggggagaccagcaatcgagattcgtcgtccgaaggacttccgaagctccgaccaaatcggggatcgccgggctgctctgcgctgcaatgggcgtgtcgcgctccgatgctcggcaacggctcatcaagttgaacgctttgatgatgggcgtccgcatcgatcgtccaggcgtgcgctggtgggactaccacacggtgggggcgggaatgcagatgcaaagcgcggagggaatcggaaagaccaaacccggcccgattctgacgcgtagggaatacctctgcgacgcgagcttcgtggttgctttgcgtggcgattcctcactgatcgtttcgttgcacaaagctgttcagcatccggtgtggccggtgtatctcggccggaagtcgtgcgcggcatcgcttccactggtgggctgccatgacgatccggatgtgggcgggtttcctgacctggaatctgcgcttcgatctgttccctggcggagccgccacgcgggagaggccgtgcccgatgtagtcgaatgcgtgatcgaatggcggggtgccgcagcgggtgaggttgctccactagacggggaagtctggtacgatgtcgcagactcgtttgatgtgccagcacactccccaagaatggttgttcgcaagaagatgggcgtcggctccggcacggacatccgagtcggtgcggcacgccagagtcgccttccggcgccgctgcgcccccgcgccgattacgcgaatgctgagtatcgccggaagcgtcagagccgcctggacgcagatgggggcctgtgtgttttctgcaagtctccggcgacgacggttcagcatgtgacgtatcgccgcgccggcggcgatgaggagcaagatgatttacgctcgctctgccggttgtgtcacgacgcggtgacgatgatcgagtacgggatgggcatggggctcgaccggatcaaccccgaagacagacaatggcgcgaccagattatcgccaagcgtgaggagatcattcggtttcgttcgctggagactcgacgtcgacggcttagcgccgaggaggtcgaatgatcatgtatcactcctatctgctcattgatactggtgacaatccggaccgcccgaggcccgggcgtctctggttacgaaatgtctatcgagtacaccagcggctttgcatggctttcccgaatgatgccagaaagcgagaggatccagagtttctcaaaccgtacgatccgaacggctttgtccacgttcacggcagccgcacaaccgaccaggcgtttctcttccggattgacgcgcatgcggggggcagcgtggtcatcgtgacacagtctgccgtaaaaccggattgggcgtatgccttccagaacgcgatgtatcttctgcatgccccgccgtcggagccgcgtgaggcacaactcacgtttccagccggcacgctgttgggattccggctgctggccaacccgacgcgccggttgcgagagagttctcgtgacgccaagggagaacctatcgaaggacgatgggcgggaaaacgggttcccgtgccgacaggcaagctggatgattggctgacacggcgatcggagcgttgtggttttgccgtcgagactttgtgggaagctcggccgggatttgtttacttcagcaagtcggcgagccggggcgagggacagtgccttagatccgttcgatatgaggggaagcttcgcgtcagcaactctgcagcatttcgcgagacgcttatccggggcatcgggccgggcaaggcgttcgggttcgggttgctgtcggtcgcgccggtgcgcgaggggggctgaatggggcatgcgtgaagggtgcggctctttggcaagtgaatagtgtggtggccaatggggaggacaggccatggacgatctgcatcggttgcccaggtttggggacagcctggggtatctgtacgtcgagaacgcccggatcgatcagcacgagatgtcggtggccgtgcatgaccaggagggcttcaccccggtcccggccgcggccctggccgttctcatgctggggccggggacgcggatcacccacgccgcggtcaaggcgctggcggacaacaactgcctgattgcctgggtcggccaggagggcgtccgcatgtatgcccacagcacgggcggaacgcggagcgcacgccttttgctgcgtcaggcggcgttggcgctggacccggaccagcgactggccgtcgtgcgccggatgtacgaaaagcggttcggcgctcgtctcgagccggggctcacgctccagcagattcgcggcaaggaaggcgtgcgcgtccgtgaggcgtacgccaaggcgagcctggcgacaaacgtgccctggcagggccgcttctaccagcgcggcaactggtccgcggccgacccggtgaaccgggcgctgtccgcgggaaatgcgtgtctctacgggctgacgcatgcggcgattctctcggcggggtactcggcgggcatcgggttcattcacacgggcaagcaactctcgttcgtgtatgacgttgcggatttctacaaggtggagttgatcgttccggcggcctttgaggtggcctcgaccgttctgacggacgtggagcggaacatgcgaatcgcctgccgcgaccggttcgcacattcccggttgctgggccgcatgatcgaggacattcaggacgtgctcaacgtggaaggtcggcccgttcggattgatgagaactttgatgaggacggggcggcgcccggggcgctgtgggacccggatgggggaggcgaggaaggggacgggctggcgggaggccggaactatggtgatcctgattcttgagcgtgtgagcccgggcctgcggggagagctgacgcggtggatgatccagcccaggacgggggtgtttgtgggccggttctcggcgttggttcgcgacaagctgtgggatcgagtgcagaagtcgatcaaggccggggcagggatcatggtgtacagcacgaacacgccgcagggctatgccgtgcggacctgcgggcggccggatcgagacctcgtggacttcgagggtctgattctggcaaaaacgcggaaaagggagtagattttcagcgtattccccacgcacgtgggggtgaaccgcaagtgccctccgtacatgcgcagtgctacgtagtattccccacgcacgtgggggtgaaccgtttcggcggatcgtcgggccgggaccgtgcccagtattccccacgcacgtgggggtgaaccggattagcctctcacgatgatttggtcgcccacgtattccccacgcacgtgggggtgaaccgatcgccgccgccaggcgcggtcagacgtatcgggtattccccacgcacgtgggggtgaaccagctgagtctatggctggcgtctcatacgtgacgtattccccacgcacgtgggggtgaaccgccatcgcaccgaacctcacgcttcgaggcatggtattccccacgcacgtgggggtgaaccggtgtggccggtggccagcgccacgtcgcccgggtattccccacgcacgtgggggtgaaccgcaactgcttgaacagatcaaagggctgggcacgtattccccacgcacgtgggggtgaaccgccggcggacacgaccgagacgcggaacctgtacgtattccccacgcacgtgggggtgaaccgatggactgaatggaccggatggacggaatggacgtattccccacgcacgtgggggtgaaccgaagatggtgaataagcgcatcaagtcgcgcatcgtattccccacgcacgtgggggtgaaccgcggagcagcacggtctgacgtttgtgcaattcgtattccccacgcacgtgggggtgaaccgcacacctaaggatttgctagacatcacacactcgtattccccacgcacgtgggggtgaaccgcaaaaatcggacacgcctacgggtaggcgaacgtattccccacgcacgtgggggtgaaccggagtttatcatctcaggctttgagagccggctcgcacgtcggcggaaaggtgcgaacacatgattgacgaaccctccgatgcgcagatgcggtttcttgcaagcctgaagtacgacggggagctgccgcgcacaaagactgaggccagtttcctcatcgatggtcgaaaggccggtaaggactcggccaaactcgaaaaggaactggagcgacttcggcagaagacccagcgggaatggttcaaacgcgagcgtgattactgccgaatggaggttcgacaggcacgcgactcggaaggaatgatcgcgggctttcgaatccgtgttggaaggcgctgtgatgccgcgaagcagtatcatggtgcattcgtaccgattcaggttgcgatgaaacatccccaggtgctgcctccctacgagaggatctgtcaacactgggcgtgtgaatgcgaaatcgaggaagtgctggaatctgatcgccttgcaaccgacactccgatggtcatcaagccaggtcgaataacgacggttcgaaagtggcgtcggaaccgtcatccgtttttgacgttgctcgttctcgccgtgcttgcctattgcgtttaccaactgttgaagacgtgagctgaccgagaagcttaagtcactgcgttcatgcgcttcttgcatgtctaccggtgtaacaatctcgccgagaatccctgaacccgcttgaggcgcacccgcgcgaaggataagcagccgatagacaaccccaccgggccatcccggaggcgagcgggcggcggctgatcaccgtcaaaccgtcgagccagcaagtgatacgccgtgcagggctgcacacctgcacggcgttttttgttgcgccttcgccttccggatggctcggtgcggagagcatcgaagcccgaaacaccgttgaaatcggaggaacccatgtcgttcggacccgtaaccatcgccacgctcgacacggtggacatgcaggcgcccggggcgccggggctgtccgcccagcagatcctcaaccagctgggcgagttcgttctcacgccgccgaccacggacgccgacggctcgccgctgaccggtctgacctttgcccaggcggtggtcattcaggcggacgcggacgtggcggagttgttccgcaacgacttcgagggcgctatgcagttcaacggggccaaggtgttcgagatcgagttggccgagggcatgccggtgacccagccgttcgcgatcggcgagccgggcaagccgtactcggtcctggcccgggtggcggaccaccttcgtggggagtagcccggcgagcgtggtcacgctccacacgcggcggcggccggcgtggatgtggtggctgatcgggtgggcccgccggctgcacggactgaccggacgactggtcgcgtacctggaacggtgaagcgatggcagaggacctgaaagagacgattcgcgagactgcccagggccccaagcgggtgaccggcgactccggctccgtcgagcagcaggatctcggccagctcatcgaggcggaccggtatctcgcgtcgaaggacgcaggcaagaagggcctgaaggcaatccgtcgcacgaaggtcatccccccaggagcgagttgacgtgcggaagtggtggagacaacgcggacgcaaggcgacccccaagcacggctccgtgctcggccgggtcgtacggttcgtccgcggctggtacgacgcggcccggaccaccgacgagaaccgccggcactgggccgccgccgacaatctctccgcccgggcggccaacagcctggaggtccgccggaccctgcgggcccgggcccgatacgaggtcgccaacaacagctatgccaaggggatcgtgaagaccctggccaacttcgcggtagggaccggcccgcggctccagctgctgaccgacgacgagagggccaaccggctgatcgagcgggagttcatccgctgggcgaaggcggtcagcctggcccacaagcttcgcaccatgcggatggcccagtgcgagaccggcgaggtcttcgcgatccaggtcaccaatccgaacgtcgacgcaccggtcaagctcgatctcaaggtcatcgaggccgactacgtgaccacgccgtggtcggtgaagacgcggctcgatgacgagcggatggtcgacgggatcgagttcgacgcgtacggcaacccgtcgaagtattacgtgcttcggtaccacccgggcgacgggccgtcctggagcggctcgaagccggaccacgacgagctcgaggccaaggacgtgatccacctgttccgggtcgatcggccgggccaggtgcggggcatccccgagatcacgagctcggtttcgctcttcgcgatcatgcgtcggtacacgttggccgtgctcggcgcggcggagcaggcggcgctgcc
